United States Patent Application Publication US 2013/0034624 A1 - sequence listing, part 4

SEQ ID NO: 26183 - DNA, 1567 bp, Bovine  19866881616269
  misc_feature (1)..(1): n is a, c, g, or t
ncagatatgagtacaagtgaaacagaggaactgaatgagatcggtggattgtatcaatatcttgtcatgacattaaaagtagtttcaaaaaatggtgaaaactgggcaaaatgaatatggcatctctctgtattatattttacaaccacatgtgactctataaccatcccaataagtattgcaattttaaaattatacttactaattatataaatttatatattccctgtggtaaactcacaaagagaaaaatcaagagtctgtattttgcagaaatatatccattgtttaaagtgagttgctcatctttttcttttgctttccttattagagggcaagtcccacttcacagtgattgctcttcaaatattccatttatgaaatggattcagggcaattgctgtagtgttattgaaatctctaaattcttgtccctgaagtgctaaagagcattggaggggactcttgtgatttttcccagcggcaggttcccagccctgcagaaagggacacaaattggagaatgacgatcaggtgaaacaggaagccgggagtccagggtccctggagcaccccccccaagttgtctttgggactgtcaatgggtcctttcatgacctccttttcgcttatagagtgccacattctctgttattcaggggttggaactattgaggaggcaacaaaatattttttctcaggacaaccatctttcacctggattctcgtgcgggctgtgtgcgctaagtcgcttcagtcctgtctgatgctttgtgaccctgtggactgccagggtcccctgtccaagggattctctaggcaagaatcctggagtgggttgtcatttcctcctccaagggacattcccaacccagggatgcaattctcatctcttatgtctcctgcactggcaggtgggttctttatgactagcgccacctgagaatccctacctggatacacattcaccaaattaccactgtgatcattttgcaaaaatatgtgcaatgtttcataactgctcgcctttgtaagtaaaacacgcctttttaaaaagatgagatcagaagtgcagctgctaatggctaggttcgggtatgtttctagggcacttcgggccctccttccacctgtccaaactaagagatgcaaatcgtccctcgtacctctgtgtttttgaacgcacagacatctgtggctaatcacacaagaatatgaacgaactgaagcaccagagagacatctactggttgtttttttttttccttctggactggcttttcagagattattttcagtgtcataaggaattataactaaccagcactcatcagcatggcttataagtactgcatatacggctatgcaattatattgcccaataacctgggacaattaattggaagcctggaaggactgaaatgctcacggtccagtcttcccatcacaggcactttactggttttacagggcttctgacagccaggatggcagagagccaacctgttacattcagtgtagggcgagtggagggtaggcacacacagagcagttcacaaacatgccc

SEQ ID NO: 26184 - DNA, 1148 bp, Bovine  19866881770610
  misc_feature (1)..(1): n is a, c, g, or t
naacacaagtaattgtcacctaggtatcagaattcagagctctagaaggctctttattctgggaaacatgtaggttgagcatccttgaaatggaatcaacaaaacctgtgcactcccaggtgtgaagaggtaattgcaggtgcaaatcggcgatggcatgagcaaccagcaactgaatgtaataagcaagctgcgtgctgacgccttggtgcagctccttggaaagagtctttttacttgaattcatttgcatttctccagccggggaggtgcataatgaaacactctttatatattccaccaggcccatcagtcgataacagtttcaccttcagctcgtccatgtaacttgtaggggtgtgagtgtgtgtgtgtgtgtgtgtgtgtgtgtgtgtgtgtgcatgcatggcagttagtacatatggtatcaatgcttgcatttggatctttcaacataagaactgcttgtttgaaaattctgtcaaaatgcaggagtctgaatggtttccagaactctgtagccatacctggactaagaaagtggaagtcaagggcatgggggcggtagccgatcagagtggcagggaacttgaccttcatttccacgccggagctgatgaacatgggaccacgctcctcagcatttcctttgtcttgcctttctcccactcaccaagcttctttctcctgtttttctccctctccttcccaccccgctccctcaaaactaggagggagtagcccagttaaccaagatggaagagattaaaaaagaagagcaaggaaattctccgatttccattttgagcccaggtcaaagtctgggtagaataaaatacttcctgaaatgttaaaggtaaaaaaagatattaggattctgctatttcagctctgtttcggaagagtatatagcagaaccccatgcacagggcaagccttgccccctccagggtatagctttctagggtttggggaccccacagaggaccttgtggattcttctcaccagagtgggagagggctcactgcaaaccggtataagaaggcaattgcatttaacctccagcaaagatattacaagagagcatagtagttttccatggctgtttttaacaaattactaccaatttaggcttaaacagtacaga

SEQ ID NO: 26185 - DNA, 1873 bp, Bovine  19866881784463
  misc_feature (1)..(1): n is a, c, g, or t
ntgaaaaactgacacagcacaaacgtgccctggggaaattttttccgttgatgtgccccgtctgaagtggaataattctgggtataccttgtttcaccctgatgtcttctactgaaagaaaatcatagaaaaatagatcttgactcattggaaaagactctggatggtgggaaagatcaagggcaagtggagaagggagcgacagaggatgagacagttggatggcatcaccgactcaatggacaagagtttgagcaagctctgggagatggtgaaggacagggaagcctcgtgctgcagtccatggggtcgcaaagagttgcatacaactgggcgactgaatgacaacaacaactgatctctgatttactggaatcactccacattccttgatcgttcagcagagtgaaacgcaggaaatttttagctggagtcttccttctccaccagttcatggagaaaccactaagattcccatgcataaatttattacattattatctagccttcagattgcttgggggagtatcaaggatgcttttatacacaagtgctcagaaagtacattttgaaaataacagtgtgctatgaaaatgaatctctcacattgatcctctctcaattaacttttctcagccttaacatccggtgtcttagagagagtgactaggtcaataccaaatgttatatctaagaagaaaaccttgctaagactacccttctctccgtgaataatatttacaattgttgtaggtataagagcttgttttctggagtcaaccccattgaattcacatactgtttctaaatattagtactagtgagtccttgggaaagagacgggtgctttagggcttggtcatctgtgaaatactgctattaacagtcaccatctcgaagaatttgggagaaagttgggctgggcaattacccactaagggcttagtatattacatattcagtatggttaagtctgtacctctgcaccattgttcttatgaacaaaaatgcacttaaaatatctgtaattgatttttattttttgtaatcagatcagatcagatcagtcgctcagtcgtgtctcactctttgcgaaagtctcgcccatattgatcatcctaatctacatcttgtaatctggaaccaagctgctgctgctttgatcagcaatagagtcagaggccacagaaaagctctttctacatttatcatttatctttgcagtctggagcttctgttgggcctcccaggtctgaactccactcaactatgtgcaaagaaacccagaatgaagaaatattccctgctctatggagaggcataggtcttttgctcttggctggcaaatgatcagactctctgaccttcaatgtctggtgaatttcagcctcatttcatgtaattcccctcatccagaaaagccttgaagcacaggtgcagaaaatcctatcaatctcaacgacttccagtgacattgtctgcatctgctttcttccagaggaatctcctagcgaggaggggcagatttcacttgggaacctttggaagatgatctcagactcattctcattttgaataccttgttattaccacagagcatcttgcagtgtaaatgatttccagccacccttcgtagaaaatgacacagtctatcctacttgctgttgagcaggtcctggaatgactgtatcttgttagcaggggtttgagttcactgacacttaaaagcagcaaaggctggaaagttcccagactttgtaagttcagcttctttgatgggcgggtatgagccatttcccactttttcttttgtctcttgacttccccctccttccctactttcttttataaacactcaagaacacaagtaatt

SEQ ID NO: 26186 - DNA, 2055 bp, Bovine  19866880393601
  misc_feature (1)..(1): n is a, c, g, or t
ngctcctctgtcctggagttctccggcaagaatacaagagtggccattctcttctctagggtattttcctgacccagggattgaaccctggtctcttgcattgcaggcagattctttaccgtctgagctatgcagaacataatctgaattaatatgtagagaaataaaattttggcaaaacaaaaactaccatttagggaagttaaactgtatactagttttttctgtttatccttagcagtgaaatatattacaggtaacattccaagatatcagttccatggttaaaaaaatttttaaatatgggtccatggttaaataaaattaaaaaaaaaataccgtgcatactgaaataataatagaagtggaaagtcaagcattaatatcattcacataagattttaacttgttgtacatttttgtagttcagtaaatgttctcggcatcactgacttgatggacgtgagtctgagtgaactccgggagtttgtgatggacagggaggcctggcgtgctgtgattcatggggtcgcaaagagtcggacacgactgagcgactgaactgaactgaactgaaatgttctcgaagagccgattcactggagaagaccctgatgctgggaaagattgagggcaagagcaggggatgacagaggatgagaaatggacatgagtttgagtaaactccaggagatagtgaaggacaagaagcatagactgctgcaattcatggggtcgtagagagttggacacgacttggcacctgaaaaacaacaacaaatgttctttataataaaaaacaaaaagtgttatttacttaggacaaaaataagaatgtaagggaaggaagaccaaaatatttttatatgcttattcagagacacagaattttcatgaatttaagaggaatgaagatattcaaatagtaatagaaaatcattagacttatctgaatgttcaaatgcttatataagttttcaatccatttggttttataaaaccaaaactttgaacacaaaacagaaaagttaacattacctttttatatgttcccaagtatcaaactgcatctatttattatggatttaaagaacacagattttaaaagtaaagtacagaagtatctgattctttttaattccacaaatactagcatcccaaactaacatgtaaacaaacctctatgctgcttagtgaattctctccaatttctagaataaacttcgctttttaaaaattttaatgcaagcgtctgacaatctggactgccgagacctccacttcaacaactgagtcaaacacactgccagtcacatgactgcatagagagccagcccacccccacgtgatgctgcagctgctggcccgaagaccccactcggagaactctcgctggtggttaagagcactgctttgcagcgtggagaaagggctcctggctcttgaagcccacagtctagctagagaaggtgcagtgaacaggtgacttcaacggaccatcattagcttctagctgggtggggggggactaggcactgcgtgcaagcttggatgctgctgctgctgctgctaagtcgcttcagttgtgtccgactctgtgcgaccccatagacggcagcccaccaggctcccccatccctgggactctccaggcaagagcactggagtgggttgccatttccttcttcaatgcataaaagtgaaaagtgaaagtgaagtcgctcagtcgtgactgactcttagcgaccccatggatttcagcctaacaggctcctccgtccatgggattttccaagcaagagtactggagtggggtgccattgccttctccgatgttataccttataaaactattttaaacttttcctttcaacctgacttagtctgatgtttcagaaccattcttcaaagaataaaacactaaccatacatttgaaaaaaaataaaaacagccaggaatatttatgaagctttggttccagacacttcctggcactggagactcagcagtgacaggacccagtccctgaccttatggtgattccaggctaggag

SEQ ID NO: 26187 - DNA, 645 bp, Bovine  19866880483668
  misc_feature (1)..(1): n is a, c, g, or t
ntatatttttttttgcatgtcttactttacttttctcatatttctttcttttctcacttcatttcccctttcctggtgaactgatgatgaataaggctagattcttctactgccagccaggcctcctctgcctgacccaaggctgagctcacaatgacagcatcaggtgtgacggatgcgggtggaggagactcagatgagaagatgagccctttccaaatctcaccataaatctccaaactgctgaagtgctgcccactcgttacctcggttacagcccacacactctgtctcctcacagtcatagatgctcctcaataaaacgaagttcattactactaaaggaattttttttcttttttgcttctccctggaaggaacaaattattcttgtgttgaacttgctgcctactcacgcccagtctccttttgcgccttccctgtctctaaccccgctccctttcgcgttcactctctgtgctgctgaacctcactgattttaacctgtggagcagcaaacccaggcccggcagcaatacaattgaccttccttgggcaggccagagtaaggcatctggcttccctctgagatgcctgcttcactcattttacagcctttacaaactctcagcttttgtgctacca

SEQ ID NO: 26188 - DNA, 979 bp, Bovine  19866880505131
  misc_feature (1)..(1): n is a, c, g, or t
nagtgaaattgatgggtgcttctggggaaaactggtttgggaaaatctaagaaagtcggttgaaaatggctcaatatttttagttcagtagatgaggcagatcaatgacctggaaatgccatttagcctgatttgacttattttattgggctgaatctcctctttccatctccattctcccccacaaaatgagtacacattaatgtgctggactaagcatgcatgctaatattaaaaataggaaagggattattcaaaggtgacaaaaaaaatcctagttcattcaaatcctacagcagtaagaaattaactcagaagaaatgaaaaatatatgacatagataaagacaataaacgtctatttaatgactaccttgtattcaaagcaaagtaacaaaaagaaaaaatgtcaacattacctagaatgagtaagtagaaccaccttttctaaatcaatgaaatatatgtagcacttttgagtcacttaacataagaaaaaaaaatactataaattaaactctaagaaatattactttgaagtaaaaacttttaaaaactataaaaattccaagcaccaagaatatgttaattattaaataacagaaaatttccagtcaacagcaaacctaggcctatgatacatcacccacctttccttgtactgggttagcaactggtaaagtttttctgtttctccactttcatataagtagtctgcttgttcaaggacttcttcaatttcgaagactataaaagaaaaaaggcaaaataaagtaagtcttcccaagccagttggcaataattctaagacacatgaacacttttacatagaagcaaaagaaatcagatacagaaatcacctataaagaaagatcagaaattctgaacaatcaaaatgtgaagtgtagtagaaataagtatgaagctattacacataatacttaatattcacttacttaatgaatatgaatattcatgtt

SEQ ID NO: 26189 - DNA, 1804 bp, Bovine  19866880543816
  misc_feature (1)..(1): n is a, c, g, or t
ntatttcttccccagtacgtttgacgatgaatggagacctgcagaaactgaagcgtctcagaaccaagtcacctgatatgagtgtcctagagagaatgtttggagaaggcaatggcaccccactccagcactctcgcctggaaaatcccatggacagaggagcctggtgggctgcagtccatggggttgctagagttggacacgactgagcgactcactttcacttttcactttcatgcattggagaaggaaatggcaacccactccagtgttcttgcctggagaatcccagggacggggagcctggtgggctgccatctatggggtcacacagagtcggacacgactgaagcgacttagcagcagcagcagagagaatgttcatgagcaactaaccccaatgatgtctctggatctgctctgatttctgtcctctgcaaggtctgtgttgcccttcctttgattttgtgagcaaccctttaacacactctcctaattcatttggattagccagagtcagtttctttagcctgaaaattaaagaatcttaatcaaagtgacaattataaaagcactacaggatggcaaacatgattggcaggtcctttgttccgtgggttagtcattagattcttgtaaacccactcggttaagctcttggagcacactgatctaatagccctctaatagatttaagagaaacaaaagtggactaacacacaataatcttttccacagatgtaatttaaatcattttttcctcttcaggtgtcctattctcaagtttttcataaaaatacatttttccccttcaagaagttgacttttcacttcaaattcaaaatgcttcatcaagttagtaaagaattttggcttaagttgttcctagaaattaggtctactttccctcaatgccaattaaaatgacatagtctgacagagtggaatatctgacgtttccatagcagctggcactaagcagctttgcttactaattagtctcatggtacagtctgaaattccctttatccaaagaccagaggttagaagatatggccttttttgtaaacataaccttatgtgacaggaaaccaaaaaagcaaaatttatccagatgaaacagaaaggggaaatgtgctcagccaaactgttagattcaagctgagagttggcagaacacggggaagaaaataccctctcctgatttgttatcatatacatactcagtggaatacttaataatcaggcttgttttgtaatgcagtttggcaactggcatctccagtacccaaggtctttaaatttcattacaagacatgatttaacactgctttagaggacgtcggtctgctgattcagctccaccacttcctgtcaacaagaacactaatattataaaaaaactcttctcacgtactcagtggttatttaacaaagtaatctagctctcaggaaatagagaataatccatcaggccaaagagtttactgggaattcagagctgcctcacaatatccaggtactcaagtttatcctgagtcttctttacgtatcttttggacccaattctaagtggtataaaagtatggttttattgctcccctttggtgggcagcaaatcagatgtaatataaagaagccagagaaaactaataaaaaataacttctattacactgacagttatagaaggggcaagaaaattgcagaaaaagcaatcataaagctataaaacatgtgcttgtctagagtcatttcaaagacaggcaaatgagcttattcagtttagtagcccttgaggcaact

SEQ ID NO: 26190 - DNA, 5245 bp, Bovine  19866880546869
  misc_feature (1)..(1): n is a, c, g, or t
ntcgttttagttttctctttagagtgactttgaatgtcattttttggaggtatgacttttttgtatgtatttaataaccagcaatgctactttatcaaatgggaggtaagcagtttggaggtaagcagtcagtaacatccttagtaatttacaaaatgaaacagttttgtaaaaataagatttcttttagtcataaagccttttatggaggggaggatctgtctttgatattatgtagagctgtttaaaattttttccctttgcaatagatttgtaagaagttgccaaaacgtactactcagaaaggtcctgcggatcctccccgcagtgtgcctcgatggtaacaggtaacggcagtacagtatcaaagccaggagactgtacagtccacagacagtattcaggttttaccacttttaagtcatctcacagtgtcatctatgcagttgtgtcacatgtaaatttctgtaactgccatgatgaaaacacagaagtgttccatcacaaaaactcttagtgccgtcccttacggtcacacacattgcctgccaccatccctaatcctgacaactgctaataattctctgtagtcctctataatcttggcatttcaaaaacagtatataaatgaatcatacagaatgtgatcgtttgagattggcttttttcatttggcataactcatttgagatccatctaaatttagtcaacagttcctttttattgttgattatatttcactgaatgggcgtaccagtttatttaaactagccaccttgcggcatttgggtggtttcccaactttggcgtctgtgaacataaggtatgacttttatcagcatgcttttcatctctgggataaacgtccaggagtgtggttgccgggtcttttatagagctgctgtgtttcttcccccgcccctttacaaaggaatagctcccccttctccaagaagtggcaccttcctgagattctgattgtgtgctttttcagcctcttttgacttcccaggagtctgacctcccaggtctcacactgcctcctggcatctctccactctggatgagaactgctgcttccgggagtgagctctggggccccattattccccttcctgtgcagtgcccacttaatcggctcttgtgtccagagctgactgctagtttgagatgcctatttccccacatacatgtcagcagaagtgtgctgtattctgtcttctaagcataccgtagacatgggctacgggtgattacaactgcctctgcttgtgcacctgttaccttttaagaatgagagcagacatctgacttggaaagtggctattatcctactcttgttgccagaaattttcctatctgagtggactagttatagattttgtaaaaatgatttttctcagactcactttttaaaataaacataattacatcaaggaaaaaacaaaacaccctgagaacttgatggaattttgaggattaaaaaacatgtatttaccaagagtatcagtaaatatttaaaaatgctgttaacatctgattgtccttggtcaaagactggggagagaaaatttggaattgaggagaatgccacttctgttccaactagagtgcatgtgctgtggaagtgagggcagaaggtgccagttttgtactattactctttgttattggtttgggatccccctgcccttttttttttttttttttttacctacttcaaccacagaatatttctggtacattctgtaatgcccattggagactcttttgaggttcaaccaaatattcagactcaaaaagcctgtgacaggcttcatctggcaccagttcactcagatggacaaaaaccaagctggcccttggcggtccatgtcaggcttcccgacattcggatgaccttacagcagcatcaggagcagcgcatccgtgcagctccagaacgaccatcgccccgggtcacagctcgggaatcccaaagggacaggcccgtaagagttttcccatcccgggaagtccgcagctgtggtttcctgtcaaacatctggagtcttcccagtctggacacaatgtaccagttaggggtcctttttatgaacagaaaaggtactgcccacagcactgttggcgcaccaacctacctagttttgaaaacgggaaaagctagggtgtctgagctgcggcccaagggcgcaagtgtcggttaacccttttgccccacaagcactgaacacacaaaccccacgggtggcctctctccctggcaggcaggcagctgctctgatgggtggactcgtgcgctgacgcgcggtgctgggagtgaagggtgctgggcccgcctctgcacccactgcggggttgtggtcgggcaccgggggccttgcactcaacttctctctgctcagcccagcccaggacgggcactgccaagggaggggaggacacaggtctcaggttcctctcacggccagagtgcacgtaccagacaagccgggatatcctgcctacaggcctgggtttctaggaatcagacagaagagcctgacgagctctccaggacgctggtttcctctctgaagcccctgtggtatagcagtttcttaccgggagtgaggaggcaggcacgggcaccctgagagctccgtcaggcctgccacatggccctttccgcacgctgggcgacagccactgccgtctcagcgaagctcagcggcgctgccctcgtggtctaagtcaagtggcccttctcaaagactgggcaccctcgcatgtgtaatctgtcctgtacactcattctcttattttttattctttaggcatgagaataactagaaagtcaggaatgaggatttgggaaaagtattcaaccaagtggatcacggacttttatttcatctttactatgaattctgaataaaaacgtagaacataatctaaatatgtagaaaaagttttggcaaagcaaaaagtattgtttagagaagttaaattgtatcctagtattatctgtatgtacttagtgaaatatgttactggtaacattctaagatgtcagttccatggttaaaaaaaatttacgttaatgaaatttatagtgtatactgaaatgatacaagtggaaatttaaatttttatattaataaggaagccccacttgctaaagtagcattaataccattcacatcagattgttacacatttttgtagttcagtaaatgtctttgataatgaaaaacaaagtatttacctaggacaaaaataataatttatataaaaaggggggaagaccaaaatattttttatatgcttattcagatacatagaacttttatgaatttaagaggaatgaagatattcaaactgtaataggaaatcattagacttatttgaatatttagatgcttatgttaagtcttcaatccatctggttttataaaaccaaaatttcgaacacaaaagcagaaaagttcacattacctttttatatgttcctaagtatcaaattatatcaatttattctgtatttaaagaacatcatagatactaaaactaaagtacagaagtgtctgattctttttaattccacaaaaagctagcatctcaaagtaacatgtaaacagacctctatgctgctcagtgaattctccccaatttccagaataaactaaatggtagtagatctagtatatgatttactcatgtaagttacggtttcattaatgactttgactgactgtattagtgatgtagcaaagagggaaaattttcaactactgtatttatttaaaataaactgacaggttcaagcacccatcttaagaaaagccagcagcacttttttaacatattcaaagtaagattttggcctaagcccttaataccttcctgaacagccattgcagctaaacaccctcaagagatgttacatcagggaaaaaaacatggagcaatttgaacttcttcccctggataacagaaaacaaggtaaagcaaatccagactactttcaaatgagtggctgtcacgtttaatacactctgagctctataaaactagagccactatcatatatgcttatatagatatatacttatttttaataaagtctcttgcttgcttcaaaatttaaggatgatttttttttttcctggtcagtcatttcaagggaacaataaataaaagtagaaaaggatgagctgttttgcatatttctgtggaagaacggaaaacatttatacttttgagagattcagaaaattcactgtacagaatgaacagcttatatacactatctgtgcaacttttcttggctggggtatttaaatgcaagagctcctccaagacaagaagccacattcattcttgtccaaatccctctgtttcttctattgcaaaaagaagtttttcctttagttgttcataactcttatatggtggtagatccaagcgattaaaactgaacaaaaacaaaaacaaaatgtgttttcaataaaataaacaaaatatttctaatacaatatattttaaaaatacatttgaaaaactgaacaggaagaatataaaaattttgttggaagtattctaacagacaatttactactatattaatacttagtgaacatattaaatatacaaattttcttatagcaatcgactcaattttaagacctattcataaaaatattttagtgtttcccagagaaagctggaattacaaatgtaactgtagcagtaatggataaaaccactggaatatttttcctcttctctatagtatcaggttacattgtttctggagtccccctaacttctcttgggttaaaagagtccatttctttcactcattcacctatgaattcactcactcatcagttacttactgaatcttttctgtaccaggtatttctcccaggagctagtgatagagatgaaaaactaaggtccatgttctcattgaacttatattctagggtggagactgtctatcaccaaatatatacttttgtcttttcaagtatcttgtcatatgttgggcttccctggtagctcagttggtaaagaatccgcccgcaatgcaggagaccccggttctattcctgggtggggaagatccgctggagaagggataggctacccactccagtattcttgggcttccctggtggctcggctggtaaagaatccgcctgcaacgtgggagacctaggttcgatcccgggtgggaaaatccccggagaaggaaaag

SEQ ID NO: 26191 - DNA, 1586 bp, Bovine  19866880735367
  misc_feature (1)..(1): n is a, c, g, or t
ncgaaccagctggcgcatagtgaaaacaagtggagaatcttttaagaatgaagacgttcatcagagaaagctcaaaaaatcagtttacttactataataaaatagccctgtgagcatgacgctgtgcacaaaaaaaagaagttaaagaaatattgtttcgttgttaatatattattacaaacaatcaaacagtttaggcatttttttcctagcctttcttacttcttagatctaatgaagccttaacttgttatttttaatgtgaaaagcaaaaggtctagatttaatataacagtaaaaagtgtcaaccacagattggccctctccgtgggggcttgcgatcacctctacagggactaaatcaagtgacgcagcagctgcagacctttaatggcccctgaaggagtttagggtggagagcagaagggaggcaccctgtgttcagggaaaaactggcaggacaggtcttcagacagttaaatactgtctgattttatgaagccaattcttgcatctccgcatatctagaaaagcactaaaatccttcacggtcacgacggtttctcatgactagcagaagcttcacaagactcgtagaaacctttagggaaaacctgtgcttgattccatgtatttccccctttaccaaaatcacatgaacactgacctttcccctgcctctctggaacagtttctcagagctctccaaggtgctgtctctgcagccctcagattgtcccaaataaaacttaactcaaaactctcacgctgtgcattttttacagttgaccacagtagtgtacaaagctacttttctatttattttgtaccaaaattttcactgctgtttgaaatatcacacaaatcatattgatctttaaagttctctgaaaaatgaggaaaaaatttatggatctaagaaatgaaatggttttcaataataatagcatctctactgtgtttaacagtttatgaaacttttcacgtacattaatttaatcctgatttaattttgccatgtagacattatgttctccattatataagtaaggaagttaagtaaggaagttagataacctgctcaagatcccttagctggttaaaggtctaagtcaagacttggactgtggtttgactccaggtcccttcatgacctttcctgctttcaccatactaattatcaaaagaaaaaaaaattaaacaaataaacaaaaaactcaccccagtttgctgacctctgcaatacatgaaaaggctcctatcgggaatcttatgtaaaaaggtgactaatataaacgtgtctttaaaataatatatctatattggctagaagtgaaaacatttaagaaaattcttagctatctgctgcagctccctgcttctactttgctttcctttaaaaactctaaaactaaagccatccaaatgttgtagtaaattataccttcctctgagcgccgggagttggtaatggacagggaggcccagcgtgccgcagtccatggggtcacaaagagtcagacgcgactgagtgactggactgaactgaacatcagtgacgcaagtgtcaccactatcgtgctctg

SEQ ID NO: 26192 - DNA, 1463 bp, Bovine  19866880798137
  misc_feature (1)..(1): n is a, c, g, or t
natgctggcttcctagttttgttattgtcctatagttctaaaagcatgctacctttgggggaaactgggtaatgggtacatgggagctctctgcactatttgtaattatttcaaaataaaaagttaaaaaaattaatacccagagaatgaaagacccacatttaaaagttgaaaagcaaaagaaccaacatcattaaatgccaaaatgcaggcaccaaaaaaggacttgttaaatgtgagcatactaaagcgttcccgagtaacggtttgttgtgtgtttcgtggcctattctcgagacaagatacaagcctagaaattgggaactaactgctttttccccgtggggggaggagttcttagtcttttatcaaaatcccagttaaaacttggttgctaataaaattgctttgatttcatctgttcacaggctccaaaagaagcacttgctcagagcgtcttggcggaggtcccccagcaggtggtgggctacttcaacacgtacaaactccttcctcccaagaacccggctacgaaatgagaggcgccctggtcgtccgagcagaattctgttgtgctgtgtggagcaacagatttctcaccatctcaaatcgcgaatctgtcattttacacccttctcagaaaccctacgatttacaatgcaaacctagctctctctgggagtatgtctatttaaagcattctttttatactgtttttggaggagagcgctaacttaggctttgcccagtcaacccagtgattgccagtcattgcagtaattgcggtgaggctgtttggattaggagccggtgcgagaaaagcacacgttcttgtggttgtttactttcatgtgatgaaaatgctgtttttgaatgtttgtcaatagaaagaatgggaaattgttggaatgatgcaatttacaggttgctgtgctttgcttaggcgatatatgtattataagccgatgtccacaccagatgaccagagtttcttaaattagatgatactgaatttgtatctagaactatattttatgcttttccgtgggataaaactaccttcacttgtgcttgagttttgctgcaacttagacatgcacagttcaaaacagaatgcatcctcagaagacttcataagaagtcccaaattagaaaggaagacacatacatattcagttcttaaagctgtaaaatcaacaagtagaaggaacttcctgtaagccattttatttgccttcctggatctttcattttcactatttaatattgtaaatgtggtcagatttgaccttttcattgattgtatgtgacactcgggattctgtatgtgcattaatgatagcttgtcctagactcagcattattagatgatttcaactggagtttgttaaaatgggtaggactggggtttgtccaggaaaagctataaggaccaaacatataaggggaaattcggaattgca

SEQ ID NO: 26193 - DNA, 804 bp, Bovine  19866880845385
  misc_feature (1)..(1): n is a, c, g, or t
ngaattgaaggatttaagtaagcctgtgcatgtcctcagttgttaagccatgtcagactctggtgatgatgccttgaactgtgacttgcagacttgatcactctgcatatgttgacagatccatgggatttcccaggcaagagtactggagtgggttgccattttcttcttcaggggatcttctggacccagggatcaaaactgcaatacctgcacgtcaggcagactctttgccactgagccacatggagagccctttaagcagagtatgttaaaaaaaaaaaatctttgtatccatacttagaatttatgttccaaatatttaccaagtcagtagccaaatgaaaatgatttttgcataaactgtgaattaaaatttttaagaaactagacatttaaatttatttcatttaaaaatagtcggtttttttttagcatttatatttttcttataattttaaagggagaaatatgaaatataataggtgaatggggccagctgcatggtggtggatggtaactaggcttgcagtgatgatgactctgtatatggtgaactgcaacgctatatacctaaagcttatataataaaggtttgaataaattagaaaaaataaaatgattgattttaaacagtatattttcctaaaattaaacataatatctttgacttgcctctagcttagttgctctaggaagtatccaatccacatccattaatttcattacttgtgggccaaacacacccattgaaagtcaatatgtaaaatatatcacttagatcatatataaaggaaagtaaaa

SEQ ID NO: 26194 - DNA, 828 bp, Bovine  19866880870171
  misc_feature (1)..(1): n is a, c, g, or t
natttgaaagacaagaaaagatacggctgtcttcatttgcatttctttgggcattagtgaagctagacgtttttttaaagcgtctcatgatttatgttgtctgtgaattcttcccatcctttcctaccaccctgtgtaaatctcagttctcaattaccaatttgtatagaaacaaatacatgtacaataagacattaaatctgcaagaggatagaaaatactatttttcaatttgctatttaacttttaattgtgcttaagatgttatacatatagatgttacactttaagtatgtacgatcgagctatcgatacttttccgtaagaggaaaaaaaaagccccttcatcattaaacatcaaataaatttggtcacttgctcaataagaagtaaatttcctgttttgtcaggcttcccacatgggggcattggcaaccttccttccctaaacaaaacaacgaaaagttaacacattcctaagcactgggagttccaagtttaaacaatggataactattttacacaaactataaggttaaatatttgagaaaacactgcatctcacagagggcctggatcctctagaatcaaggcagaaaatgtctccccaaacacccaagcatcaccgtgagcctctgggtacacattcgtcctcacaggggctcaggctctgcatgaagactgaaggcgtggcaaactcacttacctacttgattgtcaacgtcatgtgccagccacagacagctcagtcattgagggcctctgctaccttgagacatggctctcaatcaggggtatttttgccccataggggccatttaagaatgt

SEQ ID NO: 26195 - DNA, 1604 bp, Bovine  19866880906828
  misc_feature (1)..(1): n is a, c, g, or t
ncgcttccctctatgtgagaggaagagtcgggctatatatcttttttgtgctgagaccttaaagatcagcttttaacctagagtgggtttttatggctgagttataaacatccaagagctaaaacctgacatttccttaagtattgtcacatctgtacatgatgtgtcagtaatttcagcacatttcaacttctgctgaatactatgccttaagcatgatgagatttgattttatctgtctaaacaacacaaagagaagtacagaggttgcagtttcatgatgaattgagtccatatagccagccacactgcaaaaatctgtgaaggatgcttgcaaaacgagattcaccgaaatggactagccattctgccacgtaattaattgctttaactttctttgcacatttcttgcataagcacaagctatatatttttaaaatatcaactaacacctttgtagtaatatgcaagcttgcaaagaagaacgtgtgcagtcacatgcattatgagactgaatcctcacaaaagcctcacatggtaggtaaaataggttctactgtcctcgttgggtcagaaaggatatgatttgtccaatatctaatcagtgaatggttgaaagtaagacccagtatcagtgtgttaaaagatcaggtgatcagcattagaatggactgtgtcatgtgagaactcaattcacctgggcttacagtaactcttccacttcctctgctgggtgtggagtgatcatatttgtggttttagatgcaagacgtaattggggcggctacagccaatcagaacaacttccgcatctgcatggatcataccattgcctatatgaatacttattccattcctaagactgtgcagaatcgggtccggacttggtatgaatatacgtgggcctctcaaggaatgctaggtaagcattgggaattactgattaagtccctgtaaaccgtgtcccataatgaaaatcctgtaaggcagcagcagagactaattggatttgaacaaaagattgggaaacaactaaataatctttaaagcactcacttaataccatgggatttttcctcaaatcaaacataacttactgattatgcaaatcctggaaggcttgctaaattttctttagtgtccaacagatgctagatattacacacattacctcatctaatcttcacccagaaaaatgggggaaattaggcgttaccaacccccttttaggagacaaggaaatggaggctcctaactgaaaaaaaattggccaagggcacagagccagcaaatggcctatactgagctcagatgtgcacctgttctccaaacccttgctgtctctgcgatatcatcctcttcccagagctcagcgctcagagcagcgatctttcaggccactctcagctgcaggtctctaccaggagacccttaatcattcaccgtgtctactgttagtaccatagcactggaggtaaaagtaacacttactaaaagatataaagtaagttaaagataatgtgctacttaacaataatcagattcaacttctagtttgcacctcaccctataaaaataagaactgctgctgctgctgctgctaa

SEQ ID NO: 26196 - DNA, 1443 bp, Bovine  19866880909182
  misc_feature (1)..(1): n is a, c, g, or t
nagtgccccacacagaataagtgttaggtgaaagacacttaaatgtaatataatgcattaagaagaggaaaattagaaaattagaaacattcaaaacattaaaatttctttgctatacattttttatttacaaaaaaagacctctaaatttgaatttggccatgtaaaacgtttggatccaaatcatttgtattagagacataattaggcgctgattctctgactgtcaggccaatccagagctaatctggggcctgattgtcatgcattgccaaggcatattcttaaatgggaaatgacgtgcttagtagcaaagacatagagctgtagaatttaattatatttaaattaatgccagaagagcctgaagagctcttcttctttgacaccaattaggagagaggctgctaaagaataagtcatctgctgaagagagacccatagtttatttgactctaatttcacataaagtctccagataactttcattttattaaaaatagggcaaaaaatcataaatgctgtattcagaaagagctttgatacttatcgggaaattgatgtgttgccttcctaggcactggagaagcacttgccttgaacaagtcgactttgctgatgacgccgaagttgacgtcaacagtgagggcgagctgcatggtggtcggcagcgtctccagcagatcggactcatcttcatagagataaacacatcgacccacaaagaagagtcattaataaacaatactgaagctcattaaacattaaaacaataacagtaacaaaatgccaagtcctgttttgtaaatgaacagctgcaccactgtctatattttccttacttttattgaaccggcataccccatcacaatggaaaagaaacatattttcactattgacgacacgacaattctgagtaattccagaactttgtgcttgctgaaactttagatataaaatttagagaggatggggccaaggctagtgagcaaactggggtgggaaaaggatctggttcccatcttctgattccacagccctaacatcctagggatggcaaagaaaaatgagtataatgagtaccaagtggcttacagagttctgtcatgatcttattggatgcttggggcaaccctaagtatgttcattcctgctttctggaaagaagaaaggaaaggggaaatgaaacttagagcaaaaaagtgttaagtgtcttgtttttgtgtaagtggtgagtggctgagctgggaatggaatctaaagaaaaaatgtattaagtgagcaaattcaaatgattgttatttccttgcttattaactcaatgaactatgtgaatacattaaagatttttctacctgtgaattaaatgatgggcctttaggctgataaaatggtccatgaacaagactacccattcttagtctatagtatagtaatggggtt

SEQ ID NO: 26197 - DNA, 750 bp, Bovine  19866880982155
  misc_feature (1)..(1): n is a, c, g, or t
nctatctgagagactgtctcctggctacagtcctcagtaatgttcccaagtaaaactgaatctcactgcttttaaattgtgattttggttttctatcttttattatcagtcgatatttccttgagagatgttctatggtggaaggaaaagctttgtgaacaaacaaccaacttggacaatcaaaatgcatgctaacatactgaagtctctgggaagtcctttggtgattagagcctttgaactttaagatagcattttccaaacaatagattggacaatggctccctttgtttgggcaactagtgtctttagtgacttgaagaagtagtattattttgaatagtatttgagaaattctgatttataacattaattattttaaaaagttacaaaattcatatatcacacaattgtataaatattcatgtttttacttgaagaaattatctacttttgaattcatgcacattttaaaatgtaattggagaaggaaatggcaacccactccagtgttcttgcctggagaatcccagggatgggggagcctggtgggctgccgtctatggggttgcacagagttggacacaagtgaagcgacttagcagcagtagcagcagcagcaaagatggaaaattcaccagtgggaataataaatggcattgttatgctgagaacattatttctatgaaaaaatatgaactaagaaaaaagaattattaggtagaaaggtcattttttacattattatag

SEQ ID NO: 26198 - DNA, 2413 bp, Bovine  19866881247940
  misc_feature (1)..(1): n is a, c, g, or t
ntcaaaatcgaaggatctgaaagctagaggggaataaagtgaggctggaggaggggccaatccgcttagcagaatcagaaaagctgcacagggctgccctggcagtccagtggttaagaatcttcctgccaatgtaggggacacaggtttgatccctggtctgggaagatcccacatgctgtcgagcaactaagcccgtgcaccaccactactgagcccagactctagagcccgtgctctacaacaagagaagccactgcaatgagcagcctgagcaccagagtgaagagtagcccccactcaccgcaacaagagaaagtcctcgtgcagcagtgaagacccagtgcagccaaataagtccatacatttttaaaaataaagaaaagctttgcagaggaggggccaactgagctggacagacagggatgaagaggtgttctccgggcagacgctagtaagggcaggcaacaccactgcacggactaggagtaaggcaggagacgtccagcacccctggtggtatgagcgttcaggttctcttctgttccaggttctgattttctagttaaaccctgtgtccagggccacatggagtccatagtcttgcccagtctgggcctctgaactgaggtggagcctgaccccaggctcagaccctgtcccaccctgcatggctcctctccagaacacagaccagtgtgggctggagtccactttggagcatcctggctggtatcttgagtgaggacaggtaaccctgcctgggtccgaaccccagctccccgtttaccagttgggtgaccctcagcaagtgattttacttctcagagcctccgtttcctcacctgtaatagaagtaaggagagtccctggagggctggtgggagaattaatgagttaatacaggtagatcttagaacagggccagaagaagcattaggtaaagctaaagttgagagtcctcaacacagccttccaggccctccttatctcatctctctccctctcccctcccccctagcccagacttacaggccttttctttgaactgccccagggtctggccatttcccctgcttagagtgaaatccccccaaatcctcgctatccccactctgtgttcaggtccctcaccacctctctgagatatcaggtcccctgcccctcccctcaccccactcctggctttagttttcttcttggccctttcgatagacatcacctgacattattgttgttcaatagctaagtcgtgtttgactttacaaccccatggacggcagcatgccagacttccctgtccttcactatctcctggaatttgctcaaattcatatccactgagtctatgatgccatccaaccatctcatcctctgttgcccccttctcctcctgccctcaatctttctcagcattagggtcttttccaatcagtcagctcttcgcatcaggtggccaaaatatcggagtttcagcttcagtatcagcccttccaatgaacacccaggactgatttcttttagtgcctggagatacattaccaaaacaaaggtgtatgtgtgtaggacaggtgtccagtagttctgaatctgtttttcttacttctcttttaaaaaatattgcaaagtcaagtgtctatctagcaccttgaactgccatcaggtaggcttacttcccgccctatgaggaaattcccagggtatcattatgaaaatgattaagccaaccctaatagaaacggtctatatttaaagtggtatgatagatacagtatgaatgtacaagaactgtacattcgtgtgatataattaccgtatatgtgaaacttgctttgaaaatctggatggatatttttaagtgcctaatcgcaggaagatctggaggttttgtgtactataattacacacagtgctgtgaaacaaaggagtgaatcctatagcattttaatgaagagactgtataatataggcttggattcttttgttttccttccctcctactcagccctttccagcagcatttcaacttctatcttttgagattagctctctgattaaaatattttaatattcaaaatactaatttaactttttcagctttaagttttattaatctttaaaaataaattttctcaatgtaggataaccaaggaaatatactcttcaatacttcacagtaacatcaaccaagaatcataggctaagatccacacagtgaagaaagctttagagattcatttagaaaagctagtcaaaagttcttgagtatctcagtgacactttataaccctctacaggttttgcattgtgttgtacagcttggtttgccctaaaaagtttctctgaatcaggtcttctggtgctaaaatggaggaagtgaaagttgctcagtcgtgtctgactctttgtgacc

SEQ ID NO: 26199 - DNA, 868 bp, Bovine  19866881410589
  misc_feature (1)..(1): n is a, c, g, or t
nagtttaataagtcgtgaaaagctgatctagaaatttccaaaaggaaaatatgttcattttcttgttttgtgatctttcttcttttttaagtcctacatcgaggcattctataaattctgtaagaatcatggtgacgtcacagcggaagtcatgtgtcccattctggaggtaagaaagagacctcgacttttttatgccaaataatgggctcacatgctttttatttatataatcctaccatttttttattcttagaagttcttttatctggaaataaaatagcaatatattttatcatgtgtatcatttgatgtcttcagtaagagtggtattttcccagttttctacagagaagagctatttgggaattaaaaaagaataacgcttatagaagtttgatcatgatttacttggatatagtatgaaggaagcagattacaattcgttaaacatttattatggtttggacaactggtgcactataggtacccataacaatcaccaagttccctcccaacatcgggcctgttgggaacccccacaacttgtcagcaaaacccactgcgggtggcacttctcattaagtcctaaaataaaggcccccacgagcaacccttgagcaccactgcagaaagaccacgggtggtgattcacagttggcgtgcccgcttactcctcacagcctggcagaggccaccttcggcacccacctctctaacagatgttatactccctttaattcctcttcatcatcacagctttcatctgtgcccagaggccctcttgcttgcaaatgtcaatctgcacacgcacgggagactcaggccagagatcaagggatcggagggggaattctggggagtagtt

SEQ ID NO: 26200 - DNA, 842 bp, Bovine  19866881614227
  misc_feature (1)..(1): n is a, c, g, or t
ncattatttggtattgggctaatacttttttattaaaagataaatatttaaaatttcatcttcataaaataaataagtaaatatttgaaaagcaaagcgtcttgagcactaagtctaataattcagagaccatgggagccaatagggagcaaattccttggcaggaacagaaatgtaaggcacactaaccctgagttcaaaggtgacagctcaaccccattctccagcacatctgaaaacttagttaaaggatagtcaaaggcagacatgattcccatattacgtcagtcttttgacggcgatccttaggtattgcatattaatcaaaagactccaacatcctcgattaagatttcagcaccaatcaactcttttcaataactttcttctagagaaaagacgaaaaccaggaagaagaggataaaggaaaagaatctgaagataaaggaagagcaacagcagagaaaccacttgaaacatccaaatgtgaaacgagttccattacagcggaggaagcgccccaggcaactagaaaggcggttttgcccagaggaactacccgtcactcgctcatcatcagcatggctccttctgccgaggccggggaagaggttctgacgatcgaagtcaaagaaaaggctaagcaataaatatgtgatgatctttagacatactctagctagttccctgagagattacagccaggatcggagtttaatctaatgacaggaaaagaccttgccggcacccttgagaaaccacaggcaaatctctagcttagtttctagggcgtatctgagagtggatcttcagcagggcaataagaagatattaaggaaaaa

SEQ ID NO: 26201 - DNA, 3414 bp, Bovine  19866880283220
  misc_feature (1)..(1): n is a, c, g, or t
nattctttggcactgcctttctttggattggaatgaaaactgaccttttccagtcctgtggccactgctgtgttttccagatttgctggcatattgagtgcagcactttcacagcatcatctttcaggacttgaaatagctcaactggaattccatcatctccactagctttgtttgtagtgatgctttctaaggcccacttgacttcacattccaggatgtctggctctaggtgagtgatcacaccatcatgattatcttggttgtgaagctcttttttgtatagttcgtctgtgtattcttgtcacctcttcttaatatcttctgcttctgttaggtccataccattttctgtcctttatcgagcccatctttgcatcaaatgttcccttgatatctctaattttcttgaagagatctcgagtcccattctgttgttttcctctgtttctttgcattgatctctgaggaaggctgtattatctctccttgctattctttggaactctgcattcagttgcttatatctttccttttctcctttgcttttcacttctcttcttttcacagctatttgtaaggcctcctcagacagccattttgcttttttgcatttcttttccatggagatggtcttgatccctgtctgctgtacaatgtcacgaaacttagtccatagttaatcaggcactctgtctatcagatctcagaccagtgtattagtcctctataatttttaaagacttcaaagcaaacctgagcagagttggttgtgatcttataaaagggaattacccaaattccctaatacacatctggaaaatgaatcttcacatggctgtggtgaggactggttgtaattatagggtaaaactactgaacgtataacatgagctctcagtgattgtttttccatctctgctttcaccctttaaatttgctaatgatcctctagatattgttatatatttctgcaaaattttagtggcttagatctagagacttttcaccctcacatgtgtatctatccatgatcattatttctggtcattatggaggatttgcttcacataatcattcaaatctgaataactgacggaggctctgtgatcttcataagacttctaaggtcaccttgggcatcagtttccagctgataaaagagagaaaggagaagaaagaaagtacagttacttaactgcctttgcccagcaatggtacatcatttctattcacattccctgagtgattactagtcatatggctttacctggatgtaaggggtttgggaggaggtgtgctggaaaatgtagttttacatgaagcagctgcttctcagcaacaattctgttcttgtcagggaagcatgactcttggtggacagtgagctgcctctcaccctttgccccagcacactctattcttctttcctctctttcactctgctccctgggttgaagcaagggaagctagggtgctgacgagagagtatccatggtgcaaatagcatgatgcacagtaggtctaaattggttggaaaaggaactgagaccaggaggatcctaaacatggtgattagcaagaaaagaaaaggaatcggagggctcattgaggttgtaaatgcagtaggtatttgttgaataaatgacaattgaatgagcagtgaggtaggggtaaagtggtaataactagaagaagaggagcatttagtcagagttgacatgtgaagagctagtatttcacaagtagaataattccgggtgagaaaaatgtccattgtgtccgttgaaatattgctgacatggagagaagataaatggcattgaatttgttgtagagctgggaggaaaggctataagaggagccatggatttatcaccacaggagttgttctagagggaagactgctgagcctgatgcagaatcactgggagcacattggagataagcctcccacctcaccagtaacattaattaccacatgtagtataatgcaatgagtatcaccacccccagcagcaaaaggaagaatgctccgttaggtcaatggttaatttcttctcaagcaactaaagactgatggaatttcactttcagttgctgttatccatttcttgatttagagagagaatgggactcaagaatcataccgttctccatagtgtttagttcttactttagggagcttgattgctcaaatagcaaaaggaccttggtctccccataatagaatctcacaatgtgaaagcccaaggacagtcctctacagcttgatagacattgtgctagagctgcagttaggtgaaatgtcagagtctcatttaactagaaataaaaacctttgaaaaagttctgagtgccactccctgtgcccaagcagatccagaatgtggtttaagctgctgtgcacaaaagacacagggagagggaaatcaaaggcacagaggccagcagagtgcaaaaactatttctagaagttccatgggagggtctggaataaagttaaggaaacataagagaatcaaagggtgtatcaatataaaaaaaagtcatagaattgaaaaaagaattgaactggtggtaactagttggtcagaatttagagaagtccactcaaaaagtgccagctaagtcagtgttgaaaaggtcacgtttttagctgatatcaactctgtgctgtgctacctacttggagaaagctggaaaaatgtttcttacaacaacaggccattagacaagaatgtcgagcttagtacatctaaagtacctcattcctttggaagaagttggagaaggcaatggcaccccactccagtactcttgcctggaaaaccccatggacagaggagcctggtaggctgcagtccatggggtcgagaagagtcggacacgaatgagcgacttcactttcacttttcactttcatgcattggagaaggaaatgggaacccactccagtgttcttgcctggagaatcctagggacggggaagcctggtgggctgccgtctatggggtcgcacagagctggacacgactgaagcgacttagcagcagcagcagcactatggatgcagtacaggctcaggcataactctgccttcaacactccttagccctgtgaccttgggcaaactaacacctctcagcctgttttttaaaaatcattatttaaatatttttatattcaaaacattatatgatttggtgtacagataacaacaaattgagtaagaagatcctaacaataaacattcagaatatggatcctattattgttatttaaagtaaaggttgataggaagggtcttgaggctttttatttttgaaaaatatgccctagttatttttgagcggcataatcactgagctagttatgagcggggaagtccttccttgatcttttatttttcaa

SEQ ID NO: 26202 - DNA, 1491 bp, Bovine  19866880382439
  misc_feature (1)..(1): n is a, c, g, or t
ntatcggatctataggacttatctatgtatcagatctataggacttatccactggttacaagtttgtacccttaaaatctccctaattcccccaaaccctggtaatcatcattcactcttaattcccttatttataaaatgtcagcattttttaaagtatgaacaaataggcatataatatagattatcctagtaccaaaaaggtaagtgctataaagtctgtggatattttctgattgttgaaagcttcattgtcaaatgaaaaataaaacagaagaaaagtctcaaatttttagtgattaataattaaaatacctcttccatatattcaaatatattttcttaaaaaaacttttaaaaccaactcctgtctctgtcactgctttttttctgaattgactctgacctgtatatattgaaaatttttttaactagttcaaaatgaactggttggaatcatatggaagtccctgaatcatatggaattccccagtatataatgaatcatatggaattccctggaatataatctgagaatggtttggaggatgattttttttttcccccttgagagtaatgtttaagactcggtggttttccctcatataaataaacattgctgcattcaaaaacaccctgtctgcttgttgagagcttccaaaagagcatatctggatagttttgattaggtcataatcttcaaaacatggcatgatttcagtgacaagtttaaattttttgtgccctattctaaaatgcagttaaaatcctgtgctttagagctattttttactatcataatttcagaggtgaaaatggtcaggcacataaactgttactgggctgtctactggctcgtgaaagggcactggcccggaagccagaaggtctgggctctgggttctggacctggctggctgatgctgcagtcagcaacgtctggatgggagtagagtctcagacatgtgctggaaacacgtacagcatgttcacatccagaccgctggcaccagcctcacctcaagaagagattcccttccctttgacaaatgatcctcgtgggtctgtctggtcaacatgagatgcatggcccatgtcccacccagtcctcccctaatagttagtccagggagaaaagcatcccaaagctcccagaccctggcctcccacttttttcatgacacggtagggaagaatcagattcctcaaggacaacccttgggcattgacaatcccagcatctaaccttaggagctagaatcagacagtgctaacaaaagggcctgctgggcaagggagtcccagcatctctcctgatgattcccatcacgcccttgcttcccacacactgtgccctgaagcgcctcattttccttttgctcttacttgattaatgcccttcataagtttgcctttcccacaactcaccctgcaggagctgctcaggcataaacttagctgtcgtgatctccaggagttgtcttccatctt

SEQ ID NO: 26203 - DNA, 688 bp, Bovine  19866880447362
  misc_feature (1)..(1): n is a, c, g, or t
ntctgtcttctgctattttattctgcctgccgtcagagcacaaaaatatacattcacatcgtctgtttgttgtatcgtattcttggatcatacagatttagttacaatacacacacaggtcagccagtgtaaaaagactgaaaagaatgaaaactacaaatgaggacagatgagctatgcattatgtaatgataaaacaggtgtttggggagataaacaatgttcaaaagcaaaggagatttaaatactgctgcatctgtaattgctttattctggttattagacaaaaagaaaatagctttcaaatgaaatccaaacttgctgtgctataattgaaatatatgaacgttgggtagttctgacttcatttacttttgttagaaaagcaaactttatgcatgggagggaaactttttaaagaaactgttcctagtgacattaaaaaacaatgttaattctgtcatgatgcttttgacagtatcatagggttgtttagcattagttgtgaattattggcttgtgcttctcagaatcatacatacaaaactgagcaatctagggggtgaggatgctaacatactatctatttttgtttataggacggtgaactttgacataataaaatacttgtatgatttcttgtgaaaacaagcttcaaagccatatggacactgtgacaatgactaag

SEQ ID NO: 26204 - DNA, 1439 bp, Bovine  19866880458161
  misc_feature (1)..(1): n is a, c, g, or t
ntgctttgatcatgttgtttttgttattttcaatccctcatttgttagtgtctacagaaaaaaactagctttgttgttttaagcagcctgacaggtgtccagggctgacttgctttgactctgtatttgaaatgcttcacattttgtgagcttgacaaatcacttatcctctttgaatgtcacatttctctaaaaatgtaaaaaagggagataatgataatactgctcctgcctgcctcaaaagattgggaagaaggtcaagtgagattctatatattaaaggactttgaaaaccacaaacactgcacaaatgtatggttttgttttaacggtctcaggagagttgtctgcctgaaatgcaccaagcgatccctgaacctaactatttgcaaacccctgtgttcagatcagaggcctttgtatgtctgccaaaggctttgcaaagctccctgtgtgatgtcccctctataaaccatcaccatggctaggtccagcaagactgaagattgagggctcatggcagagggtcacccacagagggccaagcctgaggccagaggcatcacggctagcatttaaaagaacaatatttccttagagtgagtacagagagtaaaagatgctgacgctgttgtgaacgttgtcagtactataggaagcattaggacacctctggcagaaatctaaccttttaagcaaatgtatgcacgtctaggcatggtaattaagtcagtcttgtacagaacagagtttagaaagtgaatcctgcttgatctacctttgtgagcaagttacataacctccctgtgccttagtcttatcatctgtgaaatgaagataatcataatgcacatttaatggggttgttagtcaacaaaagcgtccaaaatgcagtacttgggcgaaacctcaaaactgacagaaagatcttggttcgtttccaaggcaaaccatacaacatcacagtaatcccagtctatgccacaatcattgatgctgaggaagctgaaattgactgtttctatgaagacctacaacacattctagaactaacaccagaaaaagatgtccttttcatcataggactttggaatgcaaaagtaggaagtaaagagacacccagagtacaggcagatttggccttggagtgtggggcaaaggctaacagaaatttgccaagagaacacactggtcatagcaaatacccctttccagcaacgcaagagattactctacacatggacatcaccagatggtcaattctgaaatcagatcaattatgttctttgtacacaaagatggagaagcattacacagttagcaaaaacaagagctggagttgatggtagctcagatcataagctccttattgtgaaattcaggcttaacttgaagaatgtagggaaaatcactaggccagtcaggtagaccttaatcaa

SEQ ID NO: 26205 - DNA, 700 bp, Bovine  19866880485013
  misc_feature (1)..(1): n is a, c, g, or t
ntggctttgattgcctttaaagaatgggaagaaatgattttataatgtttaggccctaacacaatttttattcgatcatttaaatttgaaataacttaatgacaaaagtgggggcttcactgatggctcagcaggtaaagaatctgcctgcaatgcaggagatgcaggagacatgtatttgatccctgggtggggaagatcctctggaggagggcatggcaacccactccagtattcttgcctggagaatccccatggacagaggggcttggtgggctaaggtccatgggatcatgaagagttggacacaacagaagagactgagtattcatgcaatgacagaagtataaaacccttttaagaagatatactgaagtgtctattgttgctttttgaaaggagctgtgcactggcaagattgagctttaatactaatagatgtagtttcacaaacaaaaatgcctttcatattaaaattaagatgatgtctttatcttttgaaagggttcatttcctttcagatgaaattatgttgtggagattttggtctggcttcctgaggagacaaatgtgaagtaaacttcagaattcaaagacagaattccatggcgacagtggtgaggaatctgtgctcatttgtttttgtagtgatgcatcatgtgaggattttctaacaaagccatgcattaggatgtacaag

SEQ ID NO: 26206 - DNA, 1573 bp, Bovine  19866880544019
  misc_feature (1)..(1): n is a, c, g, or t
nctagtactcttgcctggaaaatcccatggatgaaggagcctggtaggctgcaatccatggggttgctaagagtcgggcacaactgagtgacttcactttcacttttcactttcatgcattggagaaggaaatggcaacccactccagtgttcttgcctggagaatcccagggacaggggagcctggtgggctgccgtctatgggttcgcagagtcggacacaactgaagtgacttagcagcagcagcaagctccaaatcagtcaattacaaatgccctgtgaagagagcttttccaggtaactgtggaaaaagtcaagtaatgacaatgctctggagagaggatgttttggagagttccaaacccattagcccagtggctactaggttgttaattgtgagactcctagtaatcaaggctaccacagcgaaggggaatgagtacaggataagtaagaatgccacaaaggttactgttactactgagattcagctgtttttctttaacagatgcttctcagatttttgtaagcctttggttaccttctagagctttgaaaaatttgattttgataaacttgctagctatctcactgcttttatggaggtgtaatttttaaagactcattctcaaagttcttcatcccttcaaacttttaaaaataagtattgtaaaactttttcctgtactaaaaataacaaaaaatgagaacatgacatttgaagcaatgatcttcaatttagaaccacttatagttcacagtattctaatcctggtaagaaagtacagttgccttagctcatcctagcattaaagtaaaactcattctactatttcttgaaggacagaataacaattggtgcctgactaaataaatgaatgaatgagtgaacacatgcataattgatgaatgtccttcctccccagaagctcaagtgtgaccaagcgaggcaggctggcagcctaccaagatgccttctagggaggcaattattatcttggtgattttaccctgatgccaagtctggcttttggatttgcagactcagcttaaagctagtctgtcagcttataagtggggccacatccctccgacagcttctcattaacccagctgagaaagatcagaaagtcaacttattaatttactatataaactataaattccatgaggactactattcagcaggtctagtgcatttccttcctccctggaggtagatctagatggaaagacaaatccttttgagatgtttgccaggtgagcacagaaacacaacaagaattattataaaacacaaatgtttaatgacagtgagctactgaggcctgagaatctattaaaacttagcttctgccttgttcctgttgcttaggagactagaaataatgaaaaggtaatctcaccatataagatctaagatctttttatctggaggagggagttagtagagaggtaaatgaaagaaaggcaacaaatgccttcttttttggggggtggggtgggggagggggcaccgccagtctttgttggaaagttgagcctagcaggagttaggcggcaggccccagt

SEQ ID NO: 26207 - DNA, 1349 bp, Bovine  19866880562057
  misc_feature (1)..(1): n is a, c, g, or t
nagaagattgtgtaaatcctgaccctggcctggcagtttctacaagttataatttatttaaagtttggttttgtgaaaaaatgctcttcaaataggttccagaattttctttctgctccaacacagaccatgaataacagaactgagtataatgactattgtcaaaggaatcatatccccggtatggtatatgcatcacagttttttacaaggcaagaatggagtaatttgaataatttccttaaaggtcatcacctcctttactaccccctccagttccccaattttttagattatggtttaaagtctatttttcatttttatacaaacataaacttttatacgaacattcactgtaagtcctagactgatgtatttcagtgataggtttgtacgaaacacttctactgacatcattttgaaggcaccactgattctgtgtccttgatgtttaattatggggaacttcaccactcagccttcctctgtaataaaaactgaatggaatcatagttgccagtcaccttatatgcaaaccttacaggacaccagggtcagacacgtcaagcaaggactcaagagcccaattgctttctggaatcttctagttcctacccactccacttgctgcttgtctcctgtatattaagttccattcagaaggcaatgaaagaaaagaatctggatctttaacaaaggcaaattgcttacagaaaaataaacctccaatgtaaatggttttcagtttttaaaaaatggacattttgacagttgactatcacaggagtcggggctctctgtgtataggttcccacccttgctgaagatggaatgggtttttctatgggtttggggagctgtggagccaagtgcaggacagccacgatttcaggtcatgtggcccagagccagctgtaggctctggcatagagagtggcttgtgacgaccaggctggcctggtgctcttggcattctggccctagctgggagttgagtagtctgagttcatgcttggtgcttctgtgggatgaggaaaagcattgccagtgccagctgtaggaaaaaaaaaatgcccaagacctgactccagctctccacatggctgcctgctttttcccaagttcaggccttggtctgattcctcctcagagaggacttcttgaccactctatccagcagccaccctcccaaagtctatctccttatcctgtttaatttcattcagagaacttgtcactgtctggaatatatgcttcatgagtgctggagccatgtggattttgtttactgttgcaatttcagcacctagaacacacctggcacatgtaaatactcaataactttttgt

SEQ ID NO: 26208 - DNA, 1520 bp, Bovine  19866880587224
  misc_feature (1)..(1): n is a, c, g, or t
nacaaagaggaccaaatgagggatggaggggaggtaagtattttaaagtgcttaaataagagaccagagagagtacattatgcaagtcagagcaactcagtttattgtagattcctatttgggaaacagaaaaaacagaatggaagcttaaaactgtctgcctctaacactgacacctgtaactgtgaacagctggactctagaggcaggaagtctgatgctcagagccctgtttttggggttgaaatgaatcacatataccaccctttctggaaagcagtcttgtaagaaacaggcactcaggtcaaatatatgaggctctggagttagcatatatattgattaaagtgaaaaaactacatgagtgtggagatgttttccctataatattgctgtcttatttatatgaaaggaatgactacaatacgtttgtgttgtttattcttactgactacatgccaagtgtgaaagtggagcttattaaggcctgtcaggaaaattggctctggcagggccatgggagggaagatgacagctagttggctggggtgttattttggaaacttggaagaagcttcatgatgtgagtactatgtgaatattttaaacattgccatttctgtgtgggcaaacttgattgcatttggttgataaagtcacatccagtacatgaaagaccccagggaagaattcacagattggtaaaaatttcctcttaagatttcaagtttaggtggacctttgtgactcaaagttatttgtaactgggggacggaggacagccaatgcgcaagggaggcggctgtccacaccacaaatgcctggtgatggtagccttcacagaaatcatcaatgataaaacgaaaaatatggtttaacggataagatataaaggcacaaaactaaggcaggtacggtagatactttgaagagtgcgcgcgtgcgcgcgtgtgctcagtcgctcagtcgtgtccaccccatgcactttgccaccccatgcactgtagccccccaggctcctctgtccagagaaaatgccaagtgtggctactttctctgctggtttgccacacttattattgctgttggattttgggtcacgaatgggaggattctggtcccctgtactgtggaactgagatatgtggcattatgcttaaagaacaaaaaggtaaaattttaagtttgttgtttaagttacctgtttcatgtgataggccacaaaatgccaaatggaattatagtcattgtttttaaatacatgtcacacttaggtcagaattgtcaccttttccacacattttgtttggtgaagggagataacatattcgatgtaattcctgtctttgcatgatacttaaaactaggtggaaacttaatgcaaggactatcttagtgaagagcttatctgactatgtacgattttcagggatgttttaataaattagaagcaggaaggggcctctacatacaaatgtcacataaatgattatgggaagatgaaaaatgaatatgggaag

SEQ ID NO: 26209 - DNA, 2384 bp, Bovine  19866880588880
  misc_feature (1)..(1): n is a, c, g, or t
nttgcccctgcaatgtggccaacagccatgaggagccttagcatgacctctgcctagtgctgtctctgttctatgggggtcctggcgaaaggtgggctctcttatgtgaaaatgagcatctctacccatcaaaggcatggtgagggaccctctgcttgctgcccatgagatagactttgcgggcagatctgtggtcaaaggcaaacagcaaacatgttttttctttaacttcaaaacaatacatatgttgttatttttcagtcactctgcgttgtgtcaactctttgccaccccattgactgcagcacgccaggctcctctgtcctccactatctcccagaatttgctcaaatttatgtccattgaatcagtgacgctatctaatcatctcatccttttgcagcatcagagtcttttccaatgagtccaatgtgatccccttcatggattgtagtcttgtggcaaagtggcttgtgtaagtcaatgaagctatgagccatgccgtgcatggagagttctgacaaaatgtggttcactggaggaggaaatggcaaaccactccagtattcttgccgcgagaaccccacaaacagtatgaaatacatatgtgtgtgtgtgtgtgtgtgtatatacacacatatctaattttatttattcaccaattccattatgtgaatttgcctactcattaaaatttatttgtaacccacaagttaatagacgtagtatttttgcagccatttgaggacatgggcagaggggcaaaaagatttgagtcacccacggacacgtccccagctgaggtcaaattaggtgacattttatactgttaacaaggatccttcgtccatttaacatttttgcgttttttttttttttttggttggtgattttgttgtttaaaatggctcccaaacatagtgctgaaaaatctgcctagtgttcctaagtcaaagagggctgtgatgtgcctttctggagaaaaaaaaaatgtgttaggttagtttcattcaggtctgagttacagagctgttggctgtgagttcagtgttaatgaatcaacaaaatatgttaagtagagtgtctttatacagaaacacacataaaacaaggttatggattgattggttgatgaaaatattgtgaccagaaacctgaccccacatttcccctagaagcaatggctcagtgttctgtatttcagtgtttgcattgattttgtagaacatacctaccgcaaataataagaattaataagaattacctggagatcaatttattcatacatatattcagtataaagatgaaaataatataaatgcatatataaatataaagtcataaaatacataatctccctttatccacttttcttctctaatcctgctcctgtctcctaggaaaccattattaaccatttgggatatatccttccatacctttctttattaaattatatgctgaaatatatgtattatatataaattttataagtctattttatgaaaggaattatgcatgtacatatgacttgccttttatcaattaggtgatggtcagcaaattttttttctgtaaaaggccagataataaatatcttctgctttgtgaaccagatgatctctgacacccgtcctcaactttgccactgcatttcaagaagtcaactgtagacaatatgaaagtgaacaggtgcgactgtgttcccataaaactttatttatggacactggaagtttgaatttcatatgatttttatgtatcataaaatattgctcttcttttgattgtatttcaaccatttaaaactgtaaaaaccattcttagtttgcaggcagtacagtcacagacgggctggatttggtttatgggactcactttactgacccctgatgtagattacatgttgaagatctctttctgttaatacatggctatatacctcattgttttaatggctgccttgtatttccattccatgaatgtacttcaatgtatatagctattttccttattgaagaacatgcagattatcctcaatattttgctataacagaacatccttgtgcatacatcttgaggcctttgtgagtgtttctatgcagtagaattctaggattggagctcccagtccatccctctgcattctacctctctcttggcaactgcccatctgtgctctttgtctgagaatctatttctgtttcatagataagtccattggctaccctagttttaagcaggagagcgacatggttgaatctgcttcatttggcataattttttgttacgagaataattttagattcagagaaaagttgcaaagatagtacagaggtttcagtttagccagttcctcctattattaaggacttatacgggtt

SEQ ID NO: 26210 - DNA, 1953 bp, Bovine  19866880594992
  misc_feature (1)..(1): n is a, c, g, or t
nacagtagttttttcaagagctggagttaggaggcaatcttaggccatcagtgtttgctgactgaccttttccaaaggaaaaacaaactttctattactttcatggcaagaggtagtttaatgatttggagtaaggtgttcactgaagttaaggttctatcctcccatgtaaactgggacagaggtggcattacctttcttgatgattatatttcaatagcgagtagcaagggggcttctaggtccttgagaaagacagttctggaatgcaaaactgacaagagacttcttaaagacctgcatctcaagaagacagggaaaacatttacaagttttccaaagtaaatgctctaagaaaagggaggttaggatcctagagtcaggaagtttgtcttctatttagtcaacctgagggcaacactcaggcaactctggtcagtggtgtggttaaggaacagaactttctgtttaggcaaatacagtaattgatgtagtatgcagactatttgtggttgactcaaaatcaaaatttcaatgcaaatatcatagagtaaaatttctaatacctaatatatggcataaaatatacagaagattctttggagtgtttcatggccttggagttataaagtgactcaaataacaaaatgttgttaagtagtaaaagtgaaagtgaaagtcattcagtagtgttcaattctttgtgatcccatggactgtagcctgctaggttcttctgtctatgaaattctccaggccagaatactggagtggatagctgttcccttctccaggagatcttgccaacccagcgactgaactcatgtcttctgcaaggcaatggcaacccactccagtactcttgcctggaaaatcccatggacagaggagcctggtaggctgcagtccattggggtcgctaagagtcaggcacgactgagcgacttccccttcacttttcactttcatgcattggagaaggaaatggcaacccactccagtgttcttgcctggagaatcccagggacgggggagcctggtgggctgccatctatggggtctcacagagtcggacacgactgaagcgactcaacagcagcagcagcttctgcattgcaggcggattctttaccatctgagccaccagggaagcccaagaattctagagtgggtagccaatagggtaccttcctgacccaggaattgaaccaggttctcttgcattgcaggtggattctttaccagctgagctaccagggaaaccctgttaagtattagtcgatatcttatcttgataataccaaatcatagaactgtcagttttcaagtgaaaggaattattcaaatgtaacttatactatatatatatatatatatatatgtgtgtgtgtgtgtgtgtgtgtgtgtgtgtacatatatacatactgtatatatatagtatgtatacactatactatactacatatacatagtacatatatacatagtatagtatttatactttatatatatgatataaataagaagaatcacaaatgtttattagaatcattatatgtcaattcatctaggctataattttggaagagataatctagtttaaaaaatactactatataaagaatgtcacatattatgctgtaacaaagtgatacacattaaatctatggatctgatcatttggaagcagaaagtatccaagaagacactctttatttctgtcaacaagaatcagtttctctgagctaaagtcctattctttccataaactgttgaactgaaaagtctttagaaataacttttcttagatttccctctatcttacctaatttggagggacagttctgtttatgaaacttcatattcaagacacattaactactttcaaattcctgatgatattagtggcttattatcagaaatatggcaatttagggttatctcattaagatt

SEQ ID NO: 26211 - DNA, 1010 bp, Bovine  19866880673761
  misc_feature (1)..(1): n is a, c, g, or t
nctttgatggaaaatgcagtgagttatgggagagctgcagagatgttgtagacaaggctttcatatgcccatattcagtgccgtgttctgggggctccagggtagtggccacagagaggagaaatatgtgtagcatctattctcaaatgtgaatgattgatgaagacctctggagagggaggaggatgcatagggacagccgagtaggcagaataggggaggcaaaatagcagataattttacacgcaagaaaataactatttttgaaatgtcagagtagcctgtcagccttgacaaatttttttttttaaagatttggaggaaacttggcaagtaattacagtcagtgactgtcattgtcaagatagttctgtaattagagaaattcaaaatatgtctcatttagagacacctccaatagagccacaggggtagccatcagttggaaaaggttaataaagtcgaaatagtcagacaatggtgcttaagctaaaatgctggcagtgtccatgacaggaaaggaaattctgtcatcctaaaacacggacccttcttgaaagcaaatttaaacagagcaatctggaaagataaatgggtcttggaattcacagtaaaattgaagaagggtacagaggaaaagcctactaaatttctgtgcattagctattcattttaaaatcctatttgttttcttaaattaatggaataataagtagtttgggaagggtgagaggagaaagattctttctttagattcataatacagttggaatccatttttgctcatgtggaaacctaatgaaatggttgaagtagggcaactggctgtctacgcagtcagtgtattaataggcaccaagctgaaaacttccaccataatttggaaaaatgagaaaagttcacccatgaaagcatgtaggaagcagatatgtatgaattcaggtgctagttggagggacaaaatcttcatcacttatttcataaatagagaagcagttggatgcagctgt

SEQ ID NO: 26212 - DNA, 1335 bp, Bovine  19866880707473
  misc_feature (1)..(1): n is a, c, g, or t
ncttgttattgaggtccctcagactgctctgggccctgtcctcactgcatacttgctgacttgaattcataagtcaccccaacaacactgtttcttttttcttgcttgcttaaattggttttgggttttttttcttgtgtttgcaaacaaagacccctactcacttagctatgcctctcaccttgtaaaaattttcttttcagaatatcagtccccaaggccaatctccgtttactctgttctcttcacagtctctaatagacacatggtgagtgacctggggactcttaagtggagattcttcaagaaaatatagtaagggcaggaaatgagatgaaaaataatactaaacaaatatttagtattttagatgtcacatccctttttttctaagattggagatacttccttacacatctgaacccctgatacaccaaaattggatcctacttcatcagcaattcaaataaagatgttgatcatcgaccatcagcaattcaaataagcacctggcacccctccagagaactctgcatattgtactgttctcaggaatggctcttgtttgtttctctctagaaaattgtgcacaggcaggcttaggtgggagactttctccagggatttcctggaaaccaccttgatgagagccaattgtggcccctcaaaccttctcttttcccctcttttgtcctgtacttccttgtccttcaaagtcttccagccccaaccctatattattaacattaagacttttggtttagggacttccctggtatccagtggataagactccacattcccgatacagggacccagtttctatccctggcttaagaactagatcgcacacatcaaaactaaaagtttgcatgcctcaaataaagatcacatatgcctcaaggaagactgaagatcctgcatgccacaactaagacctagcacagctaaataaataaataaaataaatattaagaaaaaagacttctggtttaggatacagaggcctcttggaggctctttatccaaagacattgttttccattaatttctaagttcacttcttctttgtcttcctcatcaacttctttgacatttcagtgttttccaaagatgttagaacacagtaaaacttctccatcatattgaaaataaagaatatataatttttcattacaaatcttaaatatttttgaaactattgatcaaaatccatttttaggctgcaaaatcaatttagtagattgtgtctaagattttttaaaaataaaatcatataaagtagaactgaacagcaagctctgggagttgatgaggatagggaagtctggtgtg

SEQ ID NO: 26213 - DNA, 1602 bp, Bovine  19866880738523
  misc_feature (1)..(1): n is a, c, g, or t
nattattacatataatgtttggggaaggctagtaacttgaagtacactacactatttcgctataggaataactaggaacttcgtatttgtttttggttaatccatttttggaaaatgaaataaaactttgctagaatttttatagatctcacaaaatccttctgcttagacattttgagcaaatatctctaggaatatccttccctagaatggtagtgatgagctacatccatagatgtatttatcttcattcttttatattggcatattttcaaggatattgcaactaaaaacatgaaatccattatataaatacacaagtccagttttggtgaaattgaaattctttcagaaggtaggaattgcctagtgatcaaattggaatgaacaaatgatttgttgacatgtctaattccacttaaagcagatgaccttctcagatccctcactatccctcagggtttttctctttcccagctagatttggcatccatagatttaaaaaggtgatgatctacttaaatggtttctattgttatgatattagcatttgtactttctcaaaagtggtccaggaattggactctaaagtttctttagtttgaaatgtctttggaacttctggataagtagtttagcatctccaacctagcattaagaccagatactgctgatcttacttaagaatttgcactatcttccagccaaagctgtggcttattgggtaacagcagcagggaccacaaatcgagtggtgaccagaagactgttgaaagtttttagtaaaggaagaccatgaagcaagaagcacatattttatatatttcaagctctacaaatggcaatcttccctcgggtattccggtctctggagaaagaagagctgatcacaaatggatgttttgtgtccatttgtgatcacacaaatcagatgggcttctgtacttaggaagtagcagtagcagaagcagtagtagcagcaataatgtgcatgtgtggatttgaatgctggtttatgtgtagtatgttacttaaatttactaaagagatacatctcaagttgtatgtgaagtttattcatttaagaaagtggcattataggatagtattttatctttcaataatctgtgctctccctgatttaaaagcaacctaatgctctcagtaaaaacctgtatttgcatgggaaaaagcccagtttgcatttggtaagtgttcaaatatggaatatcatggcaaatgatgagcaaaagaatagacaagattgatccataattcccataggcatggaatcaacattttcacctcttgaaaggataaaaagaaaaggagaaaaatatattcaacaatgtcctggcatttgccattaattgtaacttaacccagttgcatatttaagagcagttacagcccttcaagatttatataacacagcagtatgatttatttacaaagagctccttttgatgtgctctttgaaacagtccagtaaagtcatatctcttccatccaaatagcgtttgatttgaattccaaattcagtcctggaaagaaatgcaggcagtcaaatgcatttgctttggacatgagccatgcacagat

SEQ ID NO: 26214 - DNA, 1775 bp, Bovine  19866880743849
  misc_feature (1)..(1): n is a, c, g, or t
natgtatctaacaggaaaggaacaatattcaataattttataaaaatgcctaaatgccagctctacttggtaaacatcccagggaaacctaaaacactaagggtccatgaatctggcaaagactattcttaacagaatctccagagatctgctgaagccatctagtgggaactgcatcagtaagacccacaattttcatgtcaccaaattctagacagaagacaagaggggaagtctgctgggaaatttctgggaaactgagctaaaaagagctagtccctcttcttcctttcaatattgtcataccttgatgtgagaatggaggcagctgcagccatttgctgccagcctgaggatgaagccagtgcacagagaagggcagggggagctgggtccctaagaccctgagcttggagctgccctgccttggagctcctaggtgggttttcttcctgcttaaactgttctgattggggttttctcttccttgcagggaaaagcactctctgatatcaaatgttgataataatagtaatcagcagcaacatatgaaaaagactgatgaggttttctatttctctatgacagactttcaaagagggttctacaagtgaattatttaatcaaagtattcataaaagagataatgaagtccttataacccatttaaagctgccatattctaagtttatatgggccatattggttttcagattttcttgggctttatatttcagccggaaatgctggaggatggggtagataaataccatgttccatacgatgaggcttatatctacttttgccatcttgataaggctgcggtcatatagtcatagaactctataaagtaatgtaaacaaatggttttcgatcaccccattggtctttttttaaattattattgctttataatgtttacttaagcattggtttttaatggtagattatcaaataaccaacaaaacacattttttatcaagtaatctgtctctgtgctgagaacatttcattaacatgatcttgtttgatcttatgcttaaattggcctttttctgattatctgatagccagcattccttagggaagacaacctttttactctttgtagccagtactgagagtttctctgcctaactattatgatcatcccttttctaacatagtgttgctcctcaaagttcagagtggttcaaaaatctccttaaggacttgttaaaacagattgctgacaaactttaggtctggagtagggctcaagtatttggatatctaagatttttcaagtgacactcatgctctttttttacctttttttgtttgtttcctttcctgctttgaggtttctagatctggaaactgaattgcataggctgtgagtgcagtcatttcctccctgagtttaaggggatgctgtagcacagtgagtgggaacatggccattggtgctaatagctcaagttcaagtgctggttttctcttttcagctgtccaacactcagaatatttatgcccgtggatgaagttcttctccttattcttatgttatacagtgcgtgcatacttaaggaatatatttgcctttgtgatgaaatagcctcaagagtcactgtgacctaaacttcccccaaactcttcttaacccctcattttgtattgagcccagagtaaaataatagcagatagaccctctgtacgttgtaagcatcatctgacacttgggttatcatctacttcatgaatggggttgaattttcaattcattgcatgctcgc

SEQ ID NO: 26215 - DNA, 1067 bp, Bovine  19866880769952
  misc_feature (1)..(1): n is a, c, g, or t
ntctcccagagtttgctcaagttcaagtcctctgagttggtgctgctgtctaaccatctcaccctctcactcccttctccttttgccttcaatctttcccagctacagagtcttttccagtgaattggctcttcacatcaggtggctgaagtattggagctccagcatcagtccttctgatgaaaactcagggctgatttcctttaggattgactggtttgatctccttgcagtacatattggaatgtacaagtacagtataaagaaacatccttccattttttttaagccaaaataatgtagagctaggacccattccgtttctataaaatccaaagcaaaaacgatactgtaaaaacctagaagaaactctaccatgcttacatttccactgggaaatgaattcttaacaaaaaaagaaatttctgacccaggatagacaaatggagatagaaagcaaagaggcattcccaaggggagctccctggcaaattcggagttgtctatgagacatggagcatagaaagattgtcaaggagagagaaattccccctcagaggaaaatctaaatgtgtttttagccacctgtcaccccagagggaggacaggatggcaatgttaaattggtaaggttgtaaaacaaggaactgtacaaggccagctgaggtgtttaaatgcattttaaccaatgcaacttcattgctgaaatccagacagagactgatgcttcctagatggcagattcgaaacctgcatctgtttcaccttagaaaaccagcatttccattaagattccatgccacaaaaatagaacatgctgaattttcatctaaatcaaatattaggaaaatcagaaaatgaccccggtttcagaaagagagagagagagtggagagaaaacaggaatccaggacacacaggctccattgcaaacatgtgaaccagaaaaaaaatcattctgtacaaacgaagtagctaccgaaggaacaaagacgggagggggtgtgaacagaaagtttattcacgggccagacaggacagcagtgatgagttctaagctaggacag

SEQ ID NO: 26216 - DNA, 733 bp, Bovine  19866880773676
  misc_feature (1)..(1): n is a, c, g, or t
natttcatgtcctggattgtctagcaactcagtcctccagagataaactgaggtataaatacagtaccttttccaggtgtatgaatactgtagttcatacagtagttcagttctgttggccatgtgctaatgaagaaactgtagggatgatttgcctctcctttagcaagtgtgtagaggaacagtcctcgtgtgagagtgccccctccatagcctgccagctctgctggcatcagtttcttcaattactgtatgcctcaataattgatagagttaagtgagtgcagcttctttttttttactgcgttccccttgagtggttcagcaacatgaggcaatttatcatgctttctgtgcaccggtgcataaacttttaaagaatgaattagactttcccttcctgtccaaaaaataagcaattctcaggtttgcagtgttgaaagtcttgattggatagttggtccagcaatatcagcaggccaaagtgacccaaatcatagacccctctattgctttttccctcttgcttcatttccctttggagaaagactcaattaaaaacatttgtggatttttctaaggctgtttctttcacagaggttacattcagctctttggcaaagaaaaatgccagagcaattagtggctccagggaaccgctagttgtttatgtactatttcagaaggacccattgtgggcagcagtagcctctacacagaggttccttttaga

SEQ ID NO: 26217 - DNA, 1194 bp, Bovine  19866880797007
  misc_feature (1)..(1): n is a, c, g, or t
naacccaggtctcccgcattccaggcagaagctttaacctctgagccaccaggggacccccaaagattatggggtgaggttaaaaactcagagtctttacctgacatatcaatatttaatgcccagcatgagataggcatcgtttgtgcatgaagtattgaacaaggttccaccctcaggaaattataacagatggcaaaccagctctacctaagctgcgataaacagcaacacaaagcaacacgtcaatgcagcgcctggagaggcagagcaggagacccccagcttcagagcagacagagacccctgtgggttagggtggccagagtgcagcggggtagggcttgaagagtttaactgggtggaaagcagaggagggagaagggacaacagtcagagggaaagtacagaatgactggaggagctggctgtccgaaagttaaggtggtcatggtcaaaagtgtgggcttgacccagaggaccctgtaaaagtcagaagacagagagctgatgcggcaggcttggcaagggcattctcttgacaaatgcagtggtgcgaaaacagcccaaggctgggaggccccagggaggcagtgactggagcaagatgagctacttctacacccgggcaaaagctgtttaggaccgagcccactgcccagctgaatggtctgaaaatcaaactgttcagctctaacagcccttgtctgcctgggaaagcagggtccaaagttcattttatatgtgagttgccacccaggtcaaggcagaaatttcagaggaggcttaagagattaaacccaacgtctcctttatgtaactgctcatagtaattggaagaaggattctgaaaccatggttaccatagaggactaaaattaagatcaaaggtgatgatttcaaatccaaggaaatagaataggttcaagctagagctcacatttatgctttgtatagactatctgataatcctttgcaaatgcatccttttatgaagcaatctcaggagacagtatagcggttcatgcagccctgaagcttagtgcaaaccctcctagtactgggtaacaggacggaatcctaggctgaagggatgtgaggtttataacaggtatgaggtttttagacatgatttttacagacactgctgatttcttgttgctcctgctgggcctagttgagaattggcatcta

SEQ ID NO: 26218 - DNA, 1572 bp, Bovine  19866880848717
  misc_feature (1)..(1): n is a, c, g, or t
ngggaagggatgagtcagtcaccccagtgtctgctgtacacccctctcatcgttgtagtggatgatattgaaataagtgcataagtgggctcacatatctactaattaaagcaaattgactcgtatcagcagtaatgcctgacttctgaggaaggcttctattctaatgattggagagtaaaatatctaccatttctattaattatttagatatgtgttctccacgttcttaactgagtaactgggccatttccatctaacagatctaaacatcagtataattatccctgtagaacctttcctgtgtaggatgccagtggcagagatgcaagtcctgaagtgtgctgttctcattcctgggctgcttctactcctaatagtgataatagcatctccgtgtactgagcacttcctcactgccaagcactgtgctcaggagtgagcttatcagggatggcctagaattctcttgctttttctgtaatccaatggatgttggcatttgatctctggttcctctgccttttctaaagccaacttgaacatctggaatttctcagttcacatattgttgaagcctagcatggtgaattttgagcattacttttctagcgtgtgaaatgagtgcacttgtttagtagtttgaacatcctttggcattgcctttcttcctcagattagcatggtgcttatatagcatgtggtaacagcccatgcacagagtgcttgcttggtgccaggcactaactaagtgctggtttagagaagcccattccatcctcacaacagcttcctgtgactactagtgctggtgagtactagtcctgtcaggagaactggctcggaaagtaaacctgctcactcagattaaacccaggatgtctaatcccatgccccatactcttcaccatgatgcagtagtgggtcgtagagtagcacattctgctgtatgggacatgtcttgtcaactgcccagcccaaaccatagggaacttcatgaacataccctggccttccatcctttgaagagctcctcccatttctctttattctttgagcttcagtaaagtggatcagtggacagcatcacttagatgttgtttacctatgatctaggagttgagaaaggatttgactgttctgaagagcaaataggttagctagcagaattcactctattgcattaatttggagatcagggaaaggcattgggattggtgctaggaacgacaggacactttgcaggcccctctagaactcactggtggctcagacggttaagagtctacctgccatgcaggagacccaggttcaatccatgggttgggaatatatcctggagaaagaaatggcaacccactctagtattcttgcttggagaatcccatggacagaagagcctggcaagcccagtccatggggtcacaaagtgtcagacatgcctgaatgactaacacttcacttcaagaactcacagtctggagggtgcattggggaatagacaccgccaaataacaaaataaagcagatctttcctggaagctgtggagtacagagaagtatgccaggcgg

SEQ ID NO: 26219 - DNA, 2537 bp, Bovine  19866880859931
  misc_feature (1)..(1): n is a, c, g, or t
nacagatagtatattttgaactagaaagatttggataaacctgacatcctgtaataagaaaatgccaactcacaggatgggctttattcagtcatcagaagggagaggtcagatataagagaaaaaaaaaacacattatctgtgaaagcctaagtaaatgagtctgtgaaaagtgcctgagcttccatgagacaattcagatatgagacaatttctctaaatttctaaaaagactagaatacccattattacagtggcataaggtgggggaaatgttccaatacagtgaaaaatatgctctaaaatattgatagaggaaaagtatctgttttaagcagaactgaataggtaataaagcataatgctttataaaggggatttgattatattttgtaaatttggtatcactactgatagttcttctgtcctacattttcattctattatttatttaatcatattgtggagtgtgtgggaaaacaaacttcaactgctaaaacagaatgtttacgtaaaaaaggtaaaatcagaataaagtatttagggtattttgttggaaccattattggtattatattaaatgtgttctggaatcaactggttgccatttaaaaatcaccattcaaagccagtgcaatataatgacttcaagtactagaatgatgtgtatgtcagatacaatttttggtaatatactccagattaaatttctttcaagggaatgatttttttttaatttgaattaaataattatttgaattaatattgcagttatttgaattagcaattatttgaattaatagcaacctgctattgctaaggtaactgggttattgattgggtgagtagatatttgttctttatatgtctctcactctggaatcagcatatttaaactcagaatcatttgtcagatgcaatttataagtgaactacatctgtgtcctgcttgtatataactatgaaaactgaatattttaaagcattttcctctacttgtctgatatttcatctcgtactctacaacttatttcaaatatatgttactgatgtggttcagattgtttcttaaatcatataaacattgatttaatatatattccctgtgtgagtttcaaaaaattaggcctttagaatcataattgaaaacatctaatttaggcagatgttcttacttcagtcatagcactacattactagaaattatttaattagaatattttcctctaatttttatgaatctttattttaaactattatttttgttttcatcaaaaatggtaaagaataaaagttgtatcattgtaatcatgtatttttatagaaccatcttattccaataaatttgtcttttcacctttaaaaaatcataggtgttttcacatttttttccataaattagtttcattcaaaagataatatctagaacttatctttgatttatttttcccctgcctggaattggtcaactctatagatgatctggaaatcttacattattagttatataggatatattgcatattaagccatacttgttcttccaatgactttagatgacaccttgacagttatttattgtgtctttaatgttcacaaatagtcactaatgcatgtatatttgaaatatatttcaggtagcctttacactggaaaagcataaatgagttactggtactttttaaacactggcattaaaaaatcttgtatatattctcacacaaaaatataaagctctttcttcttttaaaaaattctttatgtgatataaaaatagaaaaaaatggataaccctatactcagtgcttttagttagaatgggtagattcagtgtgcaaagaagtgctttgaactatgattgggtgatgacataacacacgtatgataaagaaaattcatttatctaaatgttttggcttcaatgataacttgggtgattaatccccccccctctcctaccccactgattttaaagttatttataaaataataaagctgtatcaatcttattaaacttaaagaaatattaacacattttcagaaattggaactgaattttcagatatgaagatttcttaatgactgttcaaacacaagaatggtatatttaaaaaaaaaaatactcttggctctcaggaaattccacgtgaggtgatctcactttggtgtctcttgtttagcttagagagtaatttttgccatggtcacctgccatgcccatctcattgaaggcagagcttctgaagggttgaatgctgtgcctatgggttaaccaattatttctaacatgtgcttctctaaaactactaatatttttcctttttatttgatgtcctgtaggagcgaagggtagcagctggatttggggtgtgtaaatggcaacccactccagtgttcttgcctggagaatcccagggacgggggagcctcgtgggctgccatctatggggtcacacagagtcagacatgactgaagcgacttagcagcagcagcagcagcagcagcagcagcagaaggatcactacaaatgtacaga

SEQ ID NO: 26220 - DNA, 1328 bp, Bovine  19866880936113
  misc_feature (1)..(1): n is a, c, g, or t
nagctatggttttctcatcaataaaatggaaccaatcatggcatttgtcttataggcttgctgtaaggatttttaagtgcagaattagcacagtacgcaacacattagaagggattcactatcttttagctagaatgaaaagtgagagtaagtcactcagtcgtgtccaactttttatgaccccaaaggaccaggctcctttatccatggaattctccaggcaagaataccagagtgggttaccatttccttcttcaggggatcttcctgatccagggattgaacccaggtctcccacattgcaggcagactctttacaactgagccaccagggagttttttagctagaatactactaattatttctccttcttggagcatgatttatgctttcctatctatgtcttctctatgctatccccactgcatggaatgcttgcactccatttctgttcattgaaatcacactctaatttaaaggctaagttgacatccttcccttctatgaagtgttctggactcattaagctctgaagtgacttgccccttctccaaaatcctaagaaaatcagcataacttttaagaggcttatcacattgtatcacagttcttcatttttagaaactatcacaatgtaaactttgcaagttttctcatttcttatactcaattacaagccacttgatccatgttcattgttgaatcatctattatgctgctgcagtctcttgcctcatttgtttaaacaatgaattaataaagttttgatttcactttccttaagaaacatagaaaatactcataacataaaaataacatgaaagttaggctttattgatattttattgagcatgtcaatgtacttcccctaggtcaggcactgctaagcattttatggcgtattaggcatgatgtaaaaataggacttcctcatatattttaattaatacaactttgggggaaaaggattattttcttagctatttcacatagaacttggttgattctcagcaaaaacactggcagcaacttaaagcctctcaggactaatacctaaaaagtgtttgtttaaatatagccttcaagaaatagcaaggcatcaataaaatcagatcagaagaaattcaaagtgtaaactatgtatttgggaagatcccctggagaagggaaagccattattctggactagagaattccatggactgtatggtccatggtgtcacaaagagtcagacatgactgagtgactggcactaagatatgtatggaaaaacatttatcttttctaaaggtcaagtaaatgcaaatcaacacagccttaaggaaa

SEQ ID NO: 26221 - DNA, 682 bp, Bovine  19866880971022
  misc_feature (1)..(1): n is a, c, g, or t
nattgatgagtatcccctgcgtaggcaaatattcctgtagccatgaggggtgatgaatgctgtcacataggcagtgccatgacatccaaacaggggaaatctgttttcagcatggagaccagtcaggacattactcttactgtcaaaggagtgggatacatctcctcccgtcccctctgcatggggagcagcatggtggggatggcaggctgagtagccatgactccacatgggcaaaaacagcccattttcaggtgaagcaaggagggctcattgtcctgcatgcttatctcaccgcttttattcttccctgtgacgctgaaggaaatattctgctttggacatggcaggtttgagaagccaattaatcatctcagcagagatgttgaggaggcagctggatatacaagtctgaagatcagggagaggtctgggctgggaataaaaaaattgaacctcattgaattgcattaaatcgcccagaaaaagaatacagatagggaaaaacagaggacaaggagttatttcaaataaaaggtcttccatttgccaaagcaaagctgtagaccatccactgtgagacttttctgcccctgtccttcagaggcagggagacctctcaactctctctcagagttgagagaccatctgagatttctgtgagctcttctttcacaatgag

SEQ ID NO: 26222 - DNA, 1012 bp, Bovine  19866880991130
  misc_feature (1)..(1): n is a, c, g, or t
nattataactgacctctcatttctacagagcacagtaaaggtgggaataaaaaagtggaatttttagacttaaagagaattttattttttctgaagaccttaaaagtagcaaccaacagattataaaagcttatctgggatcttttaaaaacagggcaaattctcaatgtcagataattttaacaagatgattaaatgacttcttggtttctttaccctgaggctgtgaacctcatcttaggtcagcagggtacccactgcaacctcaacattattgctctgacatcaagcagtaatgcatctgggcagagctctgctgagactcaacatagaggggatgttccttcatatatcaaaagtaggtaaaacttatttatttaataaataccctaggaaaaataaaacattgaacacatggctgccttcaataaagaaattctttctcacattaatggaggaaatctcatagttttctaatctcagagtaggatcagagatttcatgtcttacataaattgatacagtaaatttgcatttttgatgctgtaaagggtctactgaattccagattggcatgtttatcaagttatgggtaaactacagattttcaaatctagaaccctctgtgatcagtgaccatcacatagccttctgcccccacttaagtaaacttccaggtctctgggttaaggacaaagactccatataagtattttaaatattacatcacattattttatgaatacgcagagaatgcaatgatttcaacaattattgctatctttcactgtgtgtgatgcttacttgccaaacaatatgacagttttcacctactccaagattttaagaactgtttataaaaacaggttactgaataaatgcatggcatcagaatgaattccaattccatcaacctaaatgacagaacacaggaatccactcaaatcccacaggagcaagtgtaatagcagcagtacacagagaggaatagatggccatcacaccaaactca

SEQ ID NO: 26223 - DNA, 836 bp, Bovine  19866881007641
  misc_feature (1)..(1): n is a, c, g, or t
naccccatggactttcccatggaattctctaggccagataactggagtgggtagcctttcccttctccaggggatcttccccgacccaggaatcaaaccagggtctcctgcattgcaggcggattctttaccaactgagctatcagagaagccagggtctaacacaactgaagcaacttagcagcagcagcctccttgggaattccagacccctatctcctgtttgagagccccagacctctcgctcctccttgggaaccccagacttcttatcaacctgcctaggaattgactctctcactggctaaataaattacacaatagataactgttgtgttatcaatagataactggaatcaagattgcccagagaaatatcaataacctcagatatgcagatgacaccactcttatggcaggaagcgaagaggaactgaagagcatcttgatgaaagaggagagtgaaaaagctatcttaaggagggaggagggttcaggatggggaacacatgtatacctgtggcggattcattttgatatttggcaaaactaatacaattatgtaaagtttaaaaataaaataaaattaatttaaaaaaaaacaaagctatggcatgataaatggatatatgaggtgacacagccaataatactttgcttgatagaagtaacattcttttattaatttgtatacaaagcatgttaaggtatttcttaccatttaaacttgtttttgcataattgttcattttgtatgtcttgtgcacactgcttaattcaactcagtcatcctttttgtgaatattcattaaagctgcctttagaattaaaaaaat

SEQ ID NO: 26224 - DNA, 1608 bp, Bovine  19866881066420
  misc_feature (1)..(1): n is a, c, g, or t
natttgcatttttaaagttaatgactaaagtaataaaaggttcccagttaaattattacagtgactgtttgcttcagggcaagcaaaaaacctttgaggttttaaatcacatttttcagtctggcaggaaagggtattttaaattcctacaaatgatttctttaatctttgtaacttttctctacctggcccctcattctcacacacctggcacgcaaatgaaaaaaaaaaaattgtacaaaagaatgttggtatttggatataaaggtagagctgaggcttccttggagatatcctaggttaataacctataaaaaattggtagctgtatttaattgcctacaggacatcatgttttggttatcctgtttttgagctttggtgtgatccaacctttgacatgagcattgacaatggggcaggacccttgaaattgaacctgccccagaaaagcccagcgacgtgcagtaactgtaacaccagtgctgacatctcagcatttgcatcaaagaggcagggcaagtggaaattttacagtacagttctgcactaatgcataaagatgctaagactcacatattttgcctcctgaatgaggtctttaatccagcatgctccttgtactgcaaacagagatcctcagagcaaaactccattaaagagcatgatcagaaagaactgaatgcacaaaagtttttgaataaaacaaaacatatctcaatgtccagaatataagcaatcaaagcactctttgtcaataaagcccacattctggaaaaacattggggcctagtgatgggcatttgcttagaggctttactgaggtttaagccctggaaaagcaaagggttttatttgacctcagattgcaaagactctttctacactgtctgaataaaggtacagaagtgaacagcaaaatggctggaactgggatctggagactgactgactgggaccaaattctgactccattgcttattagctgagtgacactgaacaagttatctaaaaatcttttgcattcattcctttatttgtacaatagggccaacagcagtatctaactcaaaggtgaggttgggtaatgatgtaaagtgcttagaaccatggcttgcacatagcaaattcagtaatttcagcttctactaccaatattattttaatttttatgaatgagagtcctgtaagaagatgaaagaagcagcattgctttcttcctttctttcctcctttctttctgtcaccgttctttctttcaatttctagttctttgccacattccaaaagggatctgaagctgaggagtgacattgagcatgtttagagtgatgtctggatgcagccttggtctggaggcaaagaggctgagttctcttcctggctctactgttaactactaatagccatgtgactgcggggaagtttgcttgccttctttattagtttgctagggctcccttcacaaaatatcacttccttaaaacaacaggaatgtcttgtctcacagttctggaggctagcggtccaaagaaaggtgtccacagggttggctccttccaaggctgtgagggggaatctgctctaggcctctcacggcttccaggg

SEQ ID NO: 26225 - DNA, 868 bp, Bovine  19866881161086
  misc_feature (1)..(1): n is a, c, g, or t
natataaatagaagaaagtgttccaaggtccaataagatctgaatctactgaaagagtttattatgtttcaggaaaaattaatgaaaatagctgtagtttaaacatatctgtgtgatagtttggaattccaagagtgaagaaaaattctgacaagcattcaataaggaaaaaaataagtttcctacagtggaataaaaagtcaaataagtcttagaatctccataagatgaaaaccatgtgtcaatggaattttaggagacacatttgtgacagaggaattctaagccatatatgcctgaaagaaacagaaagacattctcagatttagggcttagaaaatatgtcatttatatataatgctgaaaatttttcttacaggcattctctagccaagaaataaatgaatgaaaacaaagaaaacaagaaaggggaattcatgtcataaaaagaatcattaagaaaattgatttgtgcagatttaattcttaattgttgaaaatgtgtttactgagaatgtaattgtaataaatcttgaaagaaaacaaatactagtttattatttataagcttggtggaaaatcctaaattagttttaaaatagcaagtgtgaggaatagtaaggagaaaattagtaaataaagggcttccctttatactggcttcccactctagtattcttggacttccctggtggctcagatggtaaagaatctgcctgcaatgcaggagacaggggttcgatccctgggtcaagaagataccctggagaagggaatggccacctactccagtatgctggcctggagaatcccacggacagaggagcctggtgggctacagtccagggggtcccgaaaagttgggcat

SEQ ID NO: 26226 - DNA, 997 bp, Bovine  19866881200932
  misc_feature (1)..(1): n is a, c, g, or t
nttaaaagaaaacaccccaaaaaaaggaaccaaaaattttctcaaaagatttaatctttgaagagaactctatttgggcagtgatgaatatatgaagggaacaacagctgaaaattctggctcttcattacatttgatttattgataccttgtaagttgagagcatcagaggttccaaacatgaattacggatttcaacatgaatgttgccaggagttgttagtgagaattgcttcctcttatagataagattgaagattctttcccctactctatttctgatatatgtgggtactttataaagtatcctttgaagtcagaagaaacttagcttttaggaatttatggttgtggacggcacatgaactggttcattctggactttgtgcgttcaagctttgtggccttgagcaagtgatctcacctccctgtgtctgttttcccttctgaaaaatagcagtgatgataatacccggctcatgggtttgttgtgaaacttcaatgagagagtacatataaagagcagcacaatgcctggcacagaaaataatgttaggcattagtgttatcatgcacttgctgacactttttcctgtgagtaaacagatctatactgacggaaacaggatttataatctcttttctcttagtgttatgtgctcactttattgatatttttcaaaatatatataattctaagacaggcataatactttattgaatggctatacataattaataaatttataaatgtttgacatttttgtcattttcattttgttttcagtgttctaaacactatggtgaatatttttatacatctttctaaatttggcacaattcttctccccctcccccctggttgtggttttattttcatttttgtcatgaatttttatttgtagattatgttagtaaatttatgaaaacagatatatttttgtttcttttggtctcttatattgcttttgtgcttggggagtcttttcctactcag

SEQ ID NO: 26227 - DNA, 1250 bp, Bovine  19866881205591
  misc_feature (1)..(1): n is a, c, g, or t
naagggtttaattttttttttttttttcattgcagacagcattgcagtctactgggtagatattaaccactgtatttacccaacataagataaacattttattcaatttacctgggaattaggtggaattaattgagccacagggaatcccctgccccagccctgagtagagaaaaattcccttcagtgacctcagcttttctgtttagctgcacacatcaccttgctagtggggctgtgtcatttttaatcattcatctcatcacttgtggttattgttaattagttttacttttcctactatgactcttttttcttgttacttacatgtccgaactaaataaaaattaaacttgtaacctagagtggaatagaaccggatcatcaatattctgtccaaaaatgtggtttcaccatctaccaatcatctttttggaaatcaaattgtatcatatcatcccttctaaaagagatgggctatacagcatttaatatcaggtgacaaatttcaatagaaaaataacctgcttgactcttttttattgttttccctgatttttaaccaatagatatatatgttttttccaacattatataaaggtataaagataaaagaaccatcatcccaccacctagaataaccactgacaacactgtggtcatatccatgggagatgttattcttgtaaatacttcacacattaatacaatattttaggaaatatcaaaaaagcagttgcctttgggggtggttggactagggataatttttttctgcttctttacatttctctctgctttgcacattttaaactaatgtccatgtgttggttgcaaaccacaagagaagaaggtgaaaaactaaaaagacccggagaagagccgtgggtgaagagagaggtcatgtgggcagatggaggctggggcaggcatgggaaaggcatgcaggcggaactggggaagggtctgcagaggaaggaagccccagctgatcacacctaattctcagttcctgctgttgttctctcagaattctcatacttgggcaccttcacagtcacttgcacacatgtttatatttcccaggacttcactaggagctgataaaaggaaaattacccaggtcttttgccaatgtcaagaagtgaggaataatttatatgtttttccttaacttctgctgtttggatcattatgaagaaactttgcccatagataggatgtagctgacaggaaagatgtgatgatta

SEQ ID NO: 26228 - DNA, 1968 bp, Bovine  19866881208381
  misc_feature (1)..(1): n is a, c, g, or t
nttgtcctttggagtgattgtcataggtaatctaatgactagtaattaaattcttgaatcgcccttgttgacttgggttatcttgaagagtaagaaagtttatacctaacagttggaactatgtcaggaccccattttcagaaagtgtggttaggaaattaaaagacaaagatcactatggctagtagaaacttgggagaatttttggtctcttttagctagtgaagagggtgagagacaggcaagatgtagtcctaagtctgtccccaaagcaaacaacacagtgttacacaatactcatgtcccccaataatacccatttatcaggatagtacccaccctggatggcacagttgagtgtaaattggcaagaggagtcaggaggagtccatgaccattatttccaacatgcggatgcttgacctccagggtctgtgttctgtgagctctgattattttgtgactgaccattagcactgaaggatacaaacaccattagtcatctttgcatgagtcccttgaccgagctggtccaccactcatagatcagcaaatggttcagaaatgtctagaatttttaaggctttcctagcacctcatctggtaaagaatctgctcacaatgcaggagaccctggtttgattcctggattgggaagatgcgatggagaagggataggctacccattctagtattcttgggcttccctggtggctcagctggtaaaacatcttaaaagaccctccataaatgtcacgagaaaattcagaagcattcaagataaaagttatggaggctggccccacatgcttctgtttaaccaccaaggatgtgtaattgtaaaattccttaatcccaaagccactgtgactcttgactcctggtaaggggtctaggtgaggagtctggaactccaccccatttcactctaaggctactccatgatattctgaagatactagtggtctatacttttgcaggttttttgcaagagcaatttcagagatattcttcagtggtcagaaaaagaggtatgggtatattatctttggaaactggaagagagtagtagaggagcatacagagtggataggagaaattatagggtgcttccctggtgactcaatagtagaatatctacctgccaatgtgggtttgattcctgatccaggaagattccacatgccatggacctgctaagcccatgtgccataactattgaactctagaacccaggagctgcaaccactgagtccatgtgctgcaattactgaagcccacacaccatagaagcccacttctcttgttgctctgcaagagaagccacagcaaggaaaagcccacgcacggtaaggaagagtagcccctgctcactccacttgctgcaactagagaaaagcctgcacagcaacgaagaaccagtacagccaaaaataaataaataaaattatgttttaaaaaaagatacagaggagcatgaaagaaagaataaaattttaaaaagaaaaattataataataggaagatgatgtatcaaaatcaagcatcttgatggacttattgaactgaaatgtagattaatgcagtattcatccccactaaagttgactgatgattaccataaaaaaaagtttgttggcatattaacacaacctttgggcattttagagaggatagagaaaccgtcattccacctgcagttaacaactaactcagaaactggattccttcagtgcacttcctttctcaggcatgattcagaacagaagtagagagagagataccagccaggggccatttgtaaccagcagagtatctgtgacatgcctgcagagtgacttcaccactcattaagggagatccatgtgtgtattctagccaggtgcacgtccctatagaaagcaaacaatagcatttttttttttttttgcattttcaggacaattaatatgtgtgtcaatgaagtga

SEQ ID NO: 26229 - DNA, 923 bp, Bovine  19866881251515
  misc_feature (1)..(1): n is a, c, g, or t
nttttggatatatacccagaatgcagggcggctgggtcatacagttgttctagtcttaatcttttgaagaaccaccatactgttttccatagtctacttggtttttgatatctctctctaattctgactgcaaagaatagaaaagagagctattttatcattaactgtgtgttgaggagaatatatgtattatctcacataatcctcaaaataacattataaaaggtattattaccatattttacaggagatatagaaacaataagtagcccatatagctagttaagacatgggacttgacttcgggttgctctgattttcagatacagccattttgttgttatatttctaacaagaagggctcattttttcaaatttcctattgattcatgaacagttttccataatttggggagtattttgttaatcacatagttacactgaaaaggatcgagagtcagtaaccatacagccactctgataatgtgggccccaaattcttaaatagtcatatccttctatgcagaaaatagaagcagttcattcctaggtatcaccaatagtactccaggctagcactacactgagcctctcatctccagcttggtgtctgccttgtacccagttgctgttattgtgcaaaattaatgaatagtttgtaaactagcatcacttctgtgaaagttgatggacatgttaattataccttatttagatttcacagttgcatgacccagattcttcttttctgccaaatttccaaagattcaggcattttagaaactccagtaaacacagtgcattacaatgcaagcaatggaggaactggccacacagaggcaggatgatgatgagcttggtttatctgactggagggctagagtcaggtagtctgttttcgggattttaagtgattcaacagt

SEQ ID NO: 26230 - DNA, 1600 bp, Bovine  19866881418269
  misc_feature (1)..(1): n is a, c, g, or t
ntgaacttcccttgagctcaactagtaaagaattcgcctgcaatgtgggagacctgggttgatctttgctttctgctgtaagggtggtgtcatctgcatatctgaggttatttggcatttctcccggcaatcttgattctagcttgtgtttcatccagtccaacatttcgcatgcactctgcatataagttaactaagcacattaattaatgagcacattaattcaaaggtgcaaaaaattaataaacagaaaccctcaattattacagagttcagaaaccagaagggggagctctcacaccctgcaactatagcagagtccaactggaagacctcttcttccctggcaaggactccaccaatgaaaaaccatgggctctttgtttactgagccctcccaactttcttttcccctctaaaagagaggctccttctcttgcccttgggagacttgcacgtggctcatcataattgcagagcctgactgcacttctctgctgatcccaaataaactctgttttgtgggagaaatgtcggcagtttattattatttcaggtcaacagaggtgatagagttgctatgctttctatgtggactcaagggcaggaaagatggcctacagagaaagaaaaggaagaagaggagccttggtgttcttccaatatgtcattctttcaggcccatctgccttcctgtgttgtggccagtgagacagtgtggatcccctttgggttttaggtttacttgcctatttgtaccatgtttagccagagatagcttttattagtacatgtacatttataaaaagcaaagttatttttgagtgtttgcaaaatctaaagcttgatgaacactatccacattaggaaataaagagcaaatctcattatgacttaatccagtatatgaaattacctggcaccctagaaaaacccaagctgaggaaatttactctcataaagtattgaaatttattctcataaagtatatttgagacagtgccgaaattgagacaaaaaatgcagaagaatgtcagtatctcagtggcgggcaatttatttcttccacctgttgtccaattcctcccacgtctcctaactattgcttctcttgtcaatcaatgggcccttctggtaactaagtagataaaaccctgtggagagtgtctctggggtaggaatggaagaggaagtctgaagagtgggtggcaaagaaactggctgccagtttcagaaaaaaaaaattattgcctgtaatgatatgagtgacattaagtggcagagaggctggagcacacaagaaagtcactgaatgtactcaaagaacgaggggcatgtcagcagatgggaaaaatacagctgtgtcacaacaaaacagctccaaagtcagctttgttaatggactagacacacatatttaggaaaaactagagttaattttcggagaagccaatggcaccccactccagtactcttgcctagaaaatcccatggatggaggagcctgctaggctgcagctccgtggggtcgctaaaagtcggacacaactgagcaacttcactttcacttttcactttcctgcattggagaaggaaatgg

SEQ ID NO: 26231 - DNA, 780 bp, Bovine  19866881441833
  misc_feature (1)..(1): n is a, c, g, or t
nttttttgtgtgtaatctataggaggctctggtgcaaaactgaatgtaagtggttgagggagcagagaatagagaatagggttttttgtttttatttcctcagagccaaatggactagagaaatgtatccttttgatgacagacaaagggcagaagaagatgtttgcataaaaataaactgtcgtgagctgtggattcctagtggtgctttgttaattgtaatggttgtaaatatggaccatctgtttggaaccattattaaaaatgcaagcacattccccaccattcacatgatttactactttcttagcaggatcaagatgaaaaattttcagttgcatttacagggatcaaattaagctgatattaaatccatttagtaatgctgggaatggtttggggctttgcctaatgcatgtaaaataaaaattatgaataccaacaggaggccataatatatttgctcttaaatttctacacagctatgaattgtataggcagtttcttctatgtagcagacatataatgagaagagagcatctcaatgttggtaatggcattaccagagattaaaaaagaggaagaagcctaaacattagcacttaaagatgatatctcaaagatctttagtttgtataggaaattcttctttttttttttaataacatttgagtcagagaagagaataagctaataaattcacaaatccaacccatgtaaataaccacattataggaaaagtaaacatctttatttttcgacttgctccagtttccttct

SEQ ID NO: 26232 - DNA, 2352 bp, Bovine  19866881591143
  misc_feature (1)..(1): n is a, c, g, or t
ntgcaaaaagtattctatggaaatggtaatgaaatgaaagctgtgtagcagaaattgtatcagacagaaaagactttttaaaccaacactgtatcaagagataaagagggaattacatgataatcaaaagatcagtccaacaagaatatataactatatatgcacctaatataggaacaactaaatacataaagcaaatactaacaaagacaaagaaagaaacagtaatagagtaacaataatattgggggacattaataccccacttacatctgatgacacattgaaattataatgaaataatcatagttcaggcatataaaaatggagtcatttgttcattgaggatctgaaacatatccctgtgtcactaataacttaaattttctttgaaatgtatcaaaaccaaggacaccacctgatgtatttggaaccaccacaagtagcaactttattgtttcaaggttcccccttgtaactatgcaacaatttcagaccccacaaatccttgcttaacaagcacacttcttgccagctcaccgtggccttgcaatttctgtcttcttcaaagttttagccacattcatgagaaaaagaaggcccacacacacataaaaaatcagaaatgaaagggaagaagttacaactgacacttcagaaatacaaaggatcagattagtataaacattatataggaataaaatggacaaggtacaagaaatgaaccaattcctacaatcatgcaatctatcaaacctgaactgaaagaaatagaaaatatgaacagacttaatcaccagtaattatatcgaatcagtgattaaaaaatttttcaacaaacaaaagtccaggatcagaaggcttcacaggtgaattttaccaaacatttaagaagagttgatacctatctttctcatattatttcgaaaaactgaagaggaaggaacacgtatactcattctgtgaggccagcattacactactatgaaaatcagacaaataaaattagaggtcagtgtcactgatgatccgatgcaaaaaacctgaacaaaatattaacaaactgaatttaacaataactaaaagggagggactgggggcaggaggaaaaggggatgacagaggatgagatggctggatggcatcactgactcgatggacgtgaatttgagtgaactctgggagttggtgatggacagggaggcctggcgtgctgcgattcatggggtctcaaagagtcagacaagactgagcaactgaactgaaggataattttgcctttatccttttatttcacgttgttgatgctttcactacattgacatacttttttctcttggagtactactttatttccttttacttatgtaggcagtttgagtttttctttcttagtttgatttttcagagaatttgcaatcacacaactttaagttgcaatattaagttattttgcagcgtcttcctagactgtggagggaaagaaatcagaaacttaaactaccgttaacattaagaacaattcaagtacaatgcttattaagcatgttttcatctgtgttcttccatactctacctccatattctgtgctcctttctagaaccagtctcctactgcttctgtgtccaaatctttcacagttccttggtcaagaaggtcctttatgtcctctacctcttccttgaatggttttcttttctcaaccaggcttaactgaaagttggctcccactaagggatcgagtctcgtctttagctctttccaatgaggttagactgactttactatagtccaggcagttctgtcatgtgaggctgctgtccttgtgcaaaaggctctgctcctgtgagactcaaaccattccactaacaccctttatccccctgtcaccacctcttagtgaataatgcagcatccaattcagtttcctctctattccaagatctgcctcagctttagtgtcttcattgcacttgtcccttttacctcaaatgaccttttctactctcatgatcacactcagaaatgttctacttctaaaaaacataaattcagacattccaccctgatcccaatctcctttaaatgacctggaacacctggaaacaatcagtgtacaaacctttctttgccttttcctcatctacaaataattactattaagtgccaggcactgaactgttagccctccacatgctttacttcctttcttcccttctaggcttagactccatgggttgtcacctcaagcattcatttgctagcatccactgaattcacctggaaaaaccccaatcctatgtgatttcaattgcactcttttgctgtcccagtaactagcacatggaatg

SEQ ID NO: 26233 - DNA, 925 bp, Bovine  19866881831673
  misc_feature (1)..(1): n is a, c, g, or t
natttggatgtattttgaagaacgatgcaactggattggagaccaaggggaagggagtttcaataagaagaggccagtaacaaatgttaagaatcccccaaatagggagagtcaagactgagaaaagggccttgtattagacaatggtcaattttatttttaaatagaaagaagaataccagtactgactggggagagatacaggtagaacgttggggaagaagctagacagagtggtgggagggcagccgcaggtgacaaggaagatcaagcagcaggcccgaggtgtccccggtgaaggttttggcctcgctgtggccatgaagttataggttggaatacaggggaaaattcacttcttatcttctaaaatctttaaagaatatctattagttctgcctccccacctgatagaggatagcttggaactcaaaaaaaaaaaaaaaaagtgacaagggcagaaactgtacttttaaaaaaaggtgaccatgtttatttaagtgtaaatcaaataacaagatttattcatggttatctttgggaacattgatctctgtccttctctatctcttggaaatgaatgttccaaattaattaaactctcaagagagtagaggatttaggcagaaggctgataattagattaatagctcctgagatattgtgatccatttttcacaaaagaaaatgaaataagttgcttttacatcagaaactctgttagtttgatcatttcatagggattgatgttttccttttggtttcatcaatcatcagcagattcatcaatgcatttcaatgcaattaggtgaattgctttgattggcagaagcatatacaagagcaggaaagttagcagttctgtaaatagagtcgtttagcttcctcttggagaataagctatgctgagaaaaggaaattgaaa

SEQ ID NO: 26234 - DNA, 1202 bp, Bovine  19866882094128
  misc_feature (1)..(1): n is a, c, g, or t
nctgaagggaggaaggcttatgctttcactaggggagaaaaatgtgcttcattggacattaacaaaaggacagtagccttataaagctattatcaaaaagtgtagagaaggtccacatagagatcatttctttcctcaggcaggacagagcagatcatctctctgtttagcattcaccagtgagctgtgccgagttgtagctctaatggcagatccgtgagcctccagggtggtgtaggaagcccagaggctagttactgggtgacctgacctgatacaggtattaaactgtgaatatttgtctcaaagaggcagacacttcaattccaaatgaattgtgaagcattttaaacatacagaaaacgacaataaattaaaattcaagattggtatcactaatgagtacccaagggatacctatctgtatccgttgaagtaaaatgcaaatgctctggagatcaagctcttcacaattgttaaaataatacttaattgatttgacccacattgctgagtgatttttgcacatctagacaagtttgtcctgtctcagctatgccaggggttcccatatatttctacaatataatgaaaaacatggaagcttcgcaaacatgaaagagcaggaaatcttgagcgaggtacaggcttggttgtcatcttatagaaacaactggtaaaaaataaagttcattactttggttaattaaagacagatatttccagtgaataagaagaatgtttcttaaaagtattgtcagtaaaagatttatattgaaatttaggttggctattgaaatattaccaagtaaaacaatttcttaagcttttgttttggttacaatagcctctaaacctttatttttacttatgttgtgacatggacccatgtgaagatttataagttttattattagctaccacaaagttgtacaggttggagaagggcaggtgtgccagagtaccgtggctgccagccacagaaactggttgtggctaatgtgggctaaaggaattcattaataggaagtggtttagaatggaaggaaaatccagatattagacttagaaatgatgatagagtatcatggaacagggaatcaactgctaaaggaatcatggtgtaagaatcatgattttctgactttttaaagactttatccacccctcacccccattttcaggcttttctggccccacag

SEQ ID NO: 26235 - DNA, 1010 bp, Bovine  19866880381446
  misc_feature (1)..(1): n is a, c, g, or t
nggaccagggacagttccatctgagttgtcagcatgtgtttgggctggagagtagtatatgcttctagatagcaattcagtgtaagtcaagtatccgttaagtggggccaaaggaagcaaggccatttgaagaaagcgtcacagactgctctgaggagtcggaatgtttttctgcaagtggtgatggccaagagtgggggcactgaaggactttgacagaaatcagattcatatgtttctgagaatactagaacagctatggatagatggcaccgagggaaaactgaagccagcccatctaggaaacaactccactgatcagagaggatgggccgagtggagcagcgcagggccaaggtcatggacactgagagattctgagtatattgggggaggaggagataacatgtggagaatggttctgggaaaagaaggagaagaaagggatctaacgtctgaatctagcctgggagactggttggaggatgctgtgctacccaagatgggagaagaggaggaatgggagagctaagaagcttaccagttcaattctgtactctctgccctttgttttctgtctccctcctgatacctcattacccccactggcttttctgtcccccccccagattatgccagatgatccctgatgttaatgatttgaccagcatctgcaggagcactcggagcaagttgggttttagacaactgtgggttatttaagcttcagattttccttcctcgcttttatttaaaggacagaatgttatcaccagttatcagatgcgcatatacttgaagtttcaaattttgaagtgctgacaaaagcttctccttgtttcagggtgaggagaggtcttcagaagtcttggcctaagtggtcacaggggcaccgggaacccaggactgcttggctggtttcagagcagctggggctagcgggaaggcacacactcctatttgctcagttacaatcagcaacgacttctttgtgcaaaatggtaatgagg

SEQ ID NO: 26236 - DNA, 1069 bp, Bovine  19866880420691
  misc_feature (1)..(1): n is a, c, g, or t
ntccagcctgcccagcgtgcccggccgcgggcagtcctggaacctcaccatgggctgcgtctctgaggacacatgcaatgtgagtgccaagaggaaggggtgggtcctttttccaggatcttccctgcatctctgggagtcagcatgcccttctactggtcagggtagcaccaggaggtggggcgtctgcccatagttccaaggctgaagacagagcagggttcgcttccatttcttttctggcaagctgatcttgccctctggtagtccccatacctgccctctcagttgtggtctgagacagacaccctggcctgggcagagggctgcccaagactttctgcaggagttgtttggtggacagagacacccagggtcatgaagaaagcaccagccctagaattggaatagcctgggtgtgagcttgggctgctctgtttactgccttggtgactcaggcagttgggttctcctgagcctcagtttcctcatctgaaaaatgggaatgctaggtactttcctatctgtttgtgaggaggtgatgtatctgcagtaggtgcccagtgaagagccactgtagggatgtttacggtggggagatgccagccccaggcctgagccagtccctgtcccgattctcctgcagcctgagccctgtctcaatggtgggacttgcctcgtcacctggaatgacttccactgcacctgccctgccaacttcactgggcccacgtgtgcccagcagctgtggtgtcctggccagccctgtctcccgcctgccacctgtgaggaggtccctgatggctttgtctgtgagtgcctgccctgggcagcccacatgctggacacccaagctggcttagatccgtcacctgcctcagggctcagggacagtagacaggatggttgcagcctggaggaggagagcacttgctaggttttcaagggcgaataagaccttgggcagagggagagacatatcagcaaaggggcaaagcacgtgcaaaggcctgtgaggtttataagaacttgggactttctgggggagccatggggagccagcaggaga

SEQ ID NO: 26237 - DNA, 2185 bp, Bovine  19866880421456
  misc_feature (1)..(1): n is a, c, g, or t
ntcacacttgtgcaaatttgttgacatgtatacacgttacacccacacacaacagacagtccttggagcctgctgctttgcccagggtacaggaattcaacaaaatctatcatcaaacagaagtgatgcgatgctgagggagatactgagactcccaaagaataaataagtcaggacatcgatttgaatattaccgaggggaagaccaaaaacatttaaaggggaataaagagattagtgatcagccaatggctcaaatgtggtctcccgtagcacacacacaacttgtatcgattgcgacgaggtttctggaaacaaaagcaatttaccagaagaatagtacacgagtcagagatgtttatgtgaagagagcctcatctgaaatctgtccggggctctgctctcaccatccagttactcagcgagggcgggagtagcttacataagcaaactggcctccgatggggcgagcacaggaagatttgatttcaccgtttctgtgagcgagcaggatcagaagctattctgagcggcctcaaaggaaaagcgccagaaatcataaataaagaagaagtcaagcgtgtccagtggccatatcaaatgtgacattccggcagaatgtgtgaacatggtgtctttcaagctgctgattctttaaaaaaaaaaaaagaaaataccttaattcccagtgacaatagcattcgctgcagttaaaacctaacagaaggcaaagcaatgtggggcataaagaaaaaagtaacgcttggaggaatgcaacattcagcctttcatttattttcgataccttctctctgcctgtccttctggtcccactgttctcaaggtcagtcgccctgcttcatttttccccgtactttttttattgctccctgaccatacattattatatgtttatttgcttatggcctgtgatggctaatttcatgtgtcagtgtgactgggtcaggggtgcccaggtatttggtcacatgttttcctggatgtgcctgcaacagtgtttttggaggagatgaacatttgaatcaatggactttaagtaaagcaggttgttctccctaatgtgggtggccctcatccagtcaatgaagagccgagtagaagaacagacggaggaagagggaaatctgcctccctgtttgagtgaggactttggctttttctgccctcaggctggaatctacaccgtatggtctactgaatttcaggcctttgggctcaggctggaattatatcacaggctttcctgggtctccaggttgacaaatgcagacttgaggggtttttaacctctataattgtatgagccagttccgtacagtaaatcacttgctataaatacagatagagatgatagagacagaggtatagatgtatatgtatatatatccccgttggttctgtttctctggtgaaccctaatacatggcccatctccccttggagtgtaagttatctcacttccaggtgatgactccagcctcctaattcatctctctggttctcttttagcctcctcctcaattcattttccaccaactggaaggttattctcctgctttaagtcaccaaggtttcctctggggtccagagggccaaagagtagacagcaggccaggctccctgttctggaggcctgacatctggcagccacagatggacacgctttctgaccggctctctgaattcaagtgacttgacttttctcaggtgccctcatgtctcagggatgcttacccctctgatcactcccttatctacctgtctaccaaactgggcctctctgctccttgcctccctccaagaaggtaggagtcacacgagtccagctcaggctcctcaacgggtcagccttgaccctaaagcctggtaacaaactcaagcatgtactcagctcactcgctggcacaccgaaagtgctcaaaggtgggtagcgcttatttgctgctactgctgctgctaagtcgctctagtcgtgtccgactctgtgcgaccccataggcggcagcccaccaggcccccgccgtccctgggattctccaggcaagaatgcccggagtgggttgccacttcctcctccaatgaatgaaagtgaaaagtgaaagtgaagttgctcagtcgtgtccgactcctagtgaccccatggactgcagcctaccaggctcct

SEQ ID NO: 26238 - DNA, 808 bp, Bovine  19866880433157
  misc_feature (1)..(1): n is a, c, g, or t
naaccgatcatggtggttttgagtgggtgactttgagatgccgattgaggagtgaaggagtgtgtatgtgggaggcctgttcagtgccgtatgggttctgtagctgagaatggggcagggttgttccccagaggaaaatctggtgctattaccagtggaagggagaatggatggatgctaggcagccaaaataaatgttcactgcagtcatcagaaaaatgttttattaaaatatacttttcaaaaaagcagtgagatataatatagtttagaattacaaccaaaatgatgaagtttcagtgctgaaaaaaatgtgtatcttcagctttctcaaaaactgtcatataagtcttatttccccaggaatctacatgactgagttcttacacatttaatttttggttacagttttaatcacttattctttgagctcttactttaggttcagcgctgtgctagactctagaaagtggaatatgagctctgtaagacaggaactggacctcatgttttaactgcttaggaaactttatttaacctttaggaaattatattctagccttggaacttattttggtgttatttcacaacacattttgcatttccttctttatgttacattgataacatgcaatctccctaaaggcttttattagaaaaataaatcttcaggaaagctatcactgtaagcttgctttgcccagcaggaaactttaagaaattgcttgatttaagacttttttttttaacctttagtgtttcttaggcattagaattttatgttatcacaaagcctattgaagacaaa

SEQ ID NO: 26239 - DNA, 2314 bp, Bovine  19866880476903
  misc_feature (1)..(1): n is a, c, g, or t
ntctaagcatcattatgtgccacccccctcaacaaacccaccattactccaccttacattactgaacctccactgtgtgctgggggtacaagaaggagtaagacaaaatcttcttttcaagaagctcacagtctggctaggtacatgaagtctgcactgtttcaggctctaaattgtcaaatgttatctctgcttgaaaatggatcagtctctttttcagagtctcactgaaaaagtaaatgaccctaaagtgagatgatctgacttaagacattggtgacagtaaccatgcctctttgccactgcttctgcaaagacacagtatttcaacactgccaccgtggattcagcttacttgctgaattaatatgctgcctggtgcattttcttagctagaactgaatatttacttgggtgtggtgatttccacagagggtgagcccctccagatcctaatggcctggcgttggctagcactcggatgctgcgtagagtctttgtctcacattcacacgttcatggtgtggtgtttgtgtcaggttcttcctctcatgctctaagatgaagctgtggataattttttttttaaaactaagcatctatattgtgcaacactgaaacatttaccaccagtctttctaatgcatactatggggaaaatggtataattcattcatttgttcagtcattcattcaacaaacatttaatgagcacctactaaatattagactatgtttaggacaccaaggattaccaaacgtggtcccatccagcaggaacaaagtaagaaaggagccaggattattaaatgagatcaagcgaaagcctggaattcctcctggatagtctaagatacactagctgtgttttatttttcaagtattttagaacatatggggatttcattttgatcatattcagtgatgctctttgaaatcatacaagtaaagcttgatcattgtgtttaagaggatttcctgccagttctcatcttctctcacttaaggactgacttttcacttgagcagtctacttctagaacaacgactcttagttcagtgagtattcactgtggtgtgactcaaggtgccaggactcccaaagtctcttcctgagcaacaaccatgtctctgggaggtggacagtggatatgtggtgccaatatcaaacaagggtcatctccccccaacaggcaaacattgttttgatgaaataggtaaaaagattcttagttctattttctcttatgcctgttagaaagtaatgcattttggaattttaaatccttggtactaccactcctacttgtctggaagtgcagtaacatgaataaataaatattaaataaatacaaatgaaggaaacaaatgtgatttcttacaaatcctttatgccattatttgagataaaaactgaacttttatggttacttcaaaagacagaaataaatgggccagaatcttgggttttgcctggtttcagatagcctgacacctactggaataagtatggccattagtgttctagaacgggacagtctcatttcctcctcttccttctttaccttcttgttatccagaaaaggtcattctcagttaaaatccactattagcaaaaagctacattatcactatttttctcaatagtcttacagagtaggtattatctccatactgtttatactgttcatggggttctcaaggcaagaatactgaagtggtttgccattcccttctccagtggaccacattccgtcagacctctccaccatgacccgtccgtcttgggtggccccacacggcatggcttagtttcactgagttagataaggctgtggtccgtgtgatcagattggctagttttctgtgattatctccattttaaagatgagacaattgagactcaggtcatcttctggcagatgccacagccaggattaaaacctaggtgactctaacgaccatagctttccatcatactcaggagcctcctgagccacttggagccacagagctacagggctggtcctggagccctggtgttggaagcctctccccttttcctactgcattcccaggacatgatctggactttggataaacacaaaaacgataaaaacataaccacttaccagtccctccctaggccaccacagactcctgtgtcaatgcatctatttagctcaggcctatagactttggctataattccctacctacttacctggaacaaactggaaaataagaaaatcttttaccaacttttcctatagaacattcataggtacccatccatacttcacagacaaatgta

SEQ ID NO: 26240 - DNA, 938 bp, Bovine  19866880497125
  misc_feature (1)..(1): n is a, c, g, or t
ntcgaggggttctctcagtctgatgaaaaagctagaggttccaggcacatttctggactttgcaaataactaaggatcggggaagaggccaggaaggaaatagacatccaggagacatggtcagacacatgccagaggacacaggagaaaggagtccagcagaaagagataaggagaaagagagacaggcagatggaaagagaacaggacgagagacaagggcatagaggcatagccaggctaggaatggacagttggataggatgacagagtaaagagcctggagttgtcaagcaaattggaattgaggtgaggctggagaccagagattgagatcttgacgtgtcttggcagaaccagtgaagagcatccgagtggacatttactcttcttcactggtgtttgctttttggggggagtttttgttgtttgttttgttttggcttctcagcattcatttgctatacttgaggtgggacttgtcttttgggattgcatcttcccctttatatcccttcttccctcccagtcagtccatgtggttctaatagaggcaactccaccttgaggccagaggaaggaacatgtgacctagacctaagccaatcagcacattctattcctgtggccacagtgattggttgaaggatggctaagcaggcccaatgagagccaatccagtacttgggcctgaggacttgacagaggtctttgaacctttctgctggtctctaatttaacaggatgcagggtttggggctgctgccaccatctcactgccatgcagagcttgaaaccaaagccaacagagcagaaggcagcatgacagagcaaaatgagtcccagcgacattgtttgagccccaaatccagccaagatgaagctagccctagctcctggccttttttagtttcataagccaataaatttcctttttg

SEQ ID NO: 26241 - DNA, 1844 bp, Bovine  19866880519059
  misc_feature (1)..(1): n is a, c, g, or t
naattctccccctgctgccctcctgtctttgtggttaaaaaagtctgatgccgggcagaaccctgagttacttttttatgccctcagcgccttctttcacttatccagtgtactatgaggcatgtggattccaagccctgtccaagtccccagggtcacaaaggcatgagatgtgtgtcctgccttcttggcactctttgtctgggagacacagtgaacaagccatatgcaaagagaaaagctagtggatataggtgttctgactggagagaagtcctgagaatgtctggggagaccaggggtgccttctcagtgacttttctgctgaatcttgaaagataagttgtacatcaggtggagccagaggaggagggcatcccaggtaaagagaatgacatagcaaagaggaggagagtcccaactcttcagagaagcaggggctagtgtggggcagggagaggccaggaggtagctggggagggccaggagtcatactgcagaggtagttggtgaccaagccttggggcagcttgaatggtatctcttgggtgtcaggagccagtgcgggcttatattcgagggaatggcccctggaggatccactctgagctgctgcaggaaggggaggaagcaggtgagacaactaatggcactgccagcattctggcaagagctcatggatgtgaaggtgaggggatgatgggaaagaggtccaggagaccagacagacagacaccgcagtccactggatgccctccctgggagctgttgtcttcaccgtggaatggcacaaggctggctgctggctgcatttctctcctccagccagcatgctctaaagggaggtttgaggtgcagcctgcagtgaaagctgcgtgtgttaggatgaacgggatcactggaaaggctctgtggagagacagagtggccagctgggcagagacaaggtacctccagcctcactgtcctgctttttctgcgggactgtcttccatccgccttcctttcccccctcactctggggcctgtaaccagggtacccatggcttactctcaccccatgccccatcccatagcgaggaaggttagagctccttctcgctgggttgccagctcttcagcatcccagggcatttctgccaaggatgatgtacaatattatgctaaaccagctttatgggcagcctcttaaaatgcaagcctctgcccgtgatggatggagaacatccagttgtttagccaaccacttacagtttgttgcaaacccgtaagaaccacacaggggtgtcttgttaggcttgttacgccaaggaccccataaataaatagcagagtgtgtcttggtacatcagggctggagtatggaaatagaggcactgcataaataatacatacttacaaaataaatacatcagtacgttagcgtgaacagccataaccaaaccaccctgcgtaacaaccaggagaagctccggggcccgccatgtgattggctgccatccatcagtgtgcatcagcacttgaaatgaccaccaaagggaggaggtcctcctgcgtgctgacctcgaggtcttggagttgaggcaggtggtgagattgcaggtgggcgccctgacgcgcagctctgccgccaaggtgtgcagcctaccacggccgtgtgttcctgcagctggcttagggtctgccgccagcagaaggctgctgagcaccgaggagcgggatgtgaggggctgtacctccaggaagacagtcggcttgcgggggaatcggattttctcattatgcacattcactcaggcttaggagttggtgggtcgacttttcaagggactctcaccagagcc

SEQ ID NO: 26242 - DNA, 1657 bp, Bovine  19866880539438
  misc_feature (1)..(1): n is a, c, g, or t
ncctttgcgccctcggctggagtggtcttgatgctcccggtgcagtacctcgaaagccgagaaatcttttagagggtttttgtcttgggccttttacccacttggctgagcagaaagtgcaagtatcgagaaagcatggcagagccgacaccacacaggctgtaggctggcatggctgagggagaggatctggggcgatggttgagcgaggccgagcggcgggggtcccaagagaaaggactggcggtggcccggggccaccgagtttggcctggcttgcggccaggtcatgtaaagttgtgctgtgggcggcaggctcgggaaacttgggcccaggagcctcttgagcaaaagcgggttgtagtgtcctgcccgatcctcctgttccaccaggtctcgggttccccccctggttcttcttccgagttccgggtgacagcggggcgccgagatgagagctgcgaccctccaaagccggcgccccaggatgagactgagaaggcctggctttgcgctggggttggggtggagggcttgtttcgaatttccggcgtctttgaaccctgtgttgttctgggagaggctctgccccctcccgcgtccctcctagctcaggacagctgcagcggttctgaggcccgtcaacatctgcccgaagtctgcacggctgggaaggtttatgactccctgggcttctgaacttgatagagtttatttgcaattactttctttctttcgtttggggcagaatcggattcagagactttgttttcttcctccttttccccttagtctaatgcgcaagtggaaacaaaacaaaaccaaacccctgaactgtgcggagagggctgtggtggggaagaagtcaggattattttcatctttaaaaatctgagctggcatgggcagggggtggagaatgataggtgggtgggggtcccctgttcgctccaacgaagttgtttgttgggtgatcatggggcatatgtcttggtgtgtggagctgggaggaaaatacagcccccagtctggtaaatggtaaggtggctgcagcgaggtctgcaaggcagatttaagatttgttgaaagctctgtaagagatgtggctttccaaaacttgcatccctcggtcacccccaaccctgaacagactaccctgagtccagatccggttccccaaaacaaagcgggtctatttatcaagtgcggtcggcctccagtagaaagcagcgggcgggctgggccacagggctcctgatgggtggggagcgggaactatgttttccctgggcagacaggtttgcaatggaaaggtagacggtacagcgatttatttgtgctttttgctgctcctccaccttccctgaggaggccgcgccactcagagcaagatgtggctggaggctgagtttcagagaagctggcacctctacaagtctgccccacgcatgccttctcctccttttctctttggtccctttctctttttttctccttttgggtctctaggcccccgtttctctctctgcgtgtgtctccaggtttctaagttcctgtctctttctccattccggtgttcctgtctctggccttggcccgggctttctaagctggtggaacccgagcaaggcgcgctgcccgtggctgtgcggattgc

SEQ ID NO: 26243 - DNA, 889 bp, Bovine  19866880546180
  misc_feature (1)..(1): n is a, c, g, or t
ntttttttttttttcagaaacaaggggttaattttataaaaagctttcgatttttcacataactagatttctagtataaagttattatttgtggtgaattatattttatactttctatatgttatattttccaatttgctaacttcttgtttaagatagctgtatacaggcttgcaagtaagtctaaaactaaaatttttctttttaacttttattagaagagttaaattggctttataataactctcccagaacagttatttatggggctttttatatttctctgttttggaaccaaatgctcttgcatgaccacaaaatgactgataatggctcataaaactgagagctgttcatctgcataactcaaggctgtttatcatctccttataaactcgaatgcctaataaatgctttctgataataatacatttaagaatgtggctcgtgtatattaagagtaaaacttctagtccacttccagcttagccatggcagctaatttgaccactaacccgttgtagctgcttcctctagagcttgtggacgagtggataggatcaagaattcacattgagatgaagagtgatgaggagactgttggtatacttctgggatttggtgactttgtcaatatggtattggaagatgtcactgaatttgaaatcataccagaaggaagaagaattactaaattagatccaatttttctaaagggaaataatataccaatgctggttcctggaggacaaggacctgaaatatgaatgacttccttgacttatgctagatgctgttctgtcttgtaatgacaacaaaagtttttttttagtcttttaatgtttgtattctgtgaagtcaagtttcccattaaagggaaatgctttga

SEQ ID NO: 26244 - DNA, 1802 bp, Bovine  19866880575223
  misc_feature (1)..(1): n is a, c, g, or t
ncatcttttttttttttttctttactggtacagtcttaagtacttactagcacagtatagtgtctcccaaacttcaaaacaaaacatccttaaacacatcccttttatcccatttcttttcttccttttagaataaaattcctcaagagagttacttctgtttactgtctaattcctctcctctcattctctcctctgtcttgtgttgtgatttagcccctacctccactgaaatagcttctgtttggtcaccagtgacctcatgtcaaataaaatgagttgcgaaactcctagaacagtttggcataagatgtatgtatatgtttttgataaattattaatatctataatggtaagtcaaagattaatgtttaaaattttaaattaaatactttttaaaaataaggagataaatattgtgttgaatgtgattacttttgattaagggtaagggatatcatgagacgggctgctatttgtcagtagtataagcctttaacactttttgttttcgtttttcaggctataaacacattactttggcttaaaaacttttaaacagacagttgattcttaactgagttctaagttttactaatggatggtggatatctctttagggaagggagaaggtcttcttttacctcataggggatcagcaacatcctgatctgttttgtgttgtttctctggggataagtaactgagtagacatcccttttatccaagctgcttctgctgctgctgctaagtcgcttcagtcatgtccgactctgtgcgaccccatagacggcagcccaccaggctcctccgtccctgggagtttccaggcaagagtactggagtggttcgccaatgccttctccgagcctttggacctcttcaattttagagtttaaaagctttctaattgttgccttttacttactcaatactgactttttattatctttttgatgaaggaaaatgcaaagaatactgtagcctgaaatttttgatgaccctctcttgacagatccagatgtggcctgccataccttgacaaaccacatttttctcaattttgtttcatacagatgtaggcttgatgcttctcagagccatcaagcatctgaaagataaaagctgttgaacatcccagagggccatgtttcataaaactgactgtgtgtcaatagagacaaacccagccatgtttagttcagagtcaggtaatattcatttcaggctttctctgtcaataatgttgtgatattctgtgtaagaaaaatgttaactttttgttctttttgtgcagtgtgtattgattgttttcctttataaatgataaatagggaagatttaactacatcttgttctctaatgtaaatgcttcagtgagatttcttctagcacaaaggccccatttttcttccagattttcatatctgagtttaactcaagattgttttttggtaactcttgtggatagcaagtaagtctaaaataagacctttatagaaataatatcatctaattgcaacagaagtcctagaagagcagtattatccccattttacagaatgatctgtccactcagagagatgggttctcttgcccaaggttatgccctagtcatagaagaaaaggacatgctggtgggtcattatgtgctgtgtctggggaagggaggctttggcttcagaaaagggagaaacaatcaggaattacacagatcaatcttggccccttcagagtgcttgctgtggggaccaggttatatttattgggtgtcacctctcaaacaaacatcagaatccttg

SEQ ID NO: 26245 - DNA, 1402 bp, Bovine  19866880591494
  misc_feature (1)..(1): n is a, c, g, or t
ncaagagtactggagtggggtgccatcaccttgttttgacaggttcattttcctgtatatcaggttgatcctgataagttttaaaaagaaacggttttatttaaaactttttactgaagtttaacatacatatagacaaaagtacacacatcactcatgtcctgcttaataaattcttggtcatgtacctggcattcagatcaaaacccagcacattaccagcatcactcaagccctctcttatgctcctcaaggcttgatttttaagctacatgagggcagggctaaaattacctttattctagagctaatttagactactccaccagggcatggcctctggggtttctaatgattgcctgagtgatcaacaagctctccttactttgactggctagagcctgaataactcctactctgtggaagctcccctctacacatgggcagatctgtctacagcagatgagccaagaggactcagtttagatttttttgctgagtagctcccttgtatctggtactccgacccacaaatttaaaccacctccccctcaaactcagatgtctaaccccttgattcaacaagactgttgtgcttcactggggagtcccctctagcaacagagtctagaaaatgcttcaaggcagaaagccacgaggaccagagtcttcatctcaattgcttcctttctctcagggattatattcctgcactgcctgttgtccaatatgtgaaaacagttgttttcatatttgcccagagttttatttgtaaatggagggaggagaaattcagttccaattattccatcgtggctagaagcagaacaaaggcctcttttaataaaatttccagcatggatgccatgttttgcaagatttcatctaccaaaataacccaatccatatgtcccttccatccttccatctatctattcagtggctgctacatccctcagaaacaaagatgaataaaacttgattcctgccctcaaagaactcacaattaaaagggaaagccagaaatgtatattgctggctggtaagtgtaattttataagtaatacaggggcttctgagaacaaagagaaaggtacagtcaaatctacttagagaggtcagagaaggtttttacagtcttacatttagcctaagtcttataaaatgaatagagattgacagatggaacagaacattcgggacaaaagaaactgtatgcaaagtataaagtaatgaaacaacatgtaaaattgggagacttattaattccaaacacctataacatagagtttgaagcagggagaggaaagagctaaagttatggggaaaaaaatgggaggatcctatcaaaaaggggggccttgcataccacgcgaccattattcacatccatattcatcat

SEQ ID NO: 26246 - DNA, 900 bp, Bovine  19866880625679
  misc_feature (1)..(1): n is a, c, g, or t
nggcatggtgggcagtgtcgctggcagaggtgggacaaaggggttgagtgatggctgtggaaatggggtgggggtccccaatggggggaaaactaaaattggggagtaaatggggtggctacatttggggctgtagggcctggtggaagggagctgcccgaccaggttgtgttaagtgggtccagcagggccagcagggcatcactgctgctgccggcagcccctggggccaggctgagtggctggagcagttcggtggggtcttggggtgcagcactggagaggagcccagggaatggggttgagctgagggcagcccgcctttcccgctcagccggcagttgttccaagaagtcgccaagggcgatgccgggggcctggagcttggctgggcgggcagtaggaggcgggggcacgatgcccagctctggggtctttctgccctggggccgggggatagtgatgctgcccagggtgggtgtgggcacctcctccttgtcgctggggttcaggaggccattctggttctggggcctgcagggtgaggccagggagttcccgagcagggctgagggcttctcggggcaggcggcgggcggcttgctggggatggccatgtcatcctggcctaggctccagagcctgctgtgcgggtgggcgagcttcaaggcccctggtgtcccacggctcctgtcacttctgcccaggtccagcctctgccggagagagcgagggaggcaatgactgcagctgaccggggacagatgggctctccccaccccctcctgtgcgccagggggacactggggctgtggtcctgggagtgtggccagctaggtctctggggctcagggaagttgggggctcggcccagatcagcagtagaaagcaagcccaggt

SEQ ID NO: 26247 - DNA, 742 bp, Bovine  19866880679284
  misc_feature (1)..(1): n is a, c, g, or t
ngtattttccacgtaaattcccttttttcccttagtccttcagaagcagtcctaaataaggaccaaatccagttctcaaattgaattgtacatttgggttattctggatacctgttaatgtatttctaaatatgtgataaaatatttccaaacagatcaggacaagttcatatttcccccaaagggcagccaggccaagagccaagttagtagctaacgcctgattttctttgagggcatgactgaactaaaaagttaaatgtgcacagttaaggtttggattttgtatccaactttgtaaaattcattgtattatctggcatttctagatgtctctgggattcattcttccactcagagtgggcatgcttagattctctgtgagacatactagttctaggctctttatctgtactatatgtggggttctgaataacccccctccatgctacatcatgtattccatctaggatttttagcacagtcttaatatgcctttttacagggtgcatggtccatgttggtgaaagggtagcagtctagacacagctgtgaaacgacaaatggatgactagagctgggtattgggaataaattgatgctaaagtgaaattattgatatccttggtgtcagtgatagaaatcaacaaagtgtgttatagtagaaacagaaaactccagctttggttctggtttccccatttactgttttgaggttgctgaacacctctaagccagtttt

SEQ ID NO: 26248 - DNA, 1471 bp, Bovine  19866880746374
  misc_feature (1)..(1): n is a, c, g, or t
naaaaaaaagcccagatctctcccctgtcaatttcttcctattatcccagaaaatgtgtcttggcaggacttgatggcctggagagtggtgggtgatatttcttttttcccccagcaccctcagttgtggccttagtagacacttcagtgttggtgtgaagggatagggaacttccccacccttgttccagtcctgtcctatccacttccattcacagcatccactgttttagcaccacctggtcttgtgacctaagaagagtcagtttgtggactagggaatttttcagatcttggcttcatctttacttctttcctgatcagatctacctggtcatgactaccctgacttgtagagtgggctatgtccctaaatgatgtgtataaagcttttctagctcttctgggctagaaataactaatcctgtttgcttatctggagcccttgaagcctagatgagagtggcagcctaagaaggtttgaaatactggaccagagccagagcctctttgcctgcacactccactctgcatgttccagccatcggaacaaactgcattattttgtttcaaactgtgctcaagggaagccaagaccttgtaactggaaacttaccaaacagagaattctaagactaaatttagtgttccatttaaaaaaaaaaaataagttgaacattttgtttgttcatcttttatatgttaaaagagagattaacctagttcacactaacaacctaagaagagtattcaaagaagtgagaagaaaactaatcccttttggtgaagagggaaatccttaacaaaatgtaacgaagtagcatgaaatacagactctgcagccaaactttcaaatagcatagcctctctaatctccatcacataaaattttattgtggctcagagaatattaaaaactgttagaaataaatgaaaggaacttccattggcaggaaatagaaaagattggtatgttttatttatgtggtttttctctggtctttaaatgtaaatacacttagctgctttttgaactaggttcttcatttattatgtgcgagttccttttctcttgttcatgttagactataagaatgaagaacattgatgttatagaggatgtataagctatataatatatagagtaacaacagtttaatttgcagtactttaaatattgctgtgacttcaacccgtcatggtctccctactagttcttaccttcctctcctgcccttcttgcttcaacacattcaaacatgagcacatgttttggactagacagagggttcagattgttagtgattcccaaatgctgatccctgagttagttgtgttagaaatcactcagcttattaaaaatttaagttctcagctacaaaaaggaatgcatttggagtcagttctaatgaggtggatgaacctggagcctattatacagagtgaaataagttgaaaagaaagacaaata

SEQ ID NO: 26249 - DNA, 885 bp, Bovine  19866880784080
  misc_feature (1)..(1): n is a, c, g, or t
naataataaacagggatgatgaaaaataagattttatcacccaggtaactttgtgcttatgctgtttgataaggaagtttgcttttaccgaaccacattttatgagtcaagaaaacgacaccctaagcttaaaaaaccacccatctttgtagtcaacacctcaatccttctttgaaggtatttggagtactcatctacacagacaaggctttaatttcaacagtgtattctcaattctgaaagatcagacttctacatcttgaactgaattaaaggtacccctcctctcacagacttggtggcaaacacagacgtttgaagctccacttttatcctgctttaatgagttaggtgagtgttaaatttactgtgtaggtgctgtaaattccaagagtccctcctgcttaaatccagtcaatattagctcagcaactgggcagacttactgcacaaggatgatactaaagtaatagagtaagggggatatttatttgtatacagttgtaccccacctaattttacaaaggaactgaggcccctaaaacaaagaaaaaaaaattggtgctggaaaatacattaacatataaaatgtatttatttgtgaaaagagcatctggatatgcaggtcctgtgtggtttctaaaatcaagttacagggactttcctgtggcccaggggctaagactcagtagtcccagtgcagggtgcccgggttcaatctctggtcagggaactagatcccacgtgtcactgtatgcttcaactaaagatcccacatgccacagttaagacctgacacagccaaataaacaaacattcttaaaatgaaataaaataaagttacaaaattagctctgagcttcccagctgccaaggcaagaaggg

SEQ ID NO: 26250 - DNA, 1209 bp, Bovine  19866880793771
  misc_feature (1)..(1): n is a, c, g, or t
nttttggagggcaagtttttaaaaatataaatgcctttttttgaaactcttagcagtgttttgagatttgatacatgtatttaatgtaattataatgaacatgtttgacccctttggcttcctggcagagaatttgagcagtaggatataagatgaatagagtgacctttgaaatttctttcccatttgactgttgttttctctctgtattttttaagtccattgtgttggttcatttaattgatttggagcaagcagtactttcttgttcaaaatactcaattctggtttagtgttctgtttatatgtattgttccgtgaagttctaaggtttgggataatttgtaggcactttaaaatattatcctaagtttatgaaccaaggcaagcaggttgtttagactttgtaggctaaataattgggtctggttttattttcacttgtgacttgctggacaagatacttaatccctttgtgcttgtttctcctccagaaacctgactctttatctacctcccaggagaattgagatggtttatataaaacaagtttaaacctttcaggaaggttagcactatgtaagtaggggtaatagctattatttctttgactctttatttcgtgttagcctggtcaagtaataatttggcattaggtgggttaatttgtagtgagaaacttggatagagatgaaacttctgtgaatattagagatatctgcaaattgaagtttgttcatcctttgctctactgtctactaatttttcctggctcatttgtgcagctaagtattggtgctgatttgaattcttgagtctgagcagaaacttgtgagagacattctgagttctaagtatgaatttccagggacaggatgtttttttatgtctcagagaattcgatttctaaatcagaaataatacatgtaatacatttccctatggttttttgtagaaaattgattaatttgggggtgatttgaacaggaaaatggagctattgcttctagtggcattaagcctcctttttcagatttattgcatactttttcctttttaaatttttagttagcaaataattaccgaatctatttgacatttatgctctgtttgtgagggaatacatttttaaatgcttcttaaatgttttatttggtttatcagttgtaaaaaacctccagattttggtcctgattgacattgcaaaaa

SEQ ID NO: 26251 - DNA, 2431 bp, Bovine  19866880815107
  misc_feature (1)..(1): n is a, c, g, or t
ntgggtgtgggggcagaggggggatggtgggtggtgacataatatctgaggtgggaccccaggctcagtattgtgcttggcacctgtctgctggctgggaggaaagctcatcacagggtctctgaggcaaagctttctttggagtgatctacaaggaattctacaagaaatctacaagaatttcttctcaagaaattctagttaccacggacaacactaagataagtttaataacaatggatgctaacactgagctggggcagaaaactgagggccgattaggcaaggttatctggctactgtgactaacttaagtcacgcagcctcctttcttccccctggttttctgtgttgtttgtaaggactcacggtggggatgccccggtttaggttctgagggtaccaagccactagagggcaggtctctgccttcaaagacccctagtctggggggaaacaagtgccacccaaggtggcaagaaccacactggccgtgcgcacaaggcaggtggcagcagctcattgtgtagcaggatggggaaggcaacagaggatgaaatatttggcccatgaaggaagagtaggcgcttgtgttggggacagcgcggataaggacattccagggacaggaagcagctcataaacaagcgcagaagctgtaaagccatggcatgttctgtgagtaacaacagtcagcgcatcataggaggactggcgagtggaaccgagagccagatggggtcaaccacagagggccagcatgagcagtccataccccagaggatttttaaccaagtgcatcacataatcagatttgtggtggtttggaaagatattgggttggcccaaaagttcattcgggtttttctgcaacaatcccaatagatttgaatggaaagagaaattggattcagggcatatacaaaagagtcagacatactatataattattgggattaacttttagcacaatttttggtaaccgcctgtattagaaaccttgagctttaattaaaaacttcaaaatttgacctagaaagcattctctgttgtaggataataggaaattttcacccactcatttgttccatactgctttccaaaattactctgtatcctatttcaatggtcctttagagtattaaaactccctttatcaatcaatcaacgagtccttattgcttgtctgtgatttgccaagtgccatgtttggccattcgagaagaacaaaagaaacctttcattgaggaattgcttactctcggccaactgcagccacttccaagggacccgccttggcagcagtatgcttggcccatgagcaggagcgcacacttaccacaccgcgctggggctcctgtttatgcgcctgcctccccagcaagagcaggatctcccccagggcagggcctgtgtcctgcttcccactggatcccagtacccagtgcggcgcccggcacacagaaagcctttggtacgtactcactgacgaacccatttaaggaaaggcaacatctgaattctttagtggcttttgaagccctagcacctggcttctaacacaatcaaaaactgcttacaacaagagtgaggggacgaaaaccctcagtgatgcattttccatcctcccaggagccttgtgctgtgaaacgtatttcagagcaggaagtgggaccgatttttgggtttctcatgaaaagttcccaactggtctgaccctagaaagagacccctggaaatcctctgaggaggcaatatcctttcaacacgccttggcctgcttcctgaggcaaggaagcttctcctgcctctcatcaccctcactgagggcggactttggacagtctcttcctgctagtctccacctggcaccagaatggcctggctttacaaacaaaagtatcttcagctgggcacacacagtgccctgggccgaatgacagcactgtgggtggcagggcaggaggagggcggccagcagccaaggaggagcccaggtagctctgcgggggtggcacttacccggactgtggagagccactggtggtatagcttatcactccctggggaaagaggaggcagagaagctggtatttagagaagtcatacatctaccctcaggagttcctcaagttgctttcagcatgcaggacttggaaagctcaaaatctggagaaccacacggaggctcccacgccccctccctgaaggagctgctgccacaggtttctttctcagagtgctatctgatcctatcagtgtcctgagtacaaacccaaatcctccttcttgcctactggatagaggtcagaccccctaacaaccctgcttctcttcctccgtcttgtcttggcactgcccaccatctgcctctccgtgctgtactaccattctgtacaacctcaggctccctgatcatgcatcctccaag

SEQ ID NO: 26252 - DNA, 1934 bp, Bovine  19866880847410
  misc_feature (1)..(1): n is a, c, g, or t
nataaggcattgttcagtcttgggtaggtttgtctctaaatctgtgctttttttctttactgttgctgttgttcagtcactaagttgtgtccaactctttgtgaccccataaactgcaggcacaccagggcttctttgtccatcactatctccctgaatttcctcaaattacattgtttttttttttctttatacaccactaaaaatagtggataaaaatctatatttggacagaacaatgcaggatcaaagtatggccaaagaaaaagtgtttttgttaaaaactgttattctatttactgagtaatccttatgtgccagacaataggtactttacctattttctctctaatcttctcaacaaccctgagaaaggcattatcatctccattttatagatgggaaaactgaggctcaggaaggttaaacagtcttccaaaggtcacccagctagaaagggccaagcttccaaaccaagtttcctgaaccccaaactctggctctaaccaccatagcaatttgcctcttaacaaacttgaaaaacaaaataagcaagaaagccagttggaattggtcaacaagtgtatctcttgcccagtggactgaggagtgctgagctaatgaagccagggtagggtttgttctgaagagtgacacggcagagctattctcgcaaacaaaatacaaggccctcagctgagcatttcagtcaaaagcttaactgctgatgaattacatgcatttttcttttaggagaggatgggaagtaaaaagaaaatagaaatgaggagcttaaagaaggccagaaagcccattagcacttttgacagatccaaagataactctgaagccaccaaaacgtggcctcaagagtctgccaagaagcttcacgctgggtagaaatatgttacacagcttgccgtccaaatagggagacacagcgtcagagacaaatcctgtgccttattttggtgggagaaaaaaaaaatcacaaggatacttttgtggatggggaagggaacatttctgaaataaaaacaccacttggttgaggcataacccccaacccaatcaggttctgaaggattcaggtgcttgttccaaaaactctacacaggtatgttaaaaatatgtaacatttaaccaaattctctctaaactgtcatgtactttttttggtatttctcatcccatctgtgctgattaccaagatatttgtgtctaaacagaagctgtctttcttatctgcttcctccctgcctctttccttctgggacaccacccgcctcagcagtggggagtgggtggggattggccacagccctgggaacctcgctcagccctgggagcacctgtggggcagagcagaccttgggaacacctggagggagccctttgcggttcccaccaagcctcatctcagaagaaaacccctcagagagaggggcctccttccccctgcctttaagcatctggtggcttaagctacagcaaccctcaatttctcaaacctgtcatgcttttcacacccctaggcctttacttccattgcttcctccacctagaatgcttttcccttccttaaggacacccatttacttttcaagacccagctcaaatgtcacctcctcctgaaaggtttcctcaactcctcatttttcaagctgccctttgtgcttccatgacaatctgtctctatcatataatcactcagttacaagtatgtttttgccaccagactgacatccctttgggtgaaatgacatatcccataatctagcagtttgatgaaagagggaatcaatgagtggagaaagccactgactgaagactacggctcattagctcaggtgtgagcagggaggtgtaagagaaacacgagggcttggatggtgtgttaggaagaatgcagcactgacttcagaaaacctcgg

SEQ ID NO: 26253 - DNA, 1663 bp, Bovine  19866880859371
  misc_feature (1)..(1): n is a, c, g, or t
ncaaagaccagaggaaacactggcataaactattctggcagttcacatttctgtattttcaagagtttccataaagatctcttttgtaccggattagcttttccttttgatgcttttgaactgtggtgttggagaagactcttgagacttccttggattgcaaggagatccaaccagtccttactaaaggaaatcaaccctgaatattcattggaagaactgatgctgaagctgaaaatccaatactttggccacctgaatcaaagaattgactcatttgaaaagactctgatgctgggaaagattgaaggcaggaggagaaggggatgacagagaatgagatggttggatggcatcaccaactcaatggacatgagtttgagtaaactctgggagttggtgatggacagggaggcctggcatgctgcagtctatggggttgtaaagagttggatacaactgagcaattgaagtgaactgaattataaaattaatttatattttctctaacagcatggggcttcccaggtggcacagtggtaaaggatctgcctaccaatgcaggagacatgggagacatgggtttgatccctgggcggggaagatcccctggagaaggaaacaacaacccattccagtattcttgcctggaaaactccatggacagaggagcctggtgggctacagtccatggagtcagacatgactgagcacacacacacactaacagcatatgagtgtgctcatttccccgtacccacttcatcattgaatatcaccagtgttttagtttagtaagtctgttgggcaaaaagtggtttcctcacatgttttaattttcattgttactaatgagctcaagttttcttcatctacttactaaccatttgtaatatttctttctgaaatacttcgcctcatatctagcccactttactattggataactgttattttcttatttgtttgtgggaactctttatatattgtagatgttactcttttccacaatataaattacagatacttattcccagtttgtcttttaaatttctttgattctttttactgcataaaatgttttatttttggggaattctttataactcctgggtttcctgtctttcttgcataagccttttatggagtaaagatattaaccctaaaaaaaaaaaaaaaaaaagatattaaccctttcagtaagaatgggttttgctctctgaacattgtctgatgttgcacctgatttgagatcctaaaactgccattaaaggaagttaccttcccctagcctggaacaggggagggggcatcccagagggtagttagagaggcagtgagggttcccagtgatctttgttgaacaaaacaagctgaactcctgggatcaggtccttttggaagggcatggcttcttaagaggccccaagggggagcctgggcggagccactctgatcctcagctgcctgggagcctgtaggaggagactgcggctgccactatcaggcctccttcccattgtgactctgccagcccacattcatagccactcacaatcatcctactccaaaacaccaaacacagctgacatacacacccatggacatacagaaacacaatttaaaaaaatgcacatgtgcatacccacataggtatctgtgc

SEQ ID NO: 26254 - DNA, 968 bp, Bovine  19866880912068
  misc_feature (1)..(1): n is a, c, g, or t
ngataaaatgacttaaaaaataaataggggtgtaataaatacaaaaatcaagctggtaattataaaaaataaagcacgagtctgggacttccctggtggttcagcggttaagactccacccttctactgcagggaacaggggttcgatcccaggttggggaataaagttcccacatgctgcatagactaaaataaagaacttcttaaaataaataaataaaaacaaataaataaaacacaggtctaatggtgtcagccctgcctaaaaccttcagtggctcactatctcttccaggataaagtctaagcccctcgacctgaaatttgcagctccttgtggttttgcctcagtcttcctttccagactcttctccaatggacaacccccacaccctacctccctgaccctacaactaatctcctaaccacatcagactccactttgcagcttcctattcaaattacaaaaggagggcctttatccaccactgctccccttgcccagaatcccttctctctttctcacctggcaaaggcctcctgagcctttgagatcccgctgaacgtccactttccatattccccaaagagagagcagtttgttctctcccctgtgcccccatgatccaacgaccacaccttgtcgtcatccttgacctgagcccccagcccctccactgcactctgcatccttaggggccaagacttagtgcccacacccccctccccaggagtctggcagacagtctgggcttcacatgtgtttgctgttgaagaacagtgtctctctgatcatttaatatttggttatagagcgcatactctgacacaaaagctgtcatcgaagatgtataaattaaaacacgaaacttctcatcaggatgtctcccaggaatggctgggtcagagcggttggctagctgggaaggtgtttaataagaaccccagttaattaacaagagaaacat

SEQ ID NO: 26255 - DNA, 928 bp, Bovine  19866880922848
  misc_feature (1)..(1): n is a, c, g, or t
nccctagtatcaattgaaaaatgactaatattaagaatatttagcacctggattaacactgctaccagaaagctcgccactaggtgtcagccaaggaaaaggggaggaaggaccgcacttcagaaatggtttactttttcatccaattatcactgtcaatatcaactattcaaacaataaaatattaggccattagaattatctattaatgggatgtttttaagaatatatctaaaattttgacatttcccctttgcaattcataaatagttcataaatggtgttagtttaacctgtatttttcaagaaacatttgcatagattggagacgctgactcctaagaggacaccagatcactattcttctgaaatggcctcaaattgtacataacacagatcatatgctaatcatcactggggcgagcggtcagaggaaagagcatggttgtgagaatcagacagatggaaagtccgaatcctggctctgccacttcttaaaaaaagtgacacaacttttcctagcctcaatttctcatcaacaaaatggggccacgtgacttcttccatatgaggactgtaaaaatcaaacaagggaatatatatataaagagtgtggcataaaataaatcctttgtattattttctttttcttaagactttgagtcttaatgacttatttaacaaaactgtgtgtcaactcccaaactgctaaggacactgtaactaggtactgttgtcatttctttccgtccacagagaattattaggcactgtctatgtactaggctctgtgccagggatacatggctgcccacgacatactaccgaagcttccatttcttggtgaaaggacagcataaggttgaatgtgactgtctatttctgagaatatacccattccccacagaaaatcagtgtggatgcatgt

SEQ ID NO: 26256 - DNA, 774 bp, Bovine  19866880956618
  misc_feature (1)..(1): n is a, c, g, or t
ncaggaccttccctggggctccagacggagctggagcctcttggcctggcactggaggacttgtgttcaattttcctaaatactcttctgggtcccctggcttctctcccctctctggccctggtgcattttaaccctttcctcaggcctggggtgcagctgaccctggggagaccagtggggagaccaggggtcccgggatacttgtctgtgtatgtgggggtctctctctgcctgccttgctaagtagatagatcttcatctaatttatttgtatggagcctgggctccaggaggtagcccctcagatggtgacaaattgatcatagcaggcttgggacacagtcttctgaggtctgtccttgaagttttgattgacaggttttctgtgtgtgctttataaatgttgaaaatctctgcagtcgaaagtcttaactgctttaaggcaaactttaaaaactggagctccctagttcctctggagtgtcaaaattcggcttgcctttctgaggggaacatgtcgtcttaggagctcagtgtgtgcgcaggcgaaccttggaggcacatttaaaagccgtggcgttaatggatgaagaatttcattgaaagggatgcagagcctgccgaaagcgcctgttccccacgctgcagcttaccgagtgaactttggacgtcttcttttagcaaacaaaacctggaaggaaacaaaaacgacccacattctttttcttttttggtctaaaaaatgaaaaacaaaacccacctctgggtgtg

SEQ ID NO: 26257 - DNA, 2434 bp, Bovine  19866881094629
  misc_feature (1)..(1): n is a, c, g, or t
ntgtctttcctgggtggctcgccggccctttctccctttctttgggctgacagatgaaggcaggcaccacacgaacgtgcctgttttcaagtgcactgcatgaggaatattcactttatttctggttggtggagcatttccccctcagaggacacagtttactttgtgtaatgttaacatcttgctgtaacactgtctctttaagagagctacattctcaaaaaaaaaagagagagagaactatatcctctgcttctcagattttgagattcctgaccagagagtctctagtttagagccatcaagtggtgagatctctcagggaccaaaagaaggatcttttaaaggattaaaaccgagactgggtgggagatgatcccttgggcacaaagttagtagaggatggagagccttgtggataccttgcccatcaagaagagaatcatttaagtcagaccaaacaattctggtccgctcttctagccgcaaaccagactccttcgttgggatatgtctcagaggatgtggtgtcttttgcatttggaattagcttgatgtaatgaattctgggttttacatatttattaccattgtccgtgctccttctggtcttgtaaccacttctacccagcctgcctccctccagggagaaccagaggcagtcatggaggcagctgggggaggggaagctctccctggcttacagttgagcaggtggggttcaaatcatgactccctcagccacttatttactccaatgaagatttactgtagccagggccaggccctgtgctgatggacaggatgtggagatgaatgaaaaagtctctctcttgagatcttgcctgctatggtggcccacctgtaaccatcagcaagaccctgcttggtaactggggggctctgctggagatgccaggaaggcagctcaggtcacagggaagacagcactcaagctgggccttaaacagggaggaataggcatttgccaagctctgtgatggaaagtagcttacttcaccccctcttgagtctcagtttcttcatctgtgagatggggattataatatgtacatgaagcatcacagctccagacatatcagcacccctttcagagtgcttcgtactgttattgagagcaggtcttgggctcccctgcttccatttttaattccaattattttaaaactattgattttataggacatggagtatattgatattttcatgattttgttgttgttgttcagatcaaggaaatgatagaaaacattctaagggatctcagaagaaaacttagagaaacaaacatggtttttataaggagcatgtggggtcagaaaatgtccacaggacagctacaagcagaaaagcaatttggggaccacaggcatcggtctgagagcagccttgggtcctgcaatgtctttgcttgtctctggtcaagaactgtgaccttggctcataattaaaaagcaaggggggcaggcgataaatatggagactgttctagttaggatggtagcaacgataatattggggaggaaaaaaacctgcaagttgactaaaacggccttagacctggttaaacccctggcttggcctctcttagctgtagatggtagaactttaacttgggtaaaaaaaaggcatgagggagaatttcttggctcacatagctgagaaccctgaggcatctcttgctacagccatggctggattcaggagctcaaatgatgtctcatctctcactgatcactgttaggcttggcttggcttgcctgttagtttttatttcaaacattctcttgctttagaggcaagagattctattctcttgcagtagcagcataaggcctgtgtggtctttagagcttaaagtgagtctccacccatggcgtctgtgcatcagctctcaggggggaccacttggtgcagtttggctacatctgggccaccctgaacccatcactgttaccagacaatggggccttcagttggccagacataggtcacatgcccaccccgtggttggatgggggttggcaagatcagcttcgttgagaagaaggattttcacttcccattcgcaatggggtggaaaagacaaacatgaaaacaagtggtcagtggtgggttggagggtgccaagaagatgaaaggactacagaagattggtaaggggaggggagaagctgggtatcagggaaggcttcacctcagtgctcacggcagagctgaggctataaaggcaaggagggtgtccccagcaaactgcccctcagggtgtgttggctcctatcagacatggctctgggtatagaaggtcagagggggctgtgtggtctcacgggggagatatggagccgagctgcttccttccctgcctcccaggagtctctgaggcatgtccccgagatggagagcatcccaa

SEQ ID NO: 26258 - DNA, 1866 bp, Bovine  19866881113672
  misc_feature (1)..(1): n is a, c, g, or t
ncacacatacacacgtgtagagagctccatcttgctagcatgagctagagaaatcctccatgctcgtgggttgaagtaagtcccttgagacaaggagctacaagcagccttcagccaatgtccagcaaacagccagggccctctgtcatgggctgcaaagaaacacattctgccaacaacctgaatgagttcggagaaggacttccccccacttgagcctccagatgagaatgcagcccagtggccaccttctctgctgccttcggaggtttggagcagaggacccagctaaggcacgccggactcctgacccacagaaactgcaagataatgaatatgtgcagttttaggccgtgtgtgtgggcatttgttatacagggagagaacaccagtatggttgtgtgtatctgagtggtgcaagctgtgggccactccgggcgtttgtgagagtgggtgtggattcagatggcatgtgttggaatgtgtgtttgtggtatttgagtgtgcatctaggtgtgtgaatgtttgggtctgtgtgtgggagtggcaaagggatgtgtgtgtgtgctagtgtatgtatgtgtctatgagtgagcaagtgtgtgcatgcacacatatgtgtgctgtgcctcctccccccagactctttttattacttcctccctgggtttgatgttgggggtgaataaaatttaaagagctctaaaattttttagaagagccctaaagggagtggagctttccgtgcatgagtcattaccaggaacacctgtgaactgttgattttaattgggccacagctgtcaggttgcaaggggagggataggtcccttggatggtctgtccccagcccccatctcctgtcagatctttgggtagatacagaagcaggagggcaagagggcccctggaacccttgtctggccagactctcagtcctccaggaggcagtggataagggctcagtgctttggggacgtgggctgagccttggtctcgctggtgcctcacccaggtctcagggctcctatccgtctgtctcctgtttccctgtgccaggaaccaccacctgagacctgggcacccccgccccttcgcatccacacacccgctcacgtagacaaatgctcatctgcgaatgcaagccacacttgcagcgacagtggcgagggctggtagagcccccaccatgtgccaggccctctgctacacctctacatacgttagatccttgaaacaaactgggagggggggtactcaccatcccatttcacccaccaggagactaaggcacagcgggttcacgagtaatgcatggtcaccactgcactgacccgcacacaagcacacacacacacacacacacgtccacacgcctgcccccctccaatttcatcccacatgctcatacttactgatactcacacacatttgatgaagacatccaaatacttgcctgccttctcagctgacagtcacacgcacacacatgtgatcacacatgcaaatgcggaccctcacgcacacaggtgtgttcaccacctacatgtcttctccctcggatgcagatataccacctccccccttaaacagccactcacactgacctcaagcatgcttgaacgtgatctcagcctcagaactcctcccaggctcctccaattgttaacgcaggccagtcacgttccttgcagagctgaacccccaacccactccctgagggcagggctgggatggcttctttgtgggcctgcggtggggctggtgaactcatgggttctcacaactgcccgtctgcagggactggaggaggcggtgcctctcagggcccctgagacgggcaaacctgcccacttcaccaccaac

SEQ ID NO: 26259 - DNA, 713 bp, Bovine  19866881311778
  misc_feature (1)..(1): n is a, c, g, or t
nccaacaggagccttgtaatcagtggatgccagaccggcgtccaagtaaagtaaagatcctttggctggaatgaaatgatccctttaaaacgtgttcaccaggctcccctcattcgttacctctggagaccaagtccttgctgattttttccccttctttatctcaagtatatttaaatgtcaattaaatttgaaatatctacatttgtcagcatttcattgtgggccagcgtgacgtgctgctgatttgtccacgcgatgtgacacatgaaaaaaactctcgagatgcagatcttcctcattaaaaactaagcccgtgcgatcccggcacggcagagagccacagagcacgtccccgcttcctgacgccgtgtctctgacatggtatttaaaaaggaacagccggcgcctgtcaccactgtcacacgcgccgtgctagccagcgacacgttacaccaaacattagagagggttcggggagtcatctgcatgggaactccgcgctgagatgaggtgggcagaggtgggagcagccgtgggagacgctgggctctgaatgtgatggacagcgggcctttctttctcgccaagaccccggcagccctcactgggtagccaagtttgccacgacctgccttttcacagacagctctttgtgtgtaataaaatccaggcaagtggtgggtggcagactgcagggtagtagctgaatt

SEQ ID NO: 26260 - DNA, 740 bp, Bovine  19866881387028
  misc_feature (1)..(1): n is a, c, g, or t
ncctcggcaagtgtgacgttgcctgcagtggcccctcgtctgcagaacaggagcagcccgcactgggctgctcggtgcttcttactggcaacaaaattcatagataggctctctccagtcctcctctggcattgtacagagatggtggtgccaaatttaaagccagttagtgttgactggcccaaacgagcgttcttctaaggacacctagaaattcttagcctaactgtcatcaccggctctagtaggaaaaggaagtgtctttttatacaatccctcatcttagccttcagaggccgtaggtagtaaaaaaaaccaccgtgtctctgcagtctggccgtggaccaggagactgtgcacttcaccgtcaatacccccggctccggcccttgagcttgtctgtgtggtgagtgcagtggccacacggactgtgtgagggtccagaccgagccttgcacagggctgcccaggggagcagaaggaggactttaattggtgccctaatgctgttagtatttgcttctccaccctcccacttagagagtaaaacaagcatcctataattcagctgttaaaaagaacaaaataggcatgtgtgccctaaacacaaagtctgagtgaaacctccttgttctaacaaactggtttccaggttccaggagaaggcaagcgggacttactattagggcctctttgttccgggtcatgcccagacagtgtctcgctgagccctcagggca

SEQ ID NO: 26261 - DNA, 904 bp, Bovine  19866881449478
  misc_feature (1)..(1): n is a, c, g, or t
nagtattacttaaacggtttttggaaaattgtcatttagtaatatgggctagtggtccttcagtgagactttggagaactaatattggtcagattggccttcagaggtttggcgggtaaccctgcatccagagacctttcccaagacccagtccattctcacccaggtccagcaccaatctcatcagcagtctgtctccctggaggagaaggtgcatactcttctacactacaaccttcttcttctacactacaactctgtgtagtgtaaacttacaaccctattttacagatgagaaaaggaaagcttggagaaatgaattgacttgcctgaagcctcataatcaaaaagtagcttaactggacttgtcatattggtccatgaactctaaggccaggcttctcttgctccctggcccctggctctcccacctgctggcgccagacctaattagagccttgctggcccccaagatgggctgggaggcagatgtgtcattagagcatgagatgctgggagctcacaccatgtgtcattatgtttaattacatgagttgaggcttctgcgtgggctggtggagccagagcgtctctgtgcccaggtgaccagggaatttctgtagccaagtactggggcaggggctgctagaggtccttactacagccctgggagcaaggcccgtgtttcctgcgtctgctggagaaagccttctttctgaagctacggggagggtcttggtgggaaggtgctgtccttcatgcctctctggatgtttttatccagactcccacctgggcaggcaatggagtagaaggagagagctacacaaagggaacagtccccaggtcccctcatcctgtccccagacagatacaggttcacacgcacatacacacacacaca

SEQ ID NO: 26262 - DNA, 1401 bp, Bovine  19866881456127
  misc_feature (1)..(1): n is a, c, g, or t
ntggtactggctggaaaacacctgtgacacacaaccactctgtggagcaagagagagctgtggaaaagaatgaagatctctatacactgtgatggactgatctccagaaaagattgtgtgcaaaaaaaagtaggatgcaaaaaaaatgtatgtagaagcttacttttttaagtaacaaagagaggttatgggggagggaagtataagggtagaaggaatggggatgaaagtctgattctttaatgacaagtatatcaagaatcttaaagatgtgcatatcctttaacctggcactgaaattaccgggaacttagtttaaggaaaaactcaaatgccaatgaatttctctttgcaaagctgttcatatcaaaccactactaccaaaaatttaaatttccctccaggggggcacagttaagtaaattgtggcaaatctaggcaaaggaattaatagccatttacaaagacactatacactatctcacgacctgaggaaaatctctatgatgaagaccatacgcaaaagaagaaacaaatgtacatacattcaattatgtaaaaaggcataaaaacatttgcaaagaaatagaccaatggtgaatgctggttgccttagggtggtgggaatgttaagagacactttcccctcatgtttgcttgtcttttctaaattttctacaatgaaaatacattatgttcacaatcagaaaaaacattacacactgttattttttggatgttgtttcaacctggacctttgccctggtgtatgtttttatgactgctcctgtcattacaccaagaagagaaacatggtaagtgactaggtagccccgagtagcattaggcgtttacctacgtaggtcggatttttatctagcacaaaggaccctataagtaggaacattcaaaggcaattagttggtaacaatattataaatagaaaaggagccaaataaatgtttcctggatatcattaatttagttgcaaaatagattcagagttactctgataaccccacataaagaaggcactcattataaagacagccatgtgttaaacaagaaaatgttagatgcagagatggctctgctgtacacaactaagatattcccacggagacagcagttctcaaaatatcaccctcaaaaacaaaagcttcgtctaggaaaacaatcccagcacaaaactaattgatttggtcctgcctacttgtctcagaatctggcacactcttcctcctccctccctgctctggcttggtctgaatactatgacccagtgcaggccacttcttggaatgttcttatttataaagtgagcataataatttactttacaaaacactactgtataggagtacagagaagactggacaagaggcacggggacacacttag

SEQ ID NO: 26263 - DNA, 1171 bp, Bovine  19866881489225
  misc_feature (1)..(1): n is a, c, g, or t
ncactgggagatgtggacttctcacaaggctggaaatgatctgctgcttagtttttcgaggggtgatcctgggcaagttaaacagaagttttcttaatggcccccatcctttccagtttaactcaaactcaataatgtgataatagatgtaagacacgtagcagagctacacatgcactcacgaacggttcctgttactataatcctgtcctttgcgcgaagaagattcctttccgggaggtgggttctgggccttccagggcagggcagcaggtccgaggggaggggcgagtgtccgttaatccctccctggccaggtcgtcccaggcagcctgagaggtcaggaaggatttgtaaagataagcacaggcccctcgtcaccctggcaacaggccacgcccctccagccagaccaggaaggccccgcctctgacccgccatcctcacctctcctccgctcagccctgggcgagcctggcctcctgggctggctccctgaaggcagagagcctaaggtcagtgctcgttcccaagcctcagtgtgcaaagaactccccagggagcatgctgcagtgaagattcttgggccccggaacccaacagttctgcatctctgggtctggagtggggccctagcatctgtattcttaatacaggccctggggtgatgctggaaccccccagggtggaggctctggagcagtgagacctgggtttggattccaggccctcttgggaaactgtgaagtcgcttatctctgagcgtcactttcctcaactgtgaaaaaggaatggtagcactgtctaccccctaaggtaaatgtgaaaacagagattacacaagagagatggctgtccctctggtgcagaccgccgctccactgcatgcctcctgggacagagggctccctccctctctgcctgcaggaaaactccttcctcagtggggccgggctctgtctcctggggccacctgctccttcggggacaaagcactttccctgtccccccaggcgctgtctctccagtctgctctgaaatagagggttctgaatcggggggcaaagctccagattgggggtgggatcccttaggatggtcatgctttcctagtggctcagcggtaaagaatcctcctgccaatgtagggtattcgatccctgggtcggga

SEQ ID NO: 26264 - DNA, 1236 bp, Bovine  19866881596879
  misc_feature (1)..(1): n is a, c, g, or t
naaatcctgaggccattttcttcctgaggaaataaatacctaagtggtggtcgcttataaactagattctaacaggtaaacagcaaacaacaaaagaaaaacaggaatagcttttagcaaggaagaaaaattgcatggccaaatataatttttactcactatttaaacccattttcagtaaaatcttgctggatatttttaacagatcttaaatttttaaaagtttgggtcgactgtgacatttctgtatgtgtctgtctccattaacagctcccaactcaaagtactgactcaccctcaaatatttgttttaataaaatgttttaattgctaataacaactaaactttattaaaggcatagatttcaacaggcattcttctgaagcctttatgtgtattaaatttctggaaaaaatcattttaccaagaaaaactctcatttagatgtaaggaagtacatgatataagacaactgttaatatcattattccctttacacaaaggcctaggataattcagtaataacttgtctaagatttactctaagtctgactatgaatccagattctttcactactccatgccacgcctccaaagcatttgaacaaactttagccactgcaagcatggctatttccgaaatgcagtggaccatgaagcccctgaggacagggatacggctttattcatagctgaatccccagtatccagcatgaaaggatgaaaagaatgaacgaagagtaatagaaggaagagccccaggctttataccagttgcccacatgcaggcagacttccctggtggctcagtggtaaagaatccgcctgccaatgcaggagatgtgggtttgatccctgggtcaggaagatgccctgaagaaggaaatggcaacccactccagtattcttgcctggaaaatcccaaggacagaggagcctggcaggctacagtccatggggtctccagcatgacttagtaactacacaacaacaaccaacatgcaagcacccaagataggcagtgttcacagactacaagtgtcacaggagagggtacagtactggatggttctgataactgtgggaaaaattagtgcataaagaagaggtcttgtatatgggtttttaacctgggctctagagaccatagaggggttctgtgaaaacctttaaagtctatcaaactttataaggacatccaaaaacatttttttaagacaatttcggagctttca

SEQ ID NO: 26265 - DNA, 2830 bp, Bovine  19866881636890
  misc_feature (1)..(1): n is a, c, g, or t
ntgtctggagaagggtgggcgggagctgggtctgcagaggcctctccctgcctcgggtacggcggacacacagacacacagacatccttccctgcggacactgatgagcctgaggagcgtccctgctcttctggaatgcctgtggcacctccccctgcccgcccgcattcctgctcagaatgcagggcctcctctccctggcacggttcctgggcactggctccccagcccaggggaaggagggggcgataactgccatcccttccaccctcacccacacacagatgctggggttcagcctcccactcccgggtggccaacacccctgggcaccctgcaggcccatctcctccccgccacgccccagagcctggggttccctgagtcctgccccagaggcagtggcctcgtgggtgcctggcacacagtgggcccacggcagcacgccctgctctgcagagcactctctgcactgtgcttctcctcagcagggcccctgagctcgggctctgaccccccggccttacagaggaagcccggaggggctctctcgtggggtgtgtcatcccccaggttcagtagggtcagcggaagcccagctcctccccacgctgagctcagctgacgggtgacagggaggtcagccctctgaggtaagggcccgggagagggaaccccgggctgtggggctgggctccttgccatcctccctttgggttgtgctgggcgtgggggaggccagtgcctggcattccagagtccgtgctgaaggaggaggcggccggccaggcggggagcacggctccccagcctcggtgcctgcccgccattctcagcccgtccgtggggacatgcaatggggctgcgggctctggggaccttcctgcgggtgttgtggctcctggcaggtaggcagggtggggccctcaggcaggcggaggtggagtgctggggctggccgtccccggaaggtggcggtggtttgtgggctgactggggccaggactcaaatcctgctggcttctccaagtttgggtcccccctggctgggttacgcaggcaggtctggcctcagtggttgtgtggaggttgtgactgagcaggggtggggctgtggcttctagatccattctggggccagagtacctgacctgggggctcctggaagggagggtgaccccactgccagagcgagggtcctagggcagagggatgggggtggcattagagccagggcctgctccagtgccacagatgcatacacccacctccgctccctattccatttcattgctctgttcacaagggccatgtcatgtcctttgctgggcaccaaggacgtacccaggcccctggagaagatctcaactgtgtaaacagatattttcaatccagggttctggggaactgtgcctgggagtaggcaaggaattgggagggacacagtagcttgcggttgagggccagggaaggcctcctagaggactggccatttgaatttgggctttgctggatgagtaggagtttgaaaggcagggttaggaaaatgaggcatgccgagcagagggagcagtatgagcgaaagcccagaggcaggacttccaggaaatgcttggaggaacaggcagctcgaggtctgtaggaaggcgggttgacatctgaatgcttgatagtgcccaggccatgagggatcaggagtgccggggggagtgatgggacattacgcagcagaggagctgggccaggtcatgcgttagatctctggctgctcgtagaggcggatgatggagggggttctgaagactggtgaactagaggacgctagactgtggcccagagagttcgtgagtccgggaaggcaaggtgggaggaaagcaggcactggcgagcgtgtaggggatggacctcacagggcccgaagactcaccagacgtgggaacaaagggagcatcctggattccagcctctggggacttctgaggacctcaaagaagtcctttgagaactgggaatgggttcagttgatggatactgagctccttgtcccaagaggcaggtaggctctgggtcaagactgtggttctggccttggtgctgagccttggcctggtctctcccgaaggcccaacgtgtcaggaagacatggacgaatgcctgtcggagccttgcctccatggtgggacctgtgaagacaccgtggcaggctacatctgtgggtgccccgaggcctggggtggattggattgttctgtgccactcaccggctgccagggccacacttgcccaccgactgccacctgcgtccctaccttcgagtcaggggttcacagttacacctgccgctgcccacctggtacccatggacctttctgtggccagaatactacattctccatggtggctgggaaccccttacgggcttcggtgccagctggcagctccctaggtcttgccctgaggtttcgtaccacgatacgtgtgggtgccttggccacgtgctctgacactcaaggcagcgtggagctggcgctggtggaggccaggcttcaggccacactctggagccacggcaagaatgtgctcgtcctgaggctgctggaaccacccctcaatgatggccactggcaccgagtggaggtgacgctccgcttgggggtcctggagttgcggctctggcatgaagactgtcccgcccacctctgtgtggcctccagtcccatggccacggctgccccggcccccacgcctgctgggtcccgcttacccagctgggcggcgtggcctttgcgggctgctcaggatgtgcaggtggatgggcatctcctgctgc

SEQ ID NO: 26266 - DNA, 834 bp, Bovine  19866881674894
  misc_feature (1)..(1): n is a, c, g, or t
ntaaatttttctgtgaacctaaaactcctctaaaatatgaagtttatttattaaaaaaaaaaaatccctacctaatattaagttcgttccacgtatcaggcaccatgctcagttcagttcagtctctcagtcgtgtctgactctttgtgaccacatgaatcacagcacgccaggcctccctgtccatcatcaactcccagagttcactcaaactcatgtccattgagtcggtgatgccatccagccagcttatcctctgtcgtccccttctcctcctgcccccaatccctcctagcatcagagtcttttccaatgagtcaactcttcgcatgaggaggccaaagtattatcgtttcagcttcagcatcagtccttccaatgaacacccaggactgatctcctttaggatggcaccatgctaaattatctcatctaatcctcacaacaatcctatgaggcagactacatttgttctccttttacagatgaggaaaccaaatcacagagcagttaattaacttgctcaaaattatatcaatagaaaagtagaacctaggtctatttgacttctgtgggcatttccatacttgatccatctcttaatgcccagtctctacttttggaattcaactgatttactgaaaagtaaagatcaggaaacatacattaaggttacagaagctaccacatacagcaccacttcttggaaacagagagaaaagaggcatgagttcctttgagcccacttgtcacagagaccctcctctaggacaaactgatctctccagcactagggcttgaatctaagctggcaagatgctttcctgcatcaag

SEQ ID NO: 26267 - DNA, 932 bp, Bovine  19866881787418
  misc_feature (1)..(1): n is a, c, g, or t
ntgttggatgtttattctgcacaggatgcctgtgtcatagaagctcccagattttgagggactgcatactggatactagtccccacagggtagctcatttgatctttaccatgactctttaacgcaagtgcttctagaagccccatttaacagctgaggatactgactcttgggaagtgggaagggacttacccaaagtcactcagctccagtgtggcaggagtgcatgaatggaaggtttgtttcccactctgcctccctgccatccagctagggacaccagtttggaagcacagaggcttccacagggagctgacttctggattcagatgagttttcgcagagcagctcagctccttccttcatgtaggtggaagccttccctttgaatgaaccaattatgttcagaaagcaaaaaataatgtatgcatattagctaatgaggatgctgctcaggatatttttagctgagctgagagagacagagaagagaatgagaattggtagaagttgttttggaagaagaggcagcttggggatcagacagccctttagcacagtgctcagctcttaaactgcttttggctgggtgactgtggcaaatcacctgtcctctcttaaagtgtgtctgagtacccgcctttcaggggtgatgcaaagattgaagataatgggagtaaagcatgtggtcagtggtcaccaattgtacctatgataattcttcatttatcaaatacttaactattgttgagtcctcagtgtctatagatataataacttttttctcattatctccccatgaagcaagtgctaataatatctccattttccagatgagaagacaaagttaaggttaagcaatttgctctaggagggccaggattcaaccctaagcggcctgtgccctaaccaccacacaatattgcttctat

SEQ ID NO: 26268 - DNA, 1097 bp, Bovine  19866881916525
  misc_feature (1)..(1): n is a, c, g, or t
naacatctctttgtgaacttaagcctggattgaaggctatgtgaccctggacaaataacttaccctctctgagcctgtttcgtcctttatgaaagggctttgcttatccttacctcagttgttatgaggacagagatggaaaaatttattaacagtaatcataataatagcccttactctgtcaggcattctgaaagcacttgacacatattattcatttatcttcacaccctgtgaggtgaggctattcagtattatttttcctgttgaacagatgagggaactaaaatgacttgcccagagtccttgctcttaatcaccatactgtgctgtcactcagaacctggcttgcagtaagtgcttgttgataagtctggaacctgtcagctcaggtgtctgaagggcatacactcatgctcactgaggggcagtggcatgattatggctccctgcctgctcttctccaacacagggccttgtctaagggaagccatgcttgctgctggctagaagaactagcacctctgacccaaggccatctgggatcatcatgtcactggggaatctttaagtagtctatttctaaatttcaaagcaagcttgggctatatttacagcgtttaacatatgaaaaatcactgggaaagtgggcttttaagtggaacggttgtgtaatggaatatttcacgttctggttcagccataaagctcagggctgataaacaaagcatctgaagccaaatggctcctcatctgaccccaattaaaataaagatttcattccattctgtcctgacaaagaggaacatattgttgcctttaagggagtttggtttagttaatgaaagaattttatttcatttttccccccaaatacaatatctaattaaataagattcaatttgttaagacttctggtagagacatgttaactcttttaaagctgtgtgcctacatgcctcaagatgtggagggtacttacaaatcctacttcacactccattgtctaaagagataaacccaagtcactgtgaaggcaaacattatcttctccaacaattatctgtttacacatttattacagcaaccgtatgtag

SEQ ID NO: 26269 - DNA, 845 bp, Bovine  19866881925513
  misc_feature (1)..(1): n is a, c, g, or t
naccctaagagctgtaatgtgggcctttggtaacacagaagccagtgtagcaaagctgtgggatgcagtaagtacatggaaagtatgatgctgaaacccagcaattatgtggaagactaattgcacattcacaaatacaacaaccaattatctaagttaactttaattagagctataatcacagattttaattatctgaagaaaatccatttaatacaaatagtctgccttaaatatttcccaaattaatttttttcatgttccttcccatttttggagagagtggtagaaaaagtgtctgagctttatattcagagaggcccaagttcaaatctgtttcatctcttaatagctgtataaccattaaaactctatcttacctctctgatttggcattttgttttctgtaaaatgggtttgatttacttactttgaagaatggctttagaaattagagatactgatatcaagtggcacataggggccgtttagtaaatggtggttgctcttattatggttattataaacatgggacatgggttttggtttccagaaggttttactcacatcaaacgtttttcttgtttctgctgccttgtgagctcagggaaaaactttataattcatcttctctttttacccatcagattgtttttattttgattttttttatttaacttgggttattgtatggttgttttcatttgcagctgtggcataagaatgaaaagaaaagaaacaaaagcagatggcagagaaaacgaaaggagtaagacatttccagcccttatgaatatttaaaaacatgtgctgcggttcctttctactttagagctggccattct

SEQ ID NO: 26270 - DNA, 771 bp, Bovine  19866880368668
  misc_feature (1)..(1): n is a, c, g, or t
nttctgatagatttttccaaatattaatctaacagcagcatatgttacttctaagtctaaattataaagctcctattttattgtttgcatttcaaaacttattttaaatgatgtggcagtgaaagtgtataaaatatacttactaaacattattttccacattcaaattagagcctcttgggctgatttttaagtgccatgtacattttaaaatcaaaatgtattgctgacgttcttttaacactccctccccgttcactcttcccaaatgccacagttccttactgctccgaaagtacttatctgtgcattcgtctggtctttcacaacagcacactccaactgtttgtacttcagatctctctctcaattaaagtaacaaatgttaattctttaaggtacttaaccatacggtaaacttgctgcactcttcctttcgttaactttaaatctcattatagcaatttcccctcaacctttcctcccccttctaaattcactacaccagcattgctgcgaagcaacatgcacatacaactcctttcttaagctcaaaataccagtttagcgccactaaaaaagaattaaaatgcctggttacctcgtttcagaacctcatgggagctttttatttgctttcctgttctacctggacagtctatttctcttcgtcagttggcgcggtcccttgctgcccccagcacgagtgcaactcactacaatgtggtttcttttacacaccatcattccagtatctcccctccatttcag

SEQ ID NO: 26271 - DNA, 2396 bp, Bovine  19866880473373
  misc_feature (1)..(1): n is a, c, g, or t
nccctgggatgggaagattccctggagaaggaaatggtaacccactccagtattcttgcctggaaaaatcccatggacaaagcagcctggcgggctacagtccatggggttgtaaagaatcggatgcaactgagcacttgtgagctcagttggcctgatattaggtacataattagtagaagttatgaactgaattttgtctcccccaaaatttctacgttgaagccctcaatgtgatgatatttagagctggtgcctttgggaggtaattagatttacataaggtcatgaggctgggttgctcaggacgggattagtgccctttgagaaagagacaccaaagagctctcattttctctgcctctttgtctctctcttcctccttcccaggagaggacatgtgaggacgcagcagtctgacagccacctgcaagccaggaagagtcctcaccagaacctgggcatgctggcatcctcatctcagacctcccagtctccaggactatgagaaaatagatgtctgttgtttgggccgcccagtatatggcatgttgttacggcagccccagctgactgacacggtagatgaaaaaaaagcaaacagaatcagtttccgaaaggaagtcttgaccctctgtgatcaaggaccatctcagttctgcgctctgaatgaattccgagtgacataaacagaactgccaagtgggccatgtttgtctacatttcctgtcctgtccacatatttgggtgactttttaccctctcagcacttctttagcccaggaacacccactgtgctgctcaccaaacctaccctctcctttttccttttggccatgttttgaggtttgcaagattttggttccctgaccagggattgaacccatgctccttgcagtgaaagcgtggagtctgaaccactgggtggctagggaagtccccaaacctaccccttgctgacaggaggagctcatagtctttctccatccagaatataactgctccccttgttgcctatctcccaaggtagcatcatacttttatttcccccaaaatgatagccaatggaataaagagggctattcattttttttcttttggcattattgaaatatattgccataattaaagttttttttttaatttaaaaattgtaagcagttaagtgtattagctgctgtatgccaatgtcttcaacagtgcaaatagcttatacttttgtttcttccaatagggatacacataaaggagcccaaaagtacaagatatcacaaaataaacatggccatcttcctggaatgcttctttcactcaaatatttgttggcagagagttacgtaatttaatgttcaaataacttaaaacagtgctttaggtaccttggtttttctcctagaaaatgggtaatgacagcattgtcttttccctaggacactggcttaaaggaattcagtttatgagcacagtaactgttccttgtggcaaagactctgtcatgagggccaaactctaaatgcattttaagttacagtgcaaggccttgggacttccctggtggtccagtggttaagactctggcttccaatgcagggggtgtgggttcaatccctggtcggggcgttagcatcctgcatgctgcagccaaaaatgaaagaacactggagtgggtagccattccccactccaggggatcttcccgacccagggatcgaacctgggtctcccgcattgcaggcagattctttacctgaagataatgtcatttaaatccaggttgattagttgcccagtgagctgcacagtttgggaaatttcctggagtctttgatttgtgttctgatgctgaagtctatagaatcccaccctcaactccatctacaggtcttgtatcatagtgatccagagaagaatgttccagactctgagaattgtattatcttatctcctggacactgtgtaagaaggctgtgacaattcctcatgtccattggtgacatgtgcttacagtacttggcatctttttgcctccaaaccttaatctgtgggataattgaagctatactttggaaatacctaagggagtaacattataatcgggagctagcctagttttttctgggtgtataccagctgttgaacaatattattttaaaaatctcttggtgcagcatgatcttactttttcttagcctcatttttgtcatctgtaaatagtaaaagaaaagctgactcttaacatttctcaatgagatcatgtttatgagaagactttgtaaactctagacctttatacaaatgtgggatagtatcattaccttaaaggaacatctcctagaaagaggccccctcccaccctgccccagggataactggtgcacgaaatccaatttcgtttc

SEQ ID NO: 26272 - DNA, 1927 bp, Bovine  19866880511313
  misc_feature (1)..(1): n is a, c, g, or t
nacaaatcctgagtaatggtgctgaagcaccccaaaccatcttaataggtaccggttgtcacccagcttctcctcatgtctgcacagaccagctcccaaaggatcatgctcaaaacattgctcttggtctctctggaggggagcctttcaattttcatgtcctattattaacctcttcccaagctctgttttccaagtttaggccggctcatcagagttgaacatggactatttggatttgtgcccaagctgttctccgagcctgatagcacattcattactccctacccatggtttctgctaaatgacctcgttagtgctataattacatgatgttgctcttcagaaagctgggggtggggtgggagatgagttaacgaaggccaagtactgagatggagttcgttgtaaacatactgaatgagcctaccttccccaggcctgattacccatggggagttggaagggaagttttatggtctttttcctctcctttctttttcatttcccattaacggatgatgataacatatacaaatgtgttggtggtagttggtaaatacatgaatttgaaagctgggtggtgatatttttacaacttaatgtatatggaaccatacatttcctggaagtaaagaaatgaaagcaaatgtcttctgagcacctatttaggtttttgttcatcttcgcaacaaatttatgagctagttattatccttgatttactaatgaagaagcaggttcatagaggtgtattttccaagggcaaaaacaagtatatggctgagttaggagatgaacccaggtgtaccttactccaaatctcaatatcccatcctacctctcagttcattcattcactcagtcactcattcagtcatttgttcaacaaatgtactctgacctctatctgatgacaaaatctaatcacataatttcagagtttctatttactctatctaatttaattttacagattcctcagatgaccctaaactcagtggggtcttcttttgtaataattttctcagtcctctcaggcttccaccttgggggtcagatctcaaatctgagattcagaaccctaggtgtctgagtgtgtgctcaatcccgactctttgcgaccccaggctgtaacctgccaggcttttctgtccatggtattctccagacaagaatactagggtgggttgccatttcctactctcggagattttcctgacccagggatcaaaactgcatttcctgtactggcaagtgaattctttactactgagccaccagggaagcccccaggaccctggggtgtatgtttaaagaccatcctgtgcaaacgtctatttttttagttaaggaaactgaggttcagtggttttttgaagtggtaagcttttcattccagtatgttctagggatgtcaagcgtatatttgaatttacttggggtgctgagaagtgatgattgtgtgctgtaacacagcggtccccaacctttctggcaccagaaactggtttctaggaagacaatctttccgtgcatgggggtgggcaatgatttctgttttgcccgctgctaacttcctgccgtgtggcccagttcctaacaggccatggacccatagtggcccatggcccaggggttggggacctctgctgtaacaaatacaaaaaattccccctgctttctgggacagttcacagtgcgtgtgcctgacaagaggtacttgtctctctactgcacacatcagttgattcacaatgaactttttcagaagcttgttaactacaaaactttgtcgtcacacttttgtgacagagaatccgttttcccagactagatctcagaagcattcagagtcttctttgagatttcgttttgggtggtggtaaggtgaaccaggagagtcaaatacctttacttgtcccta

SEQ ID NO: 26273 - DNA, 3567 bp, Bovine  19866880546426
  misc_feature (1)..(1): n is a, c, g, or t
nactggccccaaacagatggggtcgaaaactcccccaaaatgcagtcttgctaaattaaaaacttgatccaggagtggaacaaatagggagccatgaatggaatggagtcaggtccactcaggcgaattctttcttctccccttctttttcctgccttttaaaagagaaaaacgcgccattccatgtctatcagtgtcagcgtctgtgcagagcttagcagttcagtgtcttgctttaattagtctgaaaattaaagggcaactctgggccaatgtgagtgattatgaaaataaaatacatgtacatcccatgcaatcctctcatttaattaatagtcttgtaaactgtacagctcactttaaggcagtctcgcagtataacaagtccatttaaatatccacttaatacttaacaaaatgtgagggacataccgtagcatacggtcccttctcaagtttcactgtctgaaatttttcaaagctgacccaagtcaacctgaaaaatgtttaacaccctaggcttgaacacaagaaactctgtgatgaacagacattcaattacattttttaaaagtgagaagcatttttgtaaaatagagactctggaaactaattggcagccacgaaacttgtgagcgaaggccagatcttgtggggaacttttactacagtaacacggctcaaagaaaatgtgaataaaaggcatctttgtttcccagtcaaattagctgattaagaaataaaacatcttaacgtgtttttaaatgtagaattaattatttatatgaaaaaattaaaggcaggttatgtgaaattctactctgtgtgtgaattgaatggggcagaaagagtaatccttatggactcgtcttaggtcaagaagacaaaacttaaggaaagctgaatattaagagctttgtcggaaaaaaaaattgcattcagatcacaagttgtgcttcccattttgattttcaaagtccagattcgttatggtacacatgaaaaaatgtgattcagaacaagaaaactgctttgtagaggctgtgtcctgacaattgaggggaagaagaaaacacagctatacaaagagcaacgcttactcctgggagaatacaggtcttttgctctaaggaacccaaagaaggattcacaggaagaatttgaacaggccactctttattttgctaatgggtgagtttggaactcaggaaaacaagaaaacctaagttacttgttaggctcagaaaagaagtaggcaggtgacctttgacatcttaggcctcctcgtctcagtccaagtcctctggccctgacctcttcacattccaatatcctgaagccaggccctgcctgagccaaggttgcaaattatctctgagatgtggataaacatccactgcgtcagtgtttttcaaggtgtggtctagggaccacctgcattggggttacctggagaattttcagaaatataggttcctgggccccaggaattactggaccagagaggaacgaggttcagaattttaccttttgaacacattgctcaggactctagaaggatgctgaagtttgagaatcactgtgccagaggccacttagagaccagaggagtaaacttcccgacatttctttaatggattccctttagtgaaaggcattaactaaaatgtgaaagcctgtccacaaatccttcactaaacaaaaaaagtcctccagccattttctccatttctcatggcatctcttcacagagggagtataggaaggctttgtcctttaaaataagttcagtgagtacttgaaaagtcgtttggcaggagatgagggatgagacaaagggggaagattaatgacgaacagaatcagagtccttgctaaaataaaaatggattcacacccaacttcttatgaaggctaagacatatggcagctcatgtgggaagcgagcgtgtttagtagaaagaggtcctgctgcagagctgtgtgatataggggacagctttctcagccaaaaacagaacatcacatgctctgggagatgcaccatctctctgatgtgatgagaggctgactttctaaaacttgagcaaactctgcccgaatggctttaataagtttaatgagcttctcagagttgagatgatcaggttttggggtttagatcttggttttgctcttatcttcatgcgtggcctgacagccaatcattttctgtgactgtttatggaagccactgatagttgaagtttcctcatttgtaaagtggaagtcacaatcctccatcatttctgagaactgggaggaggaaagtgctggccactaggaatcgtgtctgagtttcagctacaaaccatggacttttgagagactttagcaggaaaatgccaggacatacctggaggatgtttttgtttccctttttgttttttaaagggagaaagagcaatcctttgtactttgtgacctgttatgcacaaaccttaaagcagcaagggccggaccccattcctagggctcattcaaagttataaatgcacagatatacaaaggatgtttacaaatatggcttattatgcttacagtagcaacaacaggagttcagttttagtccgtggaaaattgctgcttaataagaactttcccaaacccatgtcccctttgagataaaaatttccacactaagtttcatcgcccactagaatttcctttggaatgtttgtgctaaattcctttctccctgattgaaatatacaacacaaaatctagcttcaagacttaaaaagtaatgcactgaaatgcacagatacatagagacagtgggctgagggaagcagcagagagttggggaaatgaattaaactccccaataattaagaaatgatttacttggcgcattcagaatttggattgcttgaacagtagggcagtgtataacttcattatgtgccatgggcaaccccagcaccaactcagttttgctgcaagaagccttttttattttttcggtatttcctgacttggtatgtgcagttgtgaacttaattaacacactagtgattctgcaccctcagggaaaaatggtacattttgtaaaatataaacacagaaacaaagagaaagttcctttcctttctgttcatagttgtttttcttccttcttttatgttatgcattaggaaaacatgaaaggcacacacgttatagagcccagttctggaccccactaaggcacgatatttaggaactcctctaaatcactctcgtatcttacagaccagtggcccccaacctttttggcaccagggaccaatctcacggaagacgtttttcccgtggactggaggagaagggatgctttcaggatggttcaagcgcattacctttatcttgcactttatttctggttgttacattagctccacctcagatcatcaggcactggaccccagaagttggggacccctgctgtggaccatccttagctgtttttggatgagacaaagccgggttaataggtagcaaaaattagctctttcgatggtagcattgcatcttatatgccttttt

SEQ ID NO: 26274 - DNA, 1536 bp, Bovine  19866880591178
  misc_feature (1)..(1): n is a, c, g, or t
ntttattgtgatcccacagtcaaaggctttggcatagtcaataaagcagaaatagatgtttttctggaattctcttgctttttcgatggtccagcggatgttggcaatttgatctctggttcctctgccttttctaaaaccagcttgaacatctggaagttcacagttcacatattgctgaagcctggcttggagaattttgagcattactttactagcgtgtgagatgagtgcacttgtgcggtagcttgagcattctttggcattgcctttctttgggattggaatgaaaactgaccttttccagtcctgtggccactgctgagttttccacattttcttgtgttctagagcttgtgacttgcaactactgagcccacatgctgcaacacctgaagcctgtgcacatagaggccatgctccacgagagaagccactacaatgagatgcccacacctctggtcgctgcagctagagaaaggctgtgtgcagcaatgaagacccagtgcaactaaaaggaagtaagtaaaataaataaataaagagacagtcttgatcctcaagctccagctccaaagttcctccaaatcttcattgtctactttcacaagaaacctctctggggaatgttccctcctagagtagggaataattcggaaacacaaggatgaagatgttgctgtttcttaagagataataaaagcatcacgttgggtgtaattatgactggacttattgtaaatgccttcccaatttactagatctcttaagctctcctgcccaccctcatttatttcccaggattcttcgtactgaagtaatgtgcccgattattgcataacattctgtggacagacataatattgtagaaataatttaattggcgacttgtaatgaaaagagagctgggtaagtcgcttgggttgcaatttctctatatagttttacatggagggggatagtgctgttgacgtgaataggctgatattgatttcatttaaaattttcaacatctgaatgatgtgagcagtgatctgtgggaagacactgtagagtggtcggcatatcccctgctaacaaaataccattttcaaaggatttttctattagcattcacaaagagattgaaaagggttaggagaatgttaaaatttttactgaccaaagaaatatgaattaccatcttcattttactcttaattaattgagttattggagcttatataatcctctgttaaacacctgaaagaaagcaggcaggaacctggaggtattgtatagaagactttgttttctaaaggtagtgacttcaatgaccccatgagagagtccttagactccccctagaaatggatttcgaatgcggcagtgactccttaatgctgccccattaatgagttccaattcagtggttctaagttaccatcatttaacaagaggaacacaaattagattttcagactttcagagatgagtttctcatggtacccaagtccagtttggataaagaaaaggttgtgggggtgggggggttgg

SEQ ID NO: 26275 - DNA, 1351 bp, Bovine  19866880602907
  misc_feature (1)..(1): n is a, c, g, or t
natggcatttacgacatggtgacataacactggggaaagggaaaaggaaggcaggaactgttgctgttgattttgtcctttagttttgatctgtaaagctccccgtcaatatacctggttctagttcaagctctacttttaattagttatgctacattgaacaaaatgctaacttgtaagtttcaattaaaacaatgattgtgcatcttatttgccaggttattgagttaggtgatctgaaaagtcttatggagatgtctgaaaatcaaatggagtaatttgtgtaaaaccataaaacttaaacattaataattggtaactgcttaagtttctatgtaattttcccttaattatataggggcagttctcccctggatgaggaaggaagattatctcacaggctttcataactcttaaaattccaaagttgctgcctggaatttcaataggattctccaaaggccttaaaaacgttaactctcaatttcttagaggatacccaatgaagtgtttatcaccctctttaccaaaaacacacatacaaaataacatagacctcaaagccataaccagaaaatgtttcccaacagccattaaaacttcttaaaaaacacattaaaaaacctattaacagtattttttaataagattagtcaataatgtagacaaaaggtaaaaagtttcttacttggatttggctgcaataacacttcagtttgtttcattattttttctgtccatattttggtacattcagctttgctaaggaggttctctaagtgagcatccaattctgtcttctctgcctggccaagcttttcttctgtgaactgttattgattgtataataaaaaaaattaaatataccccaaatacactttaggaatctatatcagtaattaaaaataaaactcaaatccaaacaatcctggacatacaaataattgttcttaaactgttgcatatgaaggctgttttttgcccctcttgtaatatatccatacctcttaggatatgataaccctaaggcacttaggataatcatatctcatagttaatacatatccttagttctgctaaaatgtatggtgtgaatgatagaaaatttgccatactattttgtatataaataaagtatataaatattttttacatataaaggtaggataaccaatcataaccagtaaacatttttgagccagctggatctgaattcaaatcctgctgctgctgctaagtcacttcagtcgtgtccgactctgtgcgaccccatagacggcagcccaccaggctctgccatccctgagattctccaggcaagaacacggagtgggttgccatttccttctcc

SEQ ID NO: 26276 - DNA, 2708 bp, Bovine  19866880696378
  misc_feature (1)..(1): n is a, c, g, or t
ncattgaatctttccattctttctttaggcctcattagtacagataatcgagggctggcagaacttcagagaagtatctcttgaaggagatcaaacacttctcaaaatccaactccctctgaaatggcaagttttttcattctcatgggaaagtcattgcctagagaagcaaatggacagaggtgctgagagagagagcattcctctggtctcatccaccctctgatgagacagatgcaataaagcctgactaggctggtgattggtcctggcctaaacctgtgcataatgtgtgcgcatatgcttgcactcttgtgtaatatttgaatctacctcgaggctggatgccaggacagagacatggaggtcaatgtctgtgagctgcagctttctccttcagagcgagagctgtctccaagtcagggtccctgactctcccctcttgagttcaggggctgctcttccaactgaccacccagtggtgtggaactaatgatattaactcttcggcatcagcacttgcgagttttctccactaattggtaatgcaaaacccattagtgattagtgtagggacacctcggagtctagatgtcagaaggttaatgaaaaattgagtacagtaatggcccagtaccctcccgggattaatccagaggatatgaaaacccacgatgctcaagttccttatataaaatgttataatatttgcttataacctatacatactcgagtatacattaaatcatctctagattatttgtaacatctaatgcaatgtaaatgctatgtgaattgttgcctgcaggaggcaaattcaagttttgctttttggaactttctgaaattcttttttcagaatttttttgatctgaggttggttgagtttgctgatacgaaatatgtagatgtaaaggaatgactgcactgtattttgctggggggattaaagtttttcaggtgggtggtatctttttctcctttttgccagcaactaagattgaacattaagctattggcctccaggagctggccgtaagtctgattgggttatctggaagatcagaaaatttttgtcaccaaatacaaacaaacaccatctagaactatccttcactgtttagaaatggagatggctcccatgggtcacataaaaagtaaatttaattgcccaataattgcaagagttttgtctgcaaatatatttgttaattaaatttttttttccatatttaggatcctggaaatgaataagagggaaatttattggagaactttatttggactggaggacccatttgtgcaagtgcattccttattaataggtctttgttcttgctgtaaccctcagccaggtattttgagaggcattctcattttcttctaagtcatatcagcatagtaatcacttggctgaaaaccagctgccatttgcatgtttaataaaaatataacaccaataccatattcaaaactatttttccttttagactaagacttcaagataacctagttccctatatctaccataaatgctgtttaccgtgggtttgtctttaaaatagggagataatcctaaaacagtttgattactctttccttaccctatcagtcacaaaccatctctcttaattatagtgtaaggatatttacataaccagggggagggtcctataaccacatttctattatgcttggcacttgtgtgaaaggatattatattcatgtgcattagagattgcttataaaagatcaagacaataatagccgatcagacgataaaggtctcttttctcctcccagacaggctgtctctggcagaagaatacacttcatcaaaagtgtctgcaggttgtcaaactcagggaggtttggggaccctctgaggctgtcatggtcaacaagaagattttctgtcgggctttgccatcactcaccccgaggaaataatcactcactacattctgcatgttctcatgatagagctctccatttgagagaaaagagccattttatcaaaggacaatatagcccttctctgggtccacgtagcttccattatcagaccataataaatcatatttatgttctcagttaataagactgattacaacgcaggtttcagatgtgggaaaagcaaagcaggttgaaaagatgttttaatgaaaatatgataagaaaacagcttcttgtgaacattcagtgctattatttgtaatgattacagacaatttttgatgcatctttagcaatggtttaagctgcataaattggctcactggtagataagtaaaaataataaggaaaaaaaatcgtgaaatcatcttatgttgtctagaatcattatgtacataacaagtataaaatgagtctaatgtatatgctggggatggagggaaaacagattgctcaggaaaagcatggtttgggtattattcaaaatgatttagaaattttttcctcatcttacttattaaaggtgtatgtgctctgaaatttgggggtgccagatattaatttcatcttgttaatgaatcaactctacctcttttattcagtctcaacgttgttttcccctttcttcctttttttcccctccatggagctcagtacagagacatgtatttcctacccagtgtttgggcacaattgccattagtgctaagtgcctattgggaggaaaacagaccccaaagtttaatattgaa

SEQ ID NO: 26277 - DNA, 654 bp, Bovine  19866880722422
  misc_feature (1)..(1): n is a, c, g, or t
naaaccttgcctttgcccaacagccatgatggcaggaggtggtccaggctgctctggggaggtggaaggtgctaaacctccctccagttgctacttggagcgggcttggtccacatccaacctggggacccagcaaagtctagttgtcccagcgtctctgccccctcccacactctctccctctacatacccagggcctttctgcaaagggtatggaggtatccagggctagtgagtctagccctctcagagtgggcagagctggaaatctgcagtgcatacaagtcctgaagccaaaggactaaaacctcttctttgtgggagtctggcaccctggggaagggagggggcaccttggcaagtgtgccaagaatttacttggtaggtggtacctgctctgaactctccagagatctgagaatccggttatatcccctattacagcttctccccatgccactgtgcagttcaccccttctccccacccccaacatttcctttgtgtatcagggaggttttccagcgcctccctggctgacagatcagccatgtgagtcagcctgtgcctcccatttagtcacttaggcctctggagtaccgggtggcccaggcctaatgccaaacccactactactaatagcaatacgattataa

SEQ ID NO: 26278 - DNA, 1383 bp, Bovine  19866880723087
  misc_feature (1)..(1): n is a, c, g, or t
ntacagacttattaagattcaatacatagggtcttccttggcagtctagtggttaagacgttccctttcgatgtagggagtatgggtttaatccctgattggggatctaagataccacatgccttgtggccaaaaaaacaaaacataaagcggaaacaatattgtaacaaattcagtaaagaccttaaaaatggttcgcatcaaaaaataataataataatctgaaaaaaaagaaaactcaataaaattatttttaaaaaagattcaatgtttgttcattgaatgaataaagaaatgaatgagtcagtgaatgaatgaaggctgacctttattaagtataagggtcaggcactctaaagacttggtgtatgttcttttatctaaccttcttgatatccatgattattgtccattttagagatgattaaactgaggctaggaaggtaagacatttacccaaggtcacacagcttgtaagtgacacagcaaacattccccaggcttttctgcctcagaaaagtgcttagctacgctgctacatggcctctaagtaaatggattcctcagaattaaagcatttctctggaaatctcagcctccctatatgaagacagatggtctctgatgttccacccctatgaaaaaagcacaaaacattgggagttgagggtgattagttcaaaatgtacaaaaatctaaaaatatattggcttcactcagatatttgtccaataggggtggaacaactttaattagtgtaacaggacaataggaattaaattggcttggtcagaagatttttacaggatgacactgatggtattactatccaacttcaaagatttggaaagatgttcctgctaacactggagaatagaaacctgtttttcatcaactaggctggcctgacaaattaagtctgtagagtcattagattaagataagagcttatctcctcagctgacatttattcagaggtttttatactgctcagctagtaattagtgctgttgaatttttaacactgctttgtccactcattcaaaacttctagaggtgtatttgcatctcctgtgtatatttttgggtattaagaatagaagaggaatataagttaattactttaagaggtttgaagaattcttccaaaagttattctgaggtgaaacctgcagcttaatgatttatttctggaagaagggaccagttctcccaaattgatcagtgtggaataaagagttggcttttactatgagatctaccatttattttgaggcatatatattataggtttataatgttctagtggaatcattaaaactaggattgcatgcgatgatggtttcctgctgtttcacaccccaactccctactatagagtcc

SEQ ID NO: 26279 - DNA, 1558 bp, Bovine  19866880764797
  misc_feature (1)..(1): n is a, c, g, or t
ntagaaggcagcctaccccaggtgggaaggtggaactcaagtcgcccacctccccactcgggtggggaaatgtgagggcagtgggcgctgggaagcaagggggactctgaagcacggagtccaaggagaggatggagacaggaactgaaactgggcaaagggtcagcttctgggaccaggcccggtagacaaaggcgagcaagaccactgaggagggacaactctcaagaagcatgtgtggctaaacccacagaaggagaaggagctagcagggggccaagtctccaggaatgcccaaggcaaaatgctggcggtgggctagctagttcagtgcatggtggtgggcatgcatgctcaatgtccaactcagtgttgcaacctcatggactatagcccaccaggctcctctgtccgtggaattttccaggcaaggacagtggagggggttgccatttcctactccaagggatcttccaaacccagggatcaaatcagtgtctcttgtgtctcctgaactggcagacggattctttaccgctgtgccacctgggaagctagctgagggtgggggagggattaaatacaatctataaaatacaatctttctcacccaatccctggtgagaaggagttagtgttaaccactcaaagcaactgttcagaaaaattgtgtgtggcctgctcactgtgttactctatgtcttctcagtgaagcccgtattagagtctctatcatctaatttcacccttttagttgtaattgaacctgccaagccttcagttacacagaccctgcctatttacctggaacctagacaagggcaatcccttagtattgctaggtaacaataacaaaccaacaaatatttgcacagccttactgttttctaaagtgttgtcataacgtttctcatttgcccttcattactatgctgggaagaaggaaactcagccgtagctaggaagttaaagagccggatctcagacctaagacttcagatgccaagcctggtgtaattcttatctcagcaaatagctattatgtacttctcagataacactgaaatgccctggcagcctgaggaaacacctaggttctactcttgagagaatatattccaggcttaaggcaaagttccgcagaagaaaccagcctctccttgtttccctcggaatcaactgtatgtgctggaccttctgtccattcctccccgactgggacagacagagtagtattgccaagatgccattcttaggacagataacttgtagggcccactccctccccaactgggtagctgctcattgactgtgcttggaatcagagccatagttgcttttgtgtcacaaaaagaacaggggagaaaagtaatcatgtccagtccagacctgaatgacacacagatgaccagcacagcttttaaagcagcagcaaccaggggagcagctggccctggctccctctatgtgcatttcaccttccttcccccactccctcctctttattccatctccaccatcagtgatgctcagcatagagtcactggttaaaaggaaa

SEQ ID NO: 26280 - DNA, 869 bp, Bovine  19866880960079
  misc_feature (1)..(1): n is a, c, g, or t
nggttatataaacagatagaccttggtttaaactccaggctctatcaccaccccagtagctgtgtgatatcttgggcaatgttacttcacctttctgaatctcagtttcctcatctgtaaaatggggataatctcggtaatcacacctatcttgtaaggcatgatttaatggtcaagagttgcagactttggagccagactatctggatccccaccttaactctgccactcactatgtggccttgggaaggtcacttcatctctctgaacctctgtttcctactctgtaaaacacagataatgatggtgcctacctcactgagttgttatgagaagtgtaaagcatttataatccacttgcgtggtagggccctaccaagaaataaacccttatggaaacactgtacacaaagcaagtgcaatttcagtatttgctaaataaataaaagggacatttgagaagattaagaaaatgtgtatgaagacaagtggctagtgtggagtcagtgactaaaatttgtaccgccaaccttgcactcctgccccacctccagcctgccccaggcctgggcacatggtacgtgcagggtatatacttattggtgacagttcaatcaactctaagaaataagtgttactctctggccctcaaggtttatgttctttctttgcaaggggaagctggggctgaacttgagagccttgtgaagggagatgtaattttccttatttactaacatttacttggactggtgtctgggacacccaaaatatgctatgaatcagtcagaggataacaagatctgcagtcctgtacagattactcactaatttgacatttggggatttttgcaaaatgttagggaaca

SEQ ID NO: 26281 - DNA, 1731 bp, Bovine  19866881048017
  misc_feature (1)..(1): n is a, c, g, or t
nacaacttagcacacatgctgtaaatgtttgacttgggctgtgcttttggagaaatttaaattaggaaaccaagctataatttataatagccaaaaaattggatatgtcttagttatgtgatgattgatcctaagtgacacctgactccaggaccatctgcccccttaacggtgtggtctgactgtggccctgaggagaagaaagcttaagaattatgaggtttggtggtcagagttggggtcaacctgcccttttggcccttccagttggagagagatccctgaattcatttccaaatggcctgtcttcccctggccatgtaaaatgacctctccttcccttctactattcagattctatcttttcttcacatatatagcatatatattatatatctagatctacatcttcatctatcctgaatctgaatcttccactagagtggaagctccatgcagtcagggactttgttttgtctactactgtataaccagcacctgtaagagtggtaccttgcatacagtaggcacacataaatataaacaaactgcatataattccatgagaggattaggtcctaatggcccagcatccactctttgaattaacttctgtctcaatgcatcaagaatggcactagctatacaccattcttggaatgagaaaatatttgagaaaacagtcactcaaatcacttgtgtgttgtggttcaaatgaggaaaactggttgagaaaatttaattcatgagtgcatgtgaggataaaaagtctcacttcctctaagttgcctcctcagaccatcctgtttcagagttagttagtgatacgtcagcaaaattaacagatcgttgaatttccacacagttttggtaattctgctcgcatctattatgtatgtcatggggtagaaatggttaaaattgaaagacccctgcttaatgactggtgtgcacttaggagacagatacacagccatcccagtaaggtgactttggggaccctgtagttaatggctctgtaagcagatccggccttttaatggtttcacaaaaggcacatacacaattgaggctgcagttttgagtactgtctggtcctgataaggctggctgggaacaccctgttctatcctttccccaaatcaaatgctctttgagagccggccaagcatttgagaccaaccaagcagtactaagtgcattatcttgtctaagcaaagcatgagaaataaattaagatccatgctgacctcaccagcgtgaaaaaaatctctgcttttacctaatgtctggccagtgccctaaagaggatcttcttccttcccttaaaattgcatttaggttcagtccttttgcaataagtcccattttacaaggacacttgtttcaactttctccagtcatttataaaccaaacaccagaaagtgcaatgggattatcataattaacttgggatccaataggacatttctaggagctgaggatgtactctgctaagcactacaggggaagagtagatacctgaaaagaaaagcagggttctcataacaaggaagcaaggagttggtactgggtgtgcaaccagtagtgcccagcatgaaggacttcatatggacttgtagcatggaaagatttacatactaaataaaagaaacattatttccaggactgagatttcagatgttctctgtggctgcaggaccccaggtttaaggaaaaatattttttaa

SEQ ID NO: 26282 - DNA, 1012 bp, Bovine  19866881050327
  misc_feature (1)..(1): n is a, c, g, or t
ngaaaagttagagcttctgtgcatgagtcccttgacaaaactgtttatttatagtagagatataaaaagatttgaaaaattaatcataagcatacaaaaagagacttaaaaaaaattaaggccatgtcattttcagcagaaaaaaagggcaggacaagtaaagaaatatagttgcaattcaccatagctcatcactggacaatgtttacatgtacataataaactaaaattgttttatttaaataaatatgtggaaagggagagaagaagatatctaagagttaaggttttatctactatggcaaaaatacaataaaatattcctaaaatttatcagtcaagaaataagcatattatttacattaaatgaagtaataacacttagaacagtgactattacatggtaagcagtatcggctattattagaaatacaaagttaaatatcaggagaaagagccagaaatgagagtgcttgtctcttgggcatacgattcagagagaaggaaaactattttggttcattacaagctttttagtactacatgacttttaaaataatatacatgtattggttttataaaaataaaaattaaattaataataaaacagctatattgtagaataaaatataaacataaaaacgttatggcattgtaaatacggaagtaaaaagtaatttataagtaaggtgaatgtaaattttaagaaacaaagtatgtattgtaaaaaagacatattaagctttttcatataccattgagttaaaaactaaacaaatttttaaaaatcatacatacttaaaaacaaaaagaaacatattccataaacaaacaaaatataaaacaaacaaacaaaaaaacaaaacccagaacaaaacagagaggtctccctaaaaagagatattgaaagctagagaaacaactgagaaaccaagttgttaagtgaaaattaaatatccagtgcgtaaaatggatacaaaccacctacctgagactagaagtcagaatagtg

SEQ ID NO: 26283 - DNA, 1734 bp, Bovine  19866881128530
  misc_feature (1)..(1): n is a, c, g, or t
nagaaggtgaatctaagagacccatattgaaacacacagtaattaaattgccaaaagttaaagacaaagggcttccctgatagctcagttggtaaagaatccgtctacaatgcaagagattctggttcaattcctgggttgggaaaatccactggagaagggataggctacccgctccagtactcttgggcttcccttgtggctcagcttgtaaacaatccacctgcaatgcgggagccctaggtttgatccctgagttggttaagatcccctggagaaaggaaacgttacccactccagtattctggcctggagaattccatggactattcagtccatggggtcacaaagagttgaacacaactgagcaactttcactttcacttgctgaacaaaagacaaagagagaaccttaaaagcagcaagggaaaagcaactcattacaaagaaattcccataagactatgagtgaatatttcagcaaaaccctggtggagcagattgtggaatgataatttttgggtgtggaaagaaaaaaactgccaaccaataatgttttacgtagcaaagtttttcttcaattctgaagaggttttgctaaaaaaaaactgaaggtgtggcagcacttgctgccgctgcgccgtgctgcacgtgccgagggcttctgcagctgctcgcgcggagccagagaagaacggcgagaacgagattgacacttttgctccccgccgccggacacttacgtgggacccttgcccaactcagcctcagagctgtgcgttaaaaaaaaaaaaaaaaaaaagcagccgccgtccccttttgcaatattgcaagatagggggaaagcagaccatggtgaatccggacagcacctcccagccgcccctgctgacggccagctccctttcctggaagctgtgcgcaagctgcgggggcaagattgcagaccgctttctgctctgtgccatggacagctactggcatagccggtgcctcaagtgctcctgctgccaggcgcagctgggcgacatcggcacgtcctgttacaccaagagcagcatgatcctttgcagaaatgactacattaggttatttgggaatagtggtgcttgcagtgcttgtggactgtctattccctgcgagtaaactcgtcatgaggacccaaggcaatgtgtatcatctaaagtgttttacatgctctacctgccggaatcgcctggtcccgggagatcagtttcactacatcaatggcagtttattttgtgaacatgatagacctacagctctcatcaatggccatttgaattcacttcagagcaatccactactgccagaccagaaggtctgctaaaaggtcagagtaatgcagaatgcgtgccttcatctcagatcttgttcatcacaggtggatcccatgtgtcttcagtagacaagtcacctttgtagctagcaccagtgccagctccatgccattgcaccttctttagtcttgattgctcttcccgcatttatgggtgtattaaaatgactgaatatgaacattaaggactccgtgaacttgagctaatgggagactgtagagaaaatgaaaaaagatccactggaggatatctttggtggggggagaggaggggagggagcttgggaagagggaaatgactaatgaagctaattaaaagaagcattcaaatttgctttctaccctcattaacaattagcagggcacggccagag

SEQ ID NO: 26284 - DNA, 1423 bp, Bovine  19866881141593
  misc_feature (1)..(1): n is a, c, g, or t
ntacagtctctgagagaggctggatcagatctgtctagccggctttctccaaattcctgacccaaaggaaacttgaaaaagaaattgttcctttaagttactagattttggtataatttgttatgcagcaatggctaaccagactccttgtctcaatctctcaatctgaccacaggcagaaagggattaagtagctctaacccatcactgtgcaatggctgatggtctggcatgtagattcaaagcccctgggagcaagagccctgtcttcatcactgcagcagttatagcaccaccccatagcactgtgcttggtatatttcatctcacagatattcacaaagtacctactctatgctagggactgtgctagaactaaatgtctaaagtatgctctttgctcataaggaatgtaagaggagacaaacattcaactaataaattgtggtaagtttgatgagggaaaataaccaggtacatttaggaagaattaagagggatatcatttagatgggaggagagtcagggcaggggtctctgagactggaaggatgagaaggcattagcctttcatcagaagaacatgggtaagaacaattcaggcacaggagatggcccttatgaatgcctggaagccccaaagaaattgctatgaataatatactcagtaatgtgtgtttgcctgcctcagcttgctcagtggcataggtgtggtcccggtctgctaacctgtctgaactagtgcccatggcaggccgtcctcctgctgcctggcagaagccccactgtgcaaacatattacaagcttccgctcatgtacctgctagcatcccattggacaaagcagatcaaatgaccaagactaaacactgggatagagaaatacactcctcccatggagctgagaggaaggggtgcacatacttttgcaaacaatcctaaatgtctgtcaaatgccctgtgtttcatattatgactgtggcccgggctccctccttttatctgtgctagcacttttgtagatggtactggcaccaactggactgttcttcctgacaccttcagctgtgatattggctctcatccggtccctccaaatatccacgtccatcaaccatcccatgccaatgccttgtttgcttctccatcctcatcagtctgccccattctgcagcacttaactgcccatgccagctgtatccgcctatgacaaggaaatctgataaaaatgtaggatgctggcaaaaatcatttcaaagagataaattaaagtaaaattgcccaggctgattaaaatgctgatgaagaactgaattggaacagtataataaagctcacttatcttagtagaaatgtcatgaaaattagctagttggtattcagggtctgaatacaaaagaaaaattgttattgatttacatat

SEQ ID NO: 26285 - DNA, 1120 bp, Bovine  19866881277445
  misc_feature (1)..(1): n is a, c, g, or t
ntcttaaaatttatttatttattttaattggaggctaattactttacaatattgtagtggtttttgccatacattgacatgactcagccatgggtgtacatgtgttccccatcctgaacccgcctcccatctccctccccatcccgtcccgctgggtgatcccagtacactggccctgagcaccccgtctcatatatagaacctggactggcaatctatttcacatatagtaatatacatgtttcaatgctgttctctcaaatcatcccaccctcgccttctcccacaaagtccaaaagtctgttctttacatctgtgtctcttttgctgtctcgcatatatgctcatcattatcatctttctgaattccatatatatgtgtaacatttcttttatagaatttaaattgcagtaactttgccatgtctctgaaactctaataaatacactgtattcaaaggccatacattttctcattctgtaaaaactctgcatgtttagtgttaccgaaaactgtgttcacatgctttggtgctattctcactaatttagtaaacaactagatagaagatggtttgttaacctgatattaaaataattatgtatgagcttaaaacagtagttctcagtttcagctatactttcagtccagttaaattagaatccttgggacttgatttgacatcagtgtttttgagagctcccttgattccaaagagcagccaaaattaagaaccaattgagaagtatctagtttcagttcagtcagtcagtcgtgtccgactctttgcaaccccatgaatcgcagcacgccaggcctccctgtccatcaccaactcccggagttcactcagactcacgtccattgagtcagtgatgccatccagccatctcatcctctgtcgtccccttctcctcctgcccccaatccctcccaagcgtcagagtcttttccagtgagtcaactcttcacatgaggtggccaaaggactggagtttcagctttagcatcattccttccaaagaaatcccagggctgatctccttcagaatggactggttggatctccttgcagtccaagggactctcaagagtcttctccaacaccacagttcaaaa

SEQ ID NO: 26286 - DNA, 1000 bp, Bovine  19866881292293
  misc_feature (1)..(1): n is a, c, g, or t
ntaagagcagtaataggagttatcataaatgaaaagaaaaaaaaaatcattaaaatctgagtaaactcttgggttatcatatttaagaaattcacatttacattgctaccacagtgagatatttcagagacaaataagaaagtaaaagtttccagaaaaaaatgcttaaatataaattaaaattatgatcccaaaagaagttaaataggttccttctaagcacctcacataattcctccacaagtttcacacagtgcactgaaaatttcaaaaataagttgaaccagtaacagaaacatttcagaagttggcaaaagtgttcattttaataaacaaaatatgctgttggaacaatacttggacttgtggtagactctggtgcagcatcagaagagtttttaagtaagaatttaaaaacctttaaattagttaaaaccaaaatgagtcagctgaaaacaaaaccccttagaaaatgttaactaatctcagaatttcattttctgactgtgaaagtgattcgtatctttgccacctgtttacccacttggtcaaaagtttaaagccaaatcccatgttgatttcattcagttcaaaaaaaaactggtgtattttaaataaacatttcatttagggtatcaaaaagtcctaataaaatcttaacaagaaatgcaggcaattccactataatgcaatgtacacttctgaaaaaatcctaggttctggaaaatcatatactaaaaataacagggcttacagaaaaaagattcggtctaaccacttaaaatctgtgtaactttataatgagagcacaaaataaaacacaaaaacaactgttactaaacattgaaataaaattatgtgagctacagtaattctttctactgacatcctttccaacaatgttggtgacattatttgccaaccacaaaaacatgctgtaggatagactatatattggaggaactatggctagagcaaaaaacaagaggaaaaacgtcta

SEQ ID NO: 26287 - DNA, 1035 bp, Bovine  19866881308405
  misc_feature (1)..(1): n is a, c, g, or t
nttttgggtttttggcaaatgcaagaaaatgtcaaaaatttagtcaaatttttcttctcacccaccttcttccttatactttatgaatgaggcatggggaacttctactttataggctttgagggctttaaaaatttattagtgatgatgtgtttattaacttatttataaaaatttgaacttcatactctaaattcaatttgtcagatatgagaatatcatattatgatttatttcttccctgatagcagtgtgagtttcagaaaccaatacagagcttcttctttctaatcctaacagggaaggcaaaaaggagcagatatctctatcaaaatgtcttaaaactagtttttgtccatacctgacacatacctatgagactttaaagcaccaggaaaaatgaggaactcctaaagagattcaatacaggaaaaaaaaaaaaaaagattatcttttgggtaatgagactcaggaatgcatttgacttctatcagcaacattgggtgctggaaactaatggaatgatgctttcaaagttctgatggaaaataactttgaccatagaattctatccgcagccaaaccctggtgaagtagcaaaaggaaaaacatagcgaacatgaaataaattatagtttatatttctgaaaaaaaaatcattgagagtgaactccagaaaaaaggaaaacatcatgaaggaggaaggcatgagatccaggaaacaatagctctaacctagagaggacagagagggaagtcccttggtgacagctgggcagtcactcaagaccaagctgcctggatgggagcagaaattcagagacagctgggtggatgtctcaggaaagaaagagattggtccacaggtaaaaatatttatataatcgtgatcatataagccctgtttataggttgtaggttattaattgttagagtcaatccctagacaaactcacagaaggcttaattataattacagaaaagaacataaatgttgtcaattttgacaatgtaaatatatcagtagagttgaca

SEQ ID NO: 26288 - DNA, 1060 bp, Bovine  19866881317079
  misc_feature (1)..(1): n is a, c, g, or t
nttctttacttcctagtagtcgtctgctgtgtgaacttatgttgtgtggttaatagtttagatgttcatctaccaatgagtttttaaaaaccctccatggcattaaaatcacttggcattatatagtactgggcataaatttattaatttcttttgtgattttataaagtaggttgtaagtatcatcttttaatttctaaagaaattaaagctctaaagttcagagtattccttaatacctttggatatttcttaacttaatggtaagttcattagaatacattcagtctatcacttgatctgttgaaactgttgtacacaataccaggcatatatctcctctttccttccctgagccttctgccacacctcacaatcttgactaactttgtgaggtatcactttaatattttctttttccttgaaagccacagttcattaagtcgaaagcatttatattcttatgtcacattagcatgtctttagcttaccagatagtattttgtttttagttgattgcaaatgttgatttctgtttttttcagtttgcaaaactatatgacaggaaatcagtagctaaatatcactttatgatttccatctgttcaagtacaatagtgtttatagcacagtccagattgcagtgtgatagaaatgtcctattatagcagatagaatttaaaatgatcattatatattctaatgagaaaacatttttaaacaagtacttcacttaatttcaaagcagagtaactgaatgctacaatttgatgacagcatctgctattcagtgtgtgtgtgctgtcaacaataaaaacttttttctgacttccttagaaattaatcagtttgctcacatggatactaataatggaagctgagcagtcagggagacaaagttcttttgaatatcttaaaaattttttttctattattatggagagtatcatacattattttgtgtggcttaactctgggggtgggactgttgttttgatatttttattataatttttgctaaattttattctgaaaatatgttcacatttattaaatagaa

SEQ ID NO: 26289 - DNA, 1737 bp, Bovine  19866881353704
  misc_feature (1)..(1): n is a, c, g, or t
natagctccttactgccctcttctggctgtggcttttgtttgtcattgagcgtgttttagtttttaatccttagaattttagcaatattttggatagattagtggttctcaagattagttgcacattagaatcactttggaaagtttttagaaaaaagtaccagttcctgggcttcacttgtgaagattttggtttaattgattttgagggtgtgtttggcagggctgggtgttggtgtttctggattttgtttctaattcttgaaatcagtcatttttggcaccagggactcattttgtggaagacagtttttccacagactgagatggggtttagggatggtgtggatggtttctagatgattcaagtgcatacatttattttactaccactgatgtgacaggaggcggagctcaggtggtaatgtgagcaataggcagtggctgtaaatacagatgaaacacctcctgctgtgcagcccagttcctaagaagccacggacttgtaccaatctgtgacctggaagttgtgaacccttgcttccgatgattaaaatctctggctagtcattaaaatctaaccactggaatagatgccccttggaatcctgtataacttgaactacttagatatagtccttatgtttttaggtatcatagtggtttaaagaatttaaattgaggaatgtaggacttcagaagaggcatggtttagataaggatatgatgtggataagactttataaaatataagatctgtataatatctcctaatactagaagaagttttggagtgtactctattctatcattttcctgctttaagattcatatctcaattttcacttccttttttctgtctcaggggttcagcctgaggcttctgtctagatttggccattggaagattcatactaataagtgtggggggaacccttgtacttcttagttgggttagaaacctaatgggaaatatgtatttatcacgacttcttaaatgaaacttgttgttaaataccagttgtaattagcatcttattaataatgtcttctccagtaattacattgttaagaatacttttggtatctcttctgtttcacatttcagcccatggtataaatttctgttatctgttaaatctctattactaaacttaaatgtgggttatttttaaaaataatagaatgtatttaattttttagggatttaggattagcactctagtgtaaaagggagttatttgaataagaacctcttttttttccagaggaagattatagtaaaatttattggtttatttgttaaagcatacactgagaatttatctaattgattcttttgatttttttttttttttaaaccattagggttcttgaaaatccaatactagagctaacattttactgttagctaacacttgtgacatttgctaagtttgttaatatgattatagttcttaatttaatcctcaaataagttttaggatcttcaggttttttttaagtggcatattaactagctcttcaatatgtgaccattttactgtgtttcttttgctgtgggattcatttattcagatgtaacctttgcatgatacccaaagcaaatatatgcatttggtagcagagtttgtgaagtcctggcaaaacagtggatttgaatggttttggcttaggtcatctacagcttacctgtttcttttgtctttgaaacatatgtggtttctctgactggtt

SEQ ID NO: 26290 - DNA, 1433 bp, Bovine  19866881509915
  misc_feature (1)..(1): n is a, c, g, or t
ncctataggagctctctagggagtgaggataaagaaatgaatggggtatagccctttctttttgaaggtgacagtctagttagagaggactgaaaaggcagacgatagtacaggtgccatgctgcgtaatgaacagtttaccttagatacctaaggaggtaattaggaaggatgttgttggggtcttggataaggaatagaaatttaaactcccattctaatacagtcgtgaatttattttgcttttcatgtttatatgtcattttcctctccattacatgtactggcatgaaaattttagtcactcagttgtgtctgactctttgtgaccccctggactatagcctgccaggatcctctgtcaatgaaattctccaggcaagaatactggagtgggtagccattcccttctccaagggatctacccaacccagggatcaaacctgtgtctcctacattgcaggcagattctttaccatctgagccactagagaagcccaggtggcatagtaggccctcaaattattgatgcaggaaagctttgaacaggactatggctggaatgcaatgaagtagccacacttgattcttgcataaaaatctcaatacatcaaacactcggttgttcatgacccataccagactccttatcagtgtaacatgtttcctttcttttttgtaagggaagaaattatgtagtagggaagtttagtgactcatgtaaggtcacacaacattcagtgtcaaaactccaagcagggtctgctcagcaggctcctaatccctggggattcacctttgtaacagccaacgtctgaatgcacgtgtcttttcaaggaacagtggaagataaagcctgagcaagaacagatgtgtttcatcactgctggtgatagaagggtccacaaaagtgcatccagcattgagatcttgcaattattaggatctcgcaattcagccaatttcttacctggatgttaatggctgcaattagttatccaccttggcctgacactgggaaaagtcggccaggtgctctcctgccctacagaaaccactttgctaacaaagagaaaaggccgtttcttgccactgaattcatagaggggaagcaattctttctaataggcctggaatctgaactttcataaaaggcaccttagctccctgactttctcatatgtcttcatctgctccatcgactctcatcgatgaaatataccagtaggtgctgcaaagtgctttttaataccttagtaaacagttgagagaagaacctcattacagataaagtgagaagtaaagttggacagcccatttatcttactcagtgtgaaataagggctattgttcaattaggttaaaataaaatctctcacgtttccttccaaatgtcttgtttggggacagagatatggggtggtgggggtggg

SEQ ID NO: 26291 - DNA, 898 bp, Bovine  19866881759208
  misc_feature (1)..(1): n is a, c, g, or t
natttaaatctctgggcaaatgtgacttgcaatttattatatgtgaaaagcataagtggcagcagcattgtgattttttttttcaggatacagaaaaattgataaggtctgagttgagttatctcctgccagcgtcccctcctgctacggtcccatcctctgcggacctggagggccttcctcatcttccactatcaacggggtcatgtgtgatgacacaagctagatagaaagattacgaaaggagcgtgatggggtgatggaccctctacaccgcaagaataacgtttggaacaacggacgattattatcccagaggtagtattgcatctggtatccctctgttcttgttcagagaagggaaggtcacagaaatggggatggggaagcagatccaggggagtgtctgggaggccaaggcccatgtcctcttgccctgtcctggaggcttccctggctctacaccctgggcaggtcctccttcccaagaaaggtgttgcagctcatatcattaagaggcttggctgtcttcaggcaatcgctcaggggttttttgccttattaccaatctgcctttcttagaaaaggtcatgaaatggacaggggatgcctcatcttcgttataatccactgtttgaaacatttcaattaagcttcagatcaggccccagaactgaggctgttttaaggaggggaagtaatgaccttctgttgcaggtgttttctggcacaccatcagctttgattcttcttgatctttctgcaccctttgatagccgggatcaagggttctctttatatgcttcaagcacactggaggactttcagggactccactgacatggttttcatcccctgcagtcttagctgagcggttgtcaccgacaagttctccacg

SEQ ID NO: 26292 - DNA, 849 bp, Bovine  19866881828410
  misc_feature (1)..(1): n is a, c, g, or t
nacgaactgtcttctggcaggcactgtaaggattacacttaatataacagactcctcatatttatcagagtgtgtatacaaacaacatctctgaagcactgttatactgctccggccaaacagatctgagctttccataataattttcagattttataagacaatactaacaaagactgtgattggccccatagttgttgcccaatatagatttactgaaagaatgacatttaaactcttgtttcataattctgtagtttaataatttacttacttttgtcacttcctctgcccaaatctagccagcattaaaaattgagaaaaatatagagcatgaaagaaagttggaatttaacattttctacagcttagtatagaaaaatgtaaatattttaattcacgtggcatactttttccagagtcacattaacagattaaacagtaatagttaaatcaataaagcttaatatactgtgaaagtatgccttctatgtttaatagtattgatgtttgagtcttatactaattctaaattaataacaggtttccaaaactgggaatatttaacacctctcggttctagtattctcatcagtaaaatgagacatttagagtatatgatttctaatttctcacttaggttcaaaattctgcaattttaggaagttaaaataaagcaaggataaatggacacaaaatgttgatagagccatgaggggaggcaaaataaacttgagatatgatgaacttaaagttaccagagttaaacatatcttataagtagatgacacaagtagtaaaacaaatgcctaataaatgaaacaaagtcttgataactgttcagcagga

SEQ ID NO: 26293 - DNA, 2468 bp, Bovine  19866881849940
  misc_feature (1)..(1): n is a, c, g, or t
ntctagttcccttcttcgcttagtcgtgtccactctttgcaaccccatggaccgcagcacaccaggcttccctgtccatcaccaactcccggagcttgctcagactcatgaccatcaagtcggtgatgccatccaaccatcttatcctctctcgtccccttctcctccctccttcaacctttcccagcatcagggtcttttccaatgagtcagttcttcacatcaggtgactaaagtagtggagcttcagcttcagcatcagtccttcccatgaacattcagggctgattcctttagctaagattgactggtttgatctccttgaagtctaaggactctcaagagtcttctccaacaccacagttgaaaagcatgaattccacaatttctacagaagtctgtgcctttaatctaaaaaccaagtgaatttatagaaccatcatataatcttaattttaatgtacacatattagaatttaaagttttaaaaatacaaggattgacttgcctttcgtatttcttcagggtatgccaagacctggctgaggctgattgaaagagaacatggttgaaggcatcatacactaataaaataggaatgatctttgaatagggaaattgtgggcagacagaaggactttcataggtgaaaatttgataaaactttaggtgattgtggcagtttttaaagtaatgcatcttccccaaataattccaatttaaaatcaagcatcagccatgttttttttatctttgaagacttgaatcttttgaaaaaaattgaataagtatcactaatatgaaagtatgtgttctaattgccaaatccagctataccaaattcagattttagagtctgaatttatacataaatatatagtgccttttattacacaataaaagatgttaattttatgttaattgacatagatattaaaagatattaattgacaaaaaaaacaaaatttacttagttggattttttttttaagtagaagaccatcttatcagctcttaatacttgtttgtatgttgtgcagaagtaacttgtttcactttgttcactggtgtaatgtgttctttgtctcttacctatgcacttaagcaactaaactcagcacgccttgaaggagataacattatggtaaatttctcttacatgctcaacctcctgcatgtaaaatggctgaaggtttgttggcctactgtgttttctacatcttgaataaagtgccttctcttgctattatctacatgtaaaagtctaaagtagttgaagctgtgcattcattagtctaacaaaaaatacagagaatgctagctgaagtaatactggaacttgaagaacagaaattatgtgttctagttgacaaattcagctacaccaaattcagattctagagtctgaatttatacataaatatatattgccttttatatacaataaaagatgttaattttttatgttgactgacatagatattccaaagatattaattgacaaagaaaattaacaaaatttacttgacttagagaaaagtataaggtatacaaatttactttgcttcacagtaccttcagtgtttactttaattttcacccaaactcaacacagaattaatttcttctttgtaattccaggccaaaacaaaccctagtagtttatgtatttctgtagtgttgaggactgtgcaagcaagctcagtcacttcagttgtgtctaactctctgtgacaccatggactgtagcctgctgtccatgggattctccaggcaagagcactggagtggtgggttgccatttcctcctccaggggatctttctgacccagggatcaaacacatgtctcctgcagatcctgcattgcaggaagattcttaactgctgagccatgtgttaattcacttaggagagttgctgaatagtgatagctttgaattagtaatgagaattattctatagtatcctgtatattttattgagcttgatttgaggaaatttttgagatgttaagcatatttaattttttagcaagatagaaattagtaaaatctaaacattgtccccaaactcataaatgttagccagtaaagatttataggtacagtgtttgtcataatactcctgactgtattactgccatagaagtagatggaatccactgttaagtagtaaataattggcagtttttatttgttaaatcagttgactacttttatttcatgagcactgtactaaaaggaggggggaaaacgtgtaatagaaaagattattatacagaatatgtaaaatgcatttgttttttaaactactccaattattgaagccctggctaaattagggctttccttagatagcaagagaatgcattcatttatttccattgtcctatttatatgtagataaatgagaagtatgagactgtttcactcattggtactttagtatataagtcattttaaacatt

SEQ ID NO: 26294 - DNA, 1084 bp, Bovine  19866882001363
  misc_feature (1)..(1): n is a, c, g, or t
ntgagtctgaatgaattccgggagttggtgatggacagggaggcctggcgtgctgagattcatggggttgcaaagagtcggacatgactgagcaactgaactgaactgaaccttgtcccattcaagacaattttagcctgacccaggaatcagcagtgggatgtggataggggaaaacaaggatgtgtgatttaaaagtcacccaccaaaccaacaattagtattatcaggctattgaacacatggcgcctaggtcaatgattggaagtctaggaaacggggaggctaggcagttgagaagcttcaagtaagggacagaatggccatctattgagcatatgtgaggagtgaaaatggccaaagctctctattccacaatagtctcatagcttttttagatcacttctgttatgggtgttcaattttttttccttccttttattcctcacctattttataataatattggctcaatccttgaatctcaggtagggccagtatgcccactaattgcaaattgccttcccacaacatatagcagggccttcatggaaaccttagcctagctgatagaatcttccaactggttcacttgtcacagtgatagcttcagaggtgagcatatgaactcagtcagaccaataagtctttcctggtactttatcacagttcttgaaaaatataattatttggggctgccagtgactatcttgcctattcatggatggagactacctgagaattaagctaaccagagacatgtaaagaagacagagatatgataaacattgtctgaagtgctggatccaactattcctgaagctagctgttgtccatggacttcctaggtacttaagcagattaatatcccttttcttaaaaaaggtgtacgttaggcttctgttatctgcaactgaaatattcctgattaatacagtttcttttcttcttgttctttttagttttttgactgatgcagtcagatgggctttggtctttttcttttcaaaaggaggccctgtccttggaagaaatagcaggtacagtaaagaggtcttatgctttatgtcttctttagtcatta

SEQ ID NO: 26295 - DNA, 1514 bp, Bovine  19866880546893
  misc_feature (1)..(1): n is a, c, g, or t
naaatcttttaacaaaaataaatcatgaatgtaatatatgatacatcaaaatttttgagactaaacaacagaatcatttttatgatgtctatacttctgatatttattaacaaaactgaagcaaacacaggaaatttctaaatttttcccattgcatattttatagcatgacatttctatgcctcaaactaatgaagaatttattttttaagtaaaacaatattaatgttaattttcttgaaagttcttttaagaaatgagagtgaatgcataaataacaaataagagaatcattttatcatttttataaaaaggaaaagcagatattttaaataaaatcattttcatgataaaaggaaactattcagagcccagatattatatcaatgtcaactattttgaaaagtgccaaagacagtattagtaatgaaaaaagtaaagtaaattgaagtcactcagttgtgtccaactctttgcgatcccatggactgtagcctgccaggctcctccatccatgggatttccaggcaagaatactggagtgggttgccatttccttctccaagggatcttcccaacccaggattgaacccaggtctcctgcactgcaggcagactcgactgtctgagacactaaggaagctcaattagtaatgaaaatacaattactgtatttagtaatgaaaatttagtaaatttagtaatgaaaatacatatttggacaattttgtccaaatatcacaaaataaatgattaattcttttgtattgtgaaggattcttttctcccttttaagtcagttgcatcaaccaatctcttctattttcagtagaatgttactacagacacagtctaatcaaatatacctgggttaaagtggatcttgatttagtcactttctattgacaaaactttgatgaaattactgatattctctatattctgcacacttagcctaaaaatgtggataaagtattatcatcatggggtggttttgttaattaccaggagtaatccatttataccacccagcaccatgcctggcaataaaaaatgttacacctctaaatcattttacttttaatttatttcactatcacagaagatgatataaatatgtgcaaaacattagaaagacacaactattataagcccttaaaatactaactgatattattaaactcctgctttaactgtctatcactgcatcccttaccttttctccaacaccaccaactgagccaatggatcctggaggtccttgtggtccctgcagtgtaagaaagggaatacagttatccttactcttgtaataagatataaattcataaacatacatccacttgttctcaaagagagaaatatgtgcaagaatatctcaagtcatttgaaagatgagacaaaatgatgaactttatgaagttgtcaaatgtgctggatagcaaataatttaattgtattacattgattttcaaatgcaccagaattcggagataaagcagaggactttccaa

SEQ ID NO: 26296 - DNA, 2483 bp, Bovine  19866880692129
  misc_feature (1)..(1): n is a, c, g, or t
natagtttagtctcttctgaggttttaaggtttgaattatttctttcttaacacaaagttttgaaaagaggttttattagaattgaccaaatctcaaactgaatagttactgcagaggtaatatagtagtaatactatagggagacataaggaaatagtaatatgaagaaatatccatagttaatagcaaaagaaattaaattaataatccccctcaataagaagtaggaaactcacgttttctcctttgtcacccttgctgcctttttgtcctggttcaccaatttcaccctgaatttgaaatatttgagttaaaatttatatctaatatgccatacctgccattgcattatgatcactatcatcttatgactaaattatgtgctagcatttaatgtcactatttaaattggaaaagcctactgatcactctgctgtattgactaatattgctgtctagatcattttctatatgataagcatatagaaaaacaaaagtcaactgaactctgaggaatattacagctgggattttcaattcacaaaatcaatgtcatctgaaataacaccagtataaactgataatggaaatacactgatttatataaaaatataattacacattaatcaaaaatcaatctattttttctcctagttttccaactgctaacgtataatgcattatcagcacactggttaacaaattttgttatataatttcacagtattgctagaaagtatattcaattcaaacacaacacagctatacatttaaaatcaagatcttagaatctccacttacatattagtaaaaaatagagaagtacaggattatcaaagatgtatgcagctcattcttaaattttaaccctacaatatccaagacaccatggttaaatgtatacaactaattactcgaatttcacatttatctgagaaacattaaaaacagataagagtttttggcatctgctaatttttctcactaccattgttcatgtcttgtttagatcccacatactatttcacaggaaaattctaattctaagcccctaaattaaaacttctgagcacaagaaagctatattgaaactttgaaaaatatatctttagattttatatctaatcttaagaaagattatatctaggatttttgagaaaaaatttatttttcatggtatgtactaacataaataaagagtactcaccttgtctccatcttctccaggggagccagcaggccccgcaggcccggggagacccacagggccttgtactccatctctccctgcaggaccttggggacctttttctccctgcattgaaaatccaccaagtcattacttggttgtaagaaacctatgaatttgccactcataatttataagtgaagctacaagagtcataccccggcttccatatttaacaaggaaattgttttgattttcacccaaaatgcattttctcagtagcaaataataacatgaaatatcccacattatttcgtgactaagaacactaccattgctaaccatttatgaatctcataaaaaataatcaacaatcaacaaaaataatcaatagaattttcctttgaaccacacattttcaaatcaagcattatatattaaaaatcagatgcttaatgtttttgaaaactgaccctttatgttactgaccctttatgttgttctgtattgctattgaaatagctgggcagtggctggtaggcctcaaaaaccatacaatgcatttgctcatatgcccaactttataatatgctttatatgtagatgtttttcatttttaacaaatgtttcatgaatttttctagattttggtatttcaattttcttgcttttgattcagaatgaaaaggttgttagcttcttaaaattttttctttatcttttgacggtggcattattttcctcttttaaaatttaagtatattgtataattgaaaaagtagagccttggtaatgaagatggcaaaaattcctttcctaaaagtgaagacctcatcagttctgcacagagttattttttgattgtatttggtagttctatctttcctcctgttatacaatctgggaatccatgtcgttagttcctgcctttacattatcctgaccccactatctacccgcttccctatcccttaccacctcctttccaagttttatctcttgaatatatttacttcactttatctccaccattaatatcttatcccaaaatactagtagccttcctctgaactgttgaaatacctccttcctatctcacatctattcttacttccaaactatttcctatgttgtaactggagacacagatcatcttaacaacattctttagtcaatttacttgtttaccattcctaagataaagagcaagctgctagtgcagtctccccattacctggtttctactccctttgccattgctctgtatttcaactcctttagatcttttttaaa

SEQ ID NO: 26297 - DNA, 1240 bp, Bovine  19866880753890
  misc_feature (1)..(1): n is a, c, g, or t
ntttggtgcactgaatccagtgaacatggcaatcagaattcaagcagatgttcacagtttctgtgattgcctggagcccaagggtggaagaaggagaatcattttgctgatttacttttgttagtatctgtcgaggcacagactgcattccaaatacaactgttaaaataagcagactctgctaaagagttgtgaagaacagatatgaatactaattatgacttcattttttgacacatttgaacttacatacatagttactttaatcagaatttgccaatgggaaagttgcagaagcacatttatcttcctctagccttatttttttttgtatcttaatttttaaatgtgattaatttattataattagcttcaagaatacagaaaactatgggataaagcaaacagaagtgtgtctatcaccctcactgcctactttgtcatatcttatattgtgctatgtttactagaacttttaaaacatatatatatatatatatatatatatgtatatatattatttatttatttatttactttaggctgtgctgggtcttcattgttatgtacaacacaggctttctctagttgcagtgaataagggctactctgtaattgtggtgggggaccttctcactgcagggacttctcgttgcagagcacaggctttagggtgcactgtcttcaagagcttcagcttgccagcttagttgtcccatggcatgtggaatcttcctgttctagggatcgaactcttgtctcctgaattggcaggcagattcttaaccactgaaccaccagggaagtcctaaaaattctttttttttttttttaaattttttaagaactggagcattacagattccttttgcttccaaataaatgggagtaattacagtctgatcaattccatacatcctttacatttttgttatgaagtttgttatcaattttgaagtaaaaatttcctgcatatgtttttaaaaaacacaaaataactacaattatataaacagtgtaaaagaaatctcgagtagaatagctcagagtttgtaaagtgacttcttaaaattgccatctatttacatcagttcaattcagtcacttggttgtgcctgagtctttgtgaccccatgggccacagcatgccaggcctcctatggtggtgtccatcaccaactcccagagcttactcaaactcatgtccgttgagtcggtgatgtcatccaaccatctcatc

SEQ ID NO: 26298 - DNA, 1216 bp, Bovine  19866881049617
  misc_feature (1)..(1): n is a, c, g, or t
ncagaggtttgtgatctaggtccattagataaactgttggaatgggaacttcagtctctgagcgtttgatgtagaccaaaaaaatacaggtgtcggtttcttccagcaaattaaagctgccttctttttttaaaattttcaaccaacagataatccatttttggactttcttaggcaacgtagagcaaacccgacgttgtgattacaagttccccttataatgctcctcaaacataaactgctattctatgtgaatgtctttcataagacagacctaagtgaatcttgttggtgtgttgtgctgtgtgatgaccttactgaggacactctggaggtcacctgatggtgaacatagatataccaaagtactctaccccttggcctttcagatttagtataaagaaaatttaagagaaatttcagactgaagtcaacaaaagctatgcattttcttagcagggagaattagccaggatggcattatcataatgacactatttagctttgtttcagttccacttaaccaactcttataagaaaattcgccttattatactatttaacaaatatatcctaaggaaatcatgaaaatagatgattgctttttgcatttatataacaaaatgatttaaacttgaaatgcagcagaataaaattttttaataagatttgcagacattaataagtgaatgctttcaaaatctactgaattaagcttattcttcaaaaattactgagtttaagtagatgcttaaatggagccatatacaaaagtacagcttataatgatgtatgagaaaaatgaagtagatagaaagtgtaccctgtttagcaattattcttcattacgagggtcatgttcaaattaaaacctccatttgtctcttgttccccagtcagttttctctttccttcctccttctgtccctcatgcttttcctttctaattttttccatctctccccttttctgttcttttgggaacattattgaaaagaatctaggtccccagcagggcacttcactagaaaatgtagacaaactttctgcaattcagagatttagagtttctattaatgcactgtgacacttgaagcacattcagctgtccttaaaaatcaaagaaaacactattttttaaagacatgaacgctattctttactgtccaataatgtttaataagacttgacaagtactcttagaatttagcctatg

SEQ ID NO: 26299 - DNA, 1374 bp, Bovine  19866881110341
  misc_feature (1)..(1): n is a, c, g, or t
ncttgttatcagtagttatcttgacccttatcatattattaaaaccagcttttcctctttttgttttcctcggataataatatgattctctaatttgcgcatactctatgtatgtttgttatttctcattatttagggacctcctggcttacccggtctcaaaggtgaccctggctccaagggtgaaaaggtgagagtaaaataatgtattattacactgttgctatcctaattgcagaggctacgattatgcacattaaaatcactcaaaaggaaatttcaaggaattgctttgtcattctaaccaaggaaaatgctgtcaatccttagcttccaagaggaattcagaaaagagaaaagaatgatgaaaaatgtaccagaactcagtgctatattagtcaatgttcctttgtaggaaccatatggagaaagcatatggttatactaaaataactattcagaaaataaacagaataacaaagtgcccattttttcatgtttttaaacatgaaaataaaaattttaaactagactgtccttcagatggtaattttaaagatatatgtgctctgttgcatcaaataaagaaaataaaacatttttagagtgacattaatatttttgaattatttttgtttgtaaatatttcttgggtactgaaaaatctctgaagagtagaactcattttattttttttaaattttttaagcaccaaaaacattgtcttggattatagccaattagcaatgttgttctagtttcaggtgaacagaaaggacttggccatacatatacattatccagtgcttattaaaccaaagaattttctgttgtttatttcaccaatattaaatttggtcattattggccttttagttaaaggaattcgctttaagtaaacacagcactgaaggtgatgctttcagaaagcattttgttcaataatatatattcctaatccttaatgaaagtctcatataatacaatcagtaaaggatcctattaggtgaggaggaaaaggttcttaatcctatattttattcagaaagggttaaatttttaatgtattttttattcttatatttcatgtatttaacgcagttattttatgactataacttaatacatggttgcaatttatacatcattaaaatttctttgcctttcaaagggacatcctggtttaattggcctaattggtcctccaggagaacaaggtgaaaagggtgacagaggactccctggaactcaaggatctccaggagcaaagggagatggagtgagtaaagatatcactgattttcctactcctttccaatcctacagtcaatacacccacactcctgcacacattcctttaaacagaccaacaaa

SEQ ID NO: 26300 - DNA, 950 bp, Bovine  19866881383907
  misc_feature (1)..(1): n is a, c, g, or t
nctgatacattgcacagttgtgaaatcttggatatttactttctagcagctatgtatctggcccctctcacacacattctccatattaattcccacttttctaagaggtaggggtgagagtgagaaatgttgttgtaaggataaagggcttttaatagcacactattatatattttttaaattctcctcatttttagagaaataaatgtttgcaatgagggtttttttaaaaaaaattattattattttcatcttttggccatgccacgtggcacatggaatcttagttccctgaccagggatcaaacttgtgcccccagcattggcagatgagagtcttattcactggaccgccaggaaagtccttgaggggatttttattatcagagaaagaaaaatatgagggagagattatttagggaatacattttccttaatttattttatgaaatatatcagtggtaaatgcaatctgagagcttgtttgcataatcaatttgtatatactgtatgttaacataaatataaaatgtttactcagtctgtgtttaacatatgagaaaaatgctgtgctgccttcctctcttgctgttcagcctcttgcttcttcctgccttctgtgtgcatcaagacatccatttagtcagtaaaccccttgagaggagaaaacatgccctcctttgacgggcatctattaccagctattgtgtatatcatcatgcatacagagagcattttggtttaggccagactttagaagcccaaaggaacagtatcccattgggataattttgttcatcttgagcgggagcactaaaacctgcttctcaatatgcatacactcctagtagctagaacttcagagaactttgatgatgaaataccaattttttgctaagaggactaaaatactattgaacacttcaagactaagtcaaactcataaacaa

SEQ ID NO: 26301 - DNA, 1766 bp, Bovine  19866881416680
  misc_feature (1)..(1): n is a, c, g, or t
nattagagcttaattccaaaccagaaaagtgatttagactattttcttatctggaaagagaaaaagaaaactttatttctggacaactgccaggcttttatttgtaactacataaacataaacacttgtgatgatgtctttgctactacggttttgaaaataattcccacagatgttgattcttgcttttacagacatttaaaccaaactatgtcttccttatttgcatatgctgtcaacaagctgcactgtggtgtaattcctgccagagctttccctcctgtcaatgaacagtcaggatggggtttcatttcaactgactgtgtaagccaagagcttaactaattacactacagtttaaaataaatctttagtgcactatcttaaagaattagtatagtatgaaaaaaaaatcactttgagaaagatggcttcattgcattctgtaagtccctgaaatctgatctgcactaaagtggccaacaaaccattagacagcaagcaggaatgacattcaaagcaagcatttccacagcctcatcaaaaatgtgctgagatgataacagtgaatatgtattcgaactttaatttagtctcctaagtgaccttgatcatttgattgggctgtatctaagatagtgttttcaaatgcatttataaatgcctaaagcatgagatgggtaaaaaatatccttcaaacagctaccctgaagatttctcggattaggaaagaaaatgcaaaaaaccagtttggctcattaataattcaacatctttctgattttaaaaatgccctccagtcaaaatcttaactttctttctttattatttttccccagaaaattcttatcagcgagagctctaaggcattagtaaaatgtttttggacggttttttatttgtgttaaagttgtgcctttccattatgccctcctgacttgtctggaaaatccagattgcctggcacctgcgtatcgtatgtccttctgtttggggtgtttttctcacttgcttccacgttgctgtttttctgatatacattaagcggctctgataaaaaccaatatgcatataacttgtagagaaactgtgtagtttcaaaataaatttgttctatgctaaaactgtcatgtaaaacatttaaaataaaatttatttccttaaattgtaagataattggatggcatcactgactcagtggacaatgagtttcagcaaactctgggagatattgaaggacagggaagcctggtgtgctgcagttcatggcgtcacaaagaatcagacacaacttagcaactgagcaacaacaaatttaagaatagcccctatattaaaaccatctcacaataccacagattttgttatattaaaaatcatgagtatatctctttcatttatactctctctgaacgtgttatccttgttttaatacacatataattattttcatataatataatatattcaaatatttgaatagccaggtgtttgtgtagattgccacactcccttacaaacaatagggggaaagttcttttattcagcaattattttttgagcacttactatgtgcttgtaatggtgctatgcattaaatattttttaatgactagaaaacagtctgcctatccagtggtatttcatggacaaataagcaacaatgatacgagtaagtgttattaaatagacaaatatagggtgctatgtgaccacagatggaaatttaactcagtcttgaggagtagtacagacttcccagaaga

SEQ ID NO: 26302 - DNA, 1573 bp, Bovine  19866881531687
  misc_feature (1)..(1): n is a, c, g, or t
nttagaatggctccattacctcctagaatacaaggaaatattctagaaagccagtgaatagggcaaaactggatggcaagcctaaaatactcttatcacatgataatgagtcacaagtacatgaaattcacatttgtcaggaggtaggatatttttgtctcccattgattatctgtgaaacattaataaatatatgtttgggtattattacacccaaaccaggatgtatccttatattataaacctgtcaaacattaacgaatcaaacagggatagatagatgacaaaccatatagatagatagtagatagatatagataatctcacgtgcatgtaactacctttatattaataagcaaaatttatatatgaaatcatttaaccatttaatgtaactagtcaatcaatcaaaagaatccttagtgaagttctataatgagctcaaggaaaactaatgcaaggtaaacatgtattttaaaaacacttttttgcttaaaatatgtatatttcacatagtcaaaaatagaatctcagtgcattgagtgcatgagttgagtagtagtcctctcaaagacatatcaaatatccaaatattctggaatttttgaatattactttatttggaaaaaaggggtcttcgtagatgtaatttagttccagatcttgaaattagatcatcctgaattatccaggtggtctttatatctaatgacaagtgtctttataagaagaagagaagataagaacacagaaaaaaaggccatgtgaagaaggggttggagattgcacacaagccaaaaaatgccgagggccacaggaagatggaagaggacaggacagattctcccacggggcttttggagggagtatgggctggctgacacctcagttttagacttctggccttcagaagtgtaagaaagtcaatttccattgtttaaataaccaagtttgtggtaatttgttacagtagccctaggaaactgattctgtggaaatgagggaaaatgaagaggatcaaagaagagccattctttctcttaaaataatatcaaatggtaattcaaacctttagggaactagacaggaaatcaaaacttctagatctattaattaaatgctgcctaggaatagaccttattccaattacaaggaagtagctgactatgacttcctctgtctctaaaatactccagtccaaaatcacataagctctctgaactctctgcaatcccagtacccataaatgcatctgactttctcttgtaacattatattttaaggattcatcatctctacattacaaactgaaatgtaaccatagatgattaatgttaaatgtattgacaaaatgctaataaacaagctataaaaatcaagctaattgttttacctttggaccttgtcttcctggatatcctggtaatcctggaacgccaagtttcccctaaaggtaaaataataataataataatcacttcaaaatagaattcagtctattagagcatttgaaatggaagatttggcaaggttttccattctttactttcactacatttcttaatttgaatag

SEQ ID NO: 26303 - DNA, 1139 bp, Bovine  19866881617707
  misc_feature (1)..(1): n is a, c, g, or t
ntaataaaattgagtgctttagagaacagtaatattgctatattctcctctctgctgtatagtcaaacatgatttaataattttatgttaatttttattttacttttttaagatataattagcatctattttagttttaaatatttattttgtttcataatcttttattttaagaactatttgttccagtgtagctgaaaaactatttagtatttttacaagtttaccttatcatacattaattctttttcgtgctgataagtaaaatatctgataacgttattttttaagccataattgctgaataaatggtaggattactgaattatattttaaatttttaaatgctacatttaacttatctgtaaacaggtttgagatgtgtagtattccataatgattaagcaggtttaaatcacaaaacatttgcttttcaccaaattaaaggttattttacaatactactttctaaataaagagtaggatctgaattttctctaaattttaatgcactagaattttgagatgcatagtaaagcaaatattgtgtatagcatgatacggcaagggaaaatatttgattgtgtattctagacacctaagaatgtatcatccctgttttccttttcactttatcacttatgaattatgtatttcataaggtttttcaatttacaatattctaaagaggaaatagaaaatatctgtacctgaaataacatttttatatgcagagttgatatttttgatgtgttccaggttcagaggatttttataactgctatcacatcataacttgccaatgtctacttccaactgatgaaaataagaaactgactttgcttggcaaacgcctccttagatatagtttgaaattttatgatattattagcttaaaagaattaacattcatttcctataactctttcatgaaaagtatttatagaaatgatttgaaagcattacaaacacaaataacttctagtatgtttcccattaccctgagcatttagaatctgtagtgtttcttttatttttgccattctagcttttactattagattgtcatgagaaagctgattgataaccgtccagagcatatcaaaaacaaataacaataattcaatttccatatattt

SEQ ID NO: 26304 - DNA, 807 bp, Bovine  19866881730996
  misc_feature (1)..(1): n is a, c, g, or t
ntattagatattgtggtaagcatcatggtatcagaagtagataaagtaaggaagggtcttctttaaaggaacttccctttggtgagtgagatagataaatcatttctgatagagaggcagaacttagttctgaatgagtgcccgtagtttatcaaagaaccagtcatatctgcaagaaagttatttaaatccaaacttccacgaaaacagaattaaagtcttaccaaatttgcaatcaagactttttgccaatctatgcaaaggaagtatgattgagcgaatattaaaggaacatcttttccagggactgttgtgctaacctaatgtttgcctgttctgtcttgttaaatgtggctgccctgttctggttacacaggtgaaattcaatgtttgggttattgacatagttttctttctctgtcttagaaaacccactatattcatggggtgccgtttgcattcttgtataaacatcaaataagatactttgagaaaaaataccattgccattttttgtcagttagcccatgcttttcttttctttctgtcttcttttcctttttttccttctcacttgattctatccaccaaaatgcagtttttcaccatgttaatagcaacttcccccatttctgaatcttgctctgttactactgaaaccccctttcaaaaactttaatagaagagttctgttcagaaagtcatttgaaaaatgtcaggaacaaccctttgccctgtctcgctggcattctgagagttgccagtccacttaccctgtggttccttacctagaccacagcttcaaga

SEQ ID NO: 26305 - DNA, 1052 bp, Bovine  19866881933369
  misc_feature (1)..(1): n is a, c, g, or t
natactgttatctatgtgtccatttccaaaacttgcacgtgtctctgaattccatctgactctaattttatgacaattgcagaaatatgatggcaataaatatatgtattatgaaaaaataaacctgtaatttctggtggctctaattcccttcctttgatgaataataaaatgcctttgtatatattgatgttgaagagttcagttatttgatgtcgccaacaaatttctcagagggcaaaacctggaagacttttggaagcacataccgagcaactcttctcttctgaccgtaactttgctgaatttcagccaaaaacatcatgcattttgatgctttattcagtgctatacctcaaccgttttcttttcagaatccaggatctcacaggatacttgtatatatggaaaacaagcaagtttatatttttggacaggaaaacgtgtatgagaagctattttaacagattgatgcctacatcaagcaatcaatcaatcacatgtacaatttctttaactacgttatctcatctcattgttttcagtgtgcttcagctattcaggttaatattaaaagatggaaactaagcagttatttatgaacttgttaaatgttatattttaatcaatcgacttctagaatttgatgctaagttgcatataatcttcaaatattattttacttgcacctgtccaacaaatattatttcttttctttcaagataatatcatacattatttgacctacctaattgctaataacataagggtgaactgttactaatagtgcttgtactaaaagtcatacttattaaaaaaaataaaaatattttttccactaaggcattttctttcaggtagcttgaaatagcagtaaaatctaaaaataacaaattgaactttgtatctattttaagtaatatatgtaagacttgaaaataaatgttttattatttcttatatgaagtgttaagttaattgatacctagatttcactggaacattttcaactgataatttatcacaaaagaacatacttgtaatattgaaat

SEQ ID NO: 26306 - DNA, 837 bp, Bovine  19866882259847
  misc_feature (1)..(1): n is a, c, g, or t
ncccttggagaagggaatagcttctcactcccagtcttctggcctggagaattccagggacagaggagcagggagggttacagtccatggggttgcaaagagttggatacaactgagcgacctccttcagtttcactttttactttcactttcaaaatctattagaccaataaagtctgtagtataaatgtagcacaaaacgaaaacatcatataattttgtcatttgatttgtgctagagctacggagataaaatcaaattttaatgttttaaatgttgtaaataccataaatattggatcatcattcattccaagtaccatccaatagttcaatagttagtatagcgtttctcttaaaatgaataaaggctgtgtataaactaagttgactcatataatacaatgtcttcttttacccaatgaaaatattactttaaacaaaaagatgaaactgtaccatataactaaactctctatgctgagatttattacatattttaaatcaaaccaaaaagtttaacaatttgcaccagtgtttggtccagagttcacgtatttttaataaaaccctctattgtgtgtttgcagttgtttatgtatcttcttcatatggtcagcagctgggagttatgcaacatcaagaccatgaaatgttgttctacataattcccaatgccctccgtatgcaaatcatagcagtaacagagttattaatttgagccttagataaacagtgtattttaatgcattctaagagaaaagactttagtgttctataatatcaaaacacctgaggttttcacaacagctataatactaaggacgaaagtccaaa

SEQ ID NO: 26307 - DNA, 1675 bp, Bovine  19866880351257
  misc_feature (1)..(1): n is a, c, g, or t
nactagttatgtgtttgggatttttttttttttcctttcccctttctgtgtcattactgagaaataccactaatagtgcagtacatttatccaaacattttcataataattgctatttgtttggagatttgtgataggtttttaggaaaaaaagtcctttacttattagatattacaacaatctttccaagtaatttctctgggcagcgaaaacttcagctagcagagaaagcattgttttcaagcttcgaatttgctggttaacttcttttgaaacaaacatttttgtgggaaaaaaaaatcttaacaaaatgtcacacaggatttctagggctagtagaagaccccgagaaactaaaatattttatatccgtgttcaaatggtaaagaatgtgtgggagacctgagtttgatccctaggttgggaagatcccctggagaaggaaatggcaacccactccagtattcttgcctggagaatcccatggacggaggagcctggcgggctacagtctatggggttgcaaatagctggacatggctaagtgactaacactttcacttcaattttcatactccagtaagttttttttttttctttaatcaaatttagaggaaaaaaaataaaggaagagactttgcaatatcttctttgttccccagttatatgatttctgttaaaatatcggcaatagatgaaatgcctgtgtcccccaaatccctatgttgaagccctaatgaccaaggtgatgacttttagaagtggggcctctgagaggtaactaggtcctggggcagcgtccccttgaatggaattatcgaacttataggaaaagagaaagagcatgtctctcctgcaggtgagactacagcagcaaagcagccaacttgcaagctagggggagagctctcaccacacattcaatctgttagagtcttcctcttagactttccagcctccagcattgagagaaataaatgtgtgttgcctcagtcaccgaacctgtggcattctgctatagtgacccaaattaagacaatttccctttgaattttatatactctcactgcctaaactaaggagtacagtcaccactaaatgataatctatgcaaacagaatacataggtcaacaaagggaatggtgggagatcattgattgaccatcttcctcaagattgatcatttcagcttcattatgctcaatattttgatcagcctaagtaggcactatgtgaaaaatgcatttcaccaaaggcatggtcagaaaagccaacatggtattctcagaactgtaaaatcttcatgcacatttttgttattctaatgttttctaatgttttgttctctaatgttcttaccaagacttttttccccaactttattcattttcaaaattcctgctttagttgtttatacctattgtgaaacatgctgattgcagtcaaggatccttcttttgttctgactcttcttcctattctatagttcctgatctgacagagtgcatgcttaaacttggatcttgtagtaaatttgacacttcaaatttacaagaacacaagcgaaatcttgaaaagcagagcattctatagcatgaatgactagttcgtattctgtgctccagtcctttaaacattctttgaatacccacaatcttattgggcctttatca

SEQ ID NO: 26308 - DNA, 1321 bp, Bovine  19866880479539
  misc_feature (1)..(1): n is a, c, g, or t
ncctgacctttctttctctctatcatctctgttttcatgtctctctctcactctcctcttattctttcctgttcatagttcctttagctaaacaagggaagcccaacaattctaaagtgggtagtctatcccttctccagcagatctccccaacacaagtattgaaccaaccaatcctgcactgcaggcaatttctttaccaactgagctatgagggcagccccttttgctaaaaaaaagagacaaatttcagaaagcaagaatacaatttttctctgagatgccattgtgtgcttttggaaaagctttcttctctgctattcatggagtggtttactgccctatatgccattctctgcaatttggcaaagttctccattaagagtttctaccccactactgtgaactcttaatattttgtctgaaagttctcctgacttttgttcttcttgtgtgtagcagagaaatttctcttaattaaagattctcaagtcaaggatggtagtaacatccttttctgtagcagagacaatactacgtgctcatgatatcctctttacaaacaccgccagcacacgacagagcaggcctcagctgccttcgtgtgaaatggttacgcacttagcaggccactggcggttggcccagtcttcgacacaatatggtgttacctgttcagacattaaggatgagtacagaaacttcgggtatctgatcaataagtgcacagagagggtcaaggagaactgaattgatgataaatccctgaattctgtcatcagtccctacagcaagttacatagtgtgctgtttgtctacaaaccaatgtgattatacataaaacgaggctgaactagatgttaccaaaggtcccttgcttgagtttctatgagtttatctttggttgtgtttactgggtttagattatcttttcctgatactacttactttcctgatatgatactactactctttctctccagtcccagtggtaccctataaatggctgcagcctatctactggcacacagtattgtaactgtttatttgtgaaatgccactactaacctctgagttcaccaagaccaagaactctggagcctcacccagagaagactattattattgagtaaataataaatcttttagtgatcatatgtgccaaagggttgggcttctaaacatagttgacaacaaaatgacagataattctgttttgaccagaattctctcttgtctctgaaatggctgcaatgtgctgcaagcaacaagacctttaccaaaagcagatgttggaagtggaggagccgtcattcagaca

SEQ ID NO: 26309 - DNA, 2084 bp, Bovine  19866880486999
  misc_feature (1)..(1): n is a, c, g, or t
ntatggatgtgagagttggactgtgaagaaggctgagtgccgaagaattgatgcttttgaactgtggtgttggagaagactcttgagagtcccttggactgcaaggagatccaaccagtccattctgaaggagatcagccctgggatttctttggaaggaatgatgctaaagctgaaactccagtactttggccacctcatgcgaagagttggctcattggaaaagactctgatgctgggagggattgggggcaggaggagaagggggcgacagaggatgagatggttggatggcatcactgactctatggacatgatgagtttgagtgaactctgggagttggtgatggacagggaggccttagtgtgctgcaattcatggagttgcaaagagtcaaacatgactgagcaactgaactgaactgaatagcttcaaattagtcagatattcagtaaaaatctgacctttgttcaaagattgaaggttggccttcacaattgttgccccaggttagctaactaaaacttggaaaatttgatgtgctcgagatatggcccctttaagagttttatgcaaatgatttttctcaatggatctgcttcaaattatttccttcttaattctttccatacttaaattgacaaccaatcctcatttagtaaaatatttcagagtactgaatatgaattcagaatgagaaacaaaaatcttgaagttgaaataagtctttcagtgtcattaactatcttcaacaacatgaaatgaatcaagtttgctgccaaacactaactggtgtctgtacttttctttgtctcttaaatataattcatctggctattatttgtagaagtgcattttgaaataaggcatagaaaattgaagtcttttaaattttctgcatttgctacatgatatcagaactaatctaactttattcatcctactgaaattgaactgggttttatgttagtgcttaaaatgaattccaacttgaaaaatcaataggaaacttgtaaatactttttcttaccccaagttctagatagctttggaattcacaatgcatgcacaggttgtttaataccattcaaattttctaaaggataatttaatttcatctgaactaagggcaaactgtgtacaaaagaattctgagataatccatgttcctcaaaagagaaatatgtgaccaagaagtctgtgttaaaagagaaaagaaagcagacgttaaaaatagataaaaatagagatttgagttgtttagtgatattatcactcactccttcacctgtgcaaacttgtgctaaaatccttcctggtatttctcaacccttggagcattcttcatcaaaatctagattatttacccaaatcatggaaaatactagttaatgcataactaggtacatttcctgcccagaaatcttcaagcagcaatggtctctatgattccaaaggctgaaaaaaacatgtaggggtgtaatggaaataaatataaaacacctaagtatatatacatgtgcatatagatatataaagctagatatacattttatattatgtatgtatatacatacaatgagagagagagtgctatagcagtacttgtttcagagtccaaatttatatgtgtctattttcatctcatatttcctgatgttttccaagtaaatcactaatttgagcataaatctgaccatttacaaatccaaatacataatgatcatctaaatatgtccaagacatttaaaaaattacctatgtttttcacatgcataattataaccaattgaaaatattttaaataagctttaaagatacaccacaaataaaacacaagagatttagagaactggaaagtttcaattacagtgatttgaaggatcaggaatatatcccattacttttgaataatgagatccaaccagtccattctgaaggatatcagccctgggatttctttggaaggaatgatgctaaagctgaaactccagtactttggccatctcatgtgaagagttgactcattggaaaagagctctgatgactgggagggattgggggcaggaggagaaggggacga

SEQ ID NO: 26310 - DNA, 1493 bp, Bovine  19866880524464
  misc_feature (1)..(1): n is a, c, g, or t
ncttttctgatgtttaacgaggctgctaaataatcactgagaagaacaagttgcactttttcctgaagtggactggtggtccaaaatgcaggtccaagcaaatgtctgcagattacttttgcacagagagctaatgtaatacatgcttgaagacattagtttttagaaatgtcaatccattctctttcacaaaagttataaggcatcttccataatccagacacttcataagtaagcaactgcttttcctaaaggaaatgtactcatttttctgtttttcgcatctggatgcaaccccaggtagcagtgcctaccagcaaggaccttttcgcaccttcatttcccattcttggtgtgaaaggaccaatacttatttccttttaacaagaagtgaccaaagtgaatacagggagctccctaagctccaggggtctttacaggaatgagctgcccacttataactcaggctggcttaggaagctgacctcaccttccatcattacgcacttccagtttcctatgcaatgaagtgtgacaacagttttaagagcatgtgaaaacatattttatgacggggtcattaatttgtcctgctgtctctgatgttctccatatgttacgtgttcttctctgctaagttctttcctgataaggacttctgcttttatagggtggagctctgatgggcatcctttcgcttggcagagactagcatcattccaacattttatttgtgcatgagagtggaatgttatggaattacctgctgcggttgtgcatttgttcttactttccagaggtatctgccaaaccctggattttaagaccctagtcagtgaattttagagaattactatcaaaaattcattctagcatctgaaagtaaaaaggaaaaggctctgttactcttacaaaagggtctaagaaaatattcatggactaaaagtcatgtgactatacagtttgccatttatttcctatgtcagacaaataaaatttgtacactaatgtggtaaactggagcaaaaaataagtacatgagcctcaaatatgtttttaaatatatatgccatatgttaatatataatgatatctttttaaaggacttttaatcatagtatttgtgatactctcaatttataccttatttattctattgaatagtaacaagtagcacattatagtctaggatttactcagagagtggggtgggtgggaagaaggtgaataactctttctacttacagtagttccatgtctggcatattgaaccttaataaatatatgatgagtaaacatacattgtagatcaataaaatagatacaatgttctctaattatttgtgtaagcgctataatacagataaattttgtattatatacagatattcaaaaagggcatggagtattcagaggatggaaaatgagcccatacaccataccagaaggaaatttggctaatactgaaagaagagtaaggattttgaaggaag

SEQ ID NO: 26311 - DNA, 746 bp, Bovine  19866880555071
  misc_feature (1)..(1): n is a, c, g, or t
nctcttaatctttcttaattcccctttgccccaactgacagtagaaaactattccatatagtatcgtatcccaaatgccgcattttattattcatttttccatcctagatcagttctcacttgggtgcctgttatgctatttctctctcatagttagtttgagaagtaacaaacggtctttgctactcagagtgattcactaatcctgcttaggatgtaaccagagctactacgtaaactccaaagacactaagagaaaggggaacagtggatgctagtttgtctttaagtatagaaattgcctcaatggtcactggatatgagagtagctaatccaattcaaggttactctcaggatatgtgcatggaatgcgacctgggtttacagagataacatgattctttgatcatacaaagaccaactgtttctgtgcagaaatgtttgagttagctgaagctattgagtgaatttgtccacagatagtcactaacaatgatgtcagaacccagaaagatacagtgaaatgactccaaaattttatttgagaatctgtttaaatcccccactgaaatgttgagtatcaccaaaaaattaacaaaaagtacacttttattctaattagagttttattttagattaggagtaaaaaataaaagatgagttttaaaagtttggatacataaaacataagggtttattatcccaaagagagacattctattatgcagacacattaattcagttg

SEQ ID NO: 26312 - DNA, 1183 bp, Bovine  19866880597084
  misc_feature (1)..(1): n is a, c, g, or t
ntagatatatttaatgcacacacatatcttgctcgctatatttaaccacaagcacaactgaattggaaaatgaaggtataatggctctatgaagaaaagtattatataaatcagagactaaaaattcactacatataaaaaagtcctggtgcaactttaaatattaataacttttgatgaacctatgacaaaagcaaacgacaagcatcatgtgaaagcatatttcttagacactaatgtgaatatttaatgtccttttattcggcgcttactgggctctcagaaagcaatgcattattgcccattactttttataaaagcaatgatcaatgctaaatttaccttttcatagtttctgagcactgcagttttcttaatctttgttgggccagtttctactagtgctttcttccagcataatgctgcttttgctactctgtttgaaacatttgacaattgttgacaatttcattttcagatcagttttcatgttgactagtttcttgccacctcatacacctatttgtggtaattcaactaggatgttgtttttttgtgtgcattgcagttcatttcacactaatcaatctaattcctgtggccagaataaatgccattatacacttcaagttaaagctatggtttttccaggagttatatacaaatgtgagagttggaccacaaaagaggctgagtgccgaaaaatcgatgcttttgagttgtggtgttgcagaagactcttgagagtcccttcctctcaagaggaaatcaaaccagtcaatcccaagggaaatcaaccctgaatattcactgaaaggactgatgctgaagcgtcaatactttggccacctgatgcaaagagccaactcattggaaaagaccctgatgctgggaaagattgagggtaagaagagaagggggcagcagaggatgagatgacatgagggcatcaccaactcaatggacatgatttgaacaaactctgggagatagtgaaggacagggaagcctggtgtgctgcagtttatggggtcacaaagagtcagacacaactcagagaataaacaacatatgggggtaaagaataaaatatattagtgatagaaagcaaaataaggatttatcatgtgtgtttctatgcaaacaatagaaacattaataaaagcctctttatagagatgca

SEQ ID NO: 26313 - DNA, 1803 bp, Bovine  19866880657549
  misc_feature (1)..(1): n is a, c, g, or t
natcaatttttcagcactcagcctttttcacagtccaactctcacatccatacatgaccactggaaaaaccatagccttgactagatggaccttagttggcaaagtaatgtctctgcttttgaatatgctatctaggttggtcataacttttctcccaaggagtaagtgtcttttaatttcatggctgcattcaccatctgcagtgattttggagcccccccaaaataaagtctgacactgttgaagctattaatgctcagctaagttatattttttcttgaatggtttagaggagggttgaaaattggattactaaccggggaaaatataaatagaaaaatgtggcacaaaatttgtccttcttaatatggatttatgagagttaccacattattacatgtgacttgcaaatatttcttgaagactggtgcatccaagctgtatagtcacaaaagaaatccatgacaggaagtacagcattcagtgaatgatacactctataatgataaagtcttgtagatcacagaaaagcatgcttagaggagaaagcaaagatgcacaatcatgaacctttgctgtaattaaatccctgatggcacattttagctgcatttatcatgtaaaatatttctatgattcattgcaaattgtctgtgatttatagataggttctttcttctggtactgttcattgactttgcacttaacagaatcataaaatcttcaccaagagacgctaatctcccatctacaatgccctagttgatttcacaagcctttataagacctgtataaaattcatctcagtgagtcaattcccagggaatacgcaccgggttagatcctcggataaatgcatcaatagtcattattcagttctattattttcttaacttccagaataaaataacagtgcgtttgacaatcaaattcctgacttctatttatgcaaatattttcatttcaagtcatgagatgccattttacactctacacagagtagtagtcagttgactgtattctgtgaggtgaaaaataaataccaccttttcagaatacgagatcatgatcatggagggtaaatatagtgtattgttctctgctataataaaccctgaaatatttccttgaccctttacatttctgcttggatatttatatacacttcgtgtaaatgtatgaaaatttattaagtaggaaataaaatatttgccacaggttgtgaacaagtatacttcaagtgacatataacgttaagaatcacaagtcagatgaaaaaggcttaggatcacaacattcacacttttaataaaatggcaatacaattgcgattttaaactatagacaggttggggaaatgatcctggaaattgttattactttgcttatgtaaaataaaatctaaacctgtatggtgaaacgttttcacagcatacttttacaggaataaatttaacactcatttttggtatttgcttaatataattgtgtttcaatgggccttttatttgcactgttatgtcctaaatccatgcagtcactaaacatgttatcaagcaattctagcatacagaagaactatttaggaaagttatgtgtgtgtgtgtgtgtttggtcatgtagagaaaaaaggaagagtatattcaataacataatcaatattcagtttattgatgtccaattttaatagacattgtcattatcagcaagagaacatcatttattctccccacgggcttggaatcttttacctcaatatctaaagctgtctgtcagtgaaatagctgcactgcttttattaa

SEQ ID NO: 26314 - DNA, 818 bp, Bovine  19866880658244
  misc_feature (1)..(1): n is a, c, g, or t
nggaaaaaatacaatactctgtctgcaaatcctttctcatttcatgtcaatatccacccctcccatcatcctgtgttgacaggactgatttgctaaaggagagtttaacattacaaacaccctttcatcagcttaaaaattgaggcgagtcaatatttacatcatgttgctgatcttgaaagtacataccctgttttctgacctaataaatagctgtcactcttgcctccatcagagcttagcggagagtgggtttgcctgctcaatggtctctgcattccgggaatgatctaatatttcaagtctctcctgtggcagcaggtcgatttctttctctcgctctttcttattggtttccaatgacagacctcataaaaccatttaggtctgcttagagaaaataaaatccataagcatgctgggtttatctttcaccagaaatgcatgaaatctaatgctccatgagtgaagataagcaggatatgtgttatctattttgcaatgcaatgttcaggacatatttttagcccaaaacactggatgaacttgtatttctagtgcttaccagtgaaaaggaatcacgtcaaactgggacaatgaaaaatgttcatcctttcccagagagttcatgacacttgtacacttgtccacaactcttctttcatccgtaagtgctatcactgcttcctgggtaagtttcagtatggtttactcgggccacagttattccaatggacatacattgattgtaaaggaatctcaagatttttttttaacttgttttatttttctttgattgttattgctgttggttcagg

SEQ ID NO: 26315 - DNA, 5131 bp, Bovine  19866880661405
  misc_feature (1)..(1): n is a, c, g, or t
nttttctggatagtgatcctatcaattaaaatttttcacatatttgtgtatttgtgagtatatgtgtattatagtgtgttagttgcaaggtcgtatctgaccctttgcgaccccagggactgtagcccaccaggctcctccgtccatggaattcctcaggcaacaatactgaagtgggtagccattctcttcggcagggaaccatccctacccagatattgaacctgggtctcctggatggcaggtggattctttacaatctgagccaccggggaagcccatgtgtattatatcctctgccaaatttattgcataacaccgaaatgcatttatcaatggaacaaaatgaaaaccagtcataatattgaactgtattttatcctgctatgttcatgatttttatcctgagcttgattctcgactctgcttcactctgcccatatgtaggccttccttgcaaattcatatgaaggaagattttaaatgagaccagatgctagtttcctgagcatcttctcttagataaatagccagatgctccctcagtgggggaaaatgagctgtagtggttgtcacagagattagaaggaacgcctaacgcaacacctgcaggagcacgtgaggatggaagagtctctggcggaagcccccagggcaggctcaggcccttgcttgggctatctgaggtcagcacaagtggcgagcgtgcacttgacaccctgagaaaacagaggcttcgaaagaaatgtcaggatcggtccaggggattcatttgttgacacagcttttttgcagtattctggggagaacaagataaaactatgttgctcagaagtcctatttagagttgaaagcacattaaaaaaaataaaatatcatgtttaatcagtttttatactctcagactcattcagataggaaggaaagggcatgtattcctggaagactctatttttagatcatgagtaaggtagattcagtgatgggggaagaggtagattcataaatgagagagaagctgataaatagaagctgcttaacagcgttcattgctaagcagatgacaaagaatagctgagaccctcatgtcaaaaccagcctctcatgggaagattatttgagagtattccagacagagggaatgaagtccagtatcataaagtaggaatgtgtaggcagctgttaaaaccttatagtctgtgaagatctggtgggtgtagagtgatggttggggcagctggtcctgaagagaagacaggggcaaagtcatgcagggcttttaatctaggttgaaagatactttcttaaacgcctaggaagccactgaaggtgtttacatggggtgactggggtgatctgattgccattttttaaagatcactctggcttatgatgacatgcttttcaatattttgcatttatagtctcgcctttgaatatctaggctctaatccaaatcagcagacacaaaatggtgatgtgattaggaaaaggctgtctttatagtacgcgttctggaccaatctgtagcttttatgtgcacattatcattgcccctgagccattatgggccccagattggaggcagcaatccacctgagtcatcatccaaaccactttatgaagccgtcgtccgtataagcctccagacgctcattcaatcactcataaggcccgacctttctcagcttatgaggaatatcaaaatcaggggtttggatgcgcctattaacaccaatttgagtgattctgttttcacaaagggtctccaagaatccttccacaccttgaatgtaacaaatatgacaatgatacaaaaacaatgatacagatgcaacaatgatataaacagttttgtaagtcagtgaagcttttgttttttctaattttcttttctcacttaattctatcctagcagtgtcttggcaaaaggcaaatctcagtattttgccagactcatgttatttcaagcgagaaagaagggtcataaacacagaaataagtcttgggggaaattatatatatatatatatatatatatatatatatatatatatatatatataactaaaccaccacaaaatcaaccctaatttgggtatacatgttctcagctcacctccttccaaagctcatagctggagaattgtttttctcctcaatttcccagaactttaaggagagtcgcaccctcaccagagaagtttctggacgtttgtggtggagaaagggagaatgggcacatggaagagctgagtgtcatgagacataagtgcttagcaaggtacaggtcaagttggcgtaagtgggagaaaggagaaaacagaagcggtctttcagctgagcttgcagggatcaagacagggggcatattatgaagatgagagggcctgagagatgggggaaaggccttggggggaggaaaggagatttgagagaagtgagctgggaatgatgattctgaccagaattctctctctctttcagtttttcttcagacccacttgaacacaaacacttgactgatgggatcagtaatttcaaagggaacaagtaaaacttttttttttttttttaattcatttggtaagaaagaaggtaaaagaaaatctaaaagaggaaagagggggagatctatgcaggaaagcagattagaatatgggaggaaaagatgcacacatatttaacagttaagggtttcatcacttaccttttccagctcttttcctatacagaggtcttctaagctgtgaaagaagccttctctttcacctggacggctgagccatgtgatggaggaggagccatctcttcttcctcagtgatatcgggtagtttgctgggcatggaaacgacgcgccacctgaccggaaatcaaaagtgctcaagagtctagactaaacctgcctgctcttcctggctcatctcccttcaaagcgtctccagctcttcacatctcagtcagaggcagtggcttactctccccaggcacagcttcctgttttctcaccaggaatgcctttccttccacttcccttaatttattaaacagtaatctattttatgttttctttttgtgagaacaaatattcaatcttccacttcccagcactgcttttgaaattatatgaaaatgttaacattttcactataatacctttgacaagaattcctataaacatgcaaccctagagtaattttccttatcctcttatctttctctgcatcacacacgaaggcacacacatgtacacatctacaaaacatgtacacaattgtacatcctttccccagcctcacacatatattaagggtagcagatcttttagtttaaaataatcatttctagaatcctgttttccatcttgccttggtcagtgacagctgtggccccagaaaattcaaaacattacatgttacctcactggtacaaatgagttagctatcttccagtatcaaaatcttagtaaatatatatatatatatatatatatatatatataatctgcacattatatatatatatatatatatatacacacacacacacatatgcatacacttatatatgaatgcatgcatatgctaagtcccttcagtcatgtctgactctttgtgactctatggactgtaacccaccaggctcctctatccatgagactgtttaggcaagaatgctgaagtgggttgccatgccctccactgtggaatcttcctgacctggggatcgaacccctgtctcttacgtctcctgcgttggcagatacattctttatcattagtgccacctggaaatcccatatgtgtgtgtgtgtgtgtacatatacatatatatatgtatatatatatacatgaggattctcacatacattcttgtttattatatatcttatttagagaatttaaagattgtgatacagcttgttatagttattaataaggaagagataggattttcagttgaataactatgactgcaatcacctaaaactcaataatgaactttgtctaaacatgtaggcaaagcattactatggctaatcaaatactgtaagaaattaatctgactccatggtagcagcttgactaggaatagaaacctagtcagcaggtgggggtaatgatcactaaggagtgattttattttactgttcggagaaaggaaatccatccatgtgccaaatgaaattctaaatcaattcttcagtttactgtttaaatgcagagtactcaaaacattacttgattaagcacttaatgttgtgaagcaggattcttgaaagaaagaagtttgattgtatcagtgctgcaatgattttcatttataatacactaacaaaaaggccaaagctctccaaggagtaaacatgagtacagagtgctttgaattatggaagggtgacataaagtacaggaagattactcgcaattacactcttttatcaaggataacgtttatgattctgactttaataaaatgaagacaaagcagatgaggaacttgaaagatttgaataataaaaataatgatgtatccacttccttagctctatcttccccagaattcatgaataatgctaaaatctgagtaggggtcagtcatctgtggctgactccaaagtaaagcttctacatgcacttataattatttacatcaattgaaatagattaagtactttaaacagcttagcacacagccctagattagattaaccatttgggaattaattactggacgcttacaaatcagttacctatttttttaaaaaaaggaattgtaagagatattaacgcatgctgttttgtttcacagatgtatcgtgtcagaagcaagatttgaaaattttccaaaagttttaaaaaacatgtttcaggacctttattgtagtttttcagtacaattatacttagtaaacaagcttattgttttctttttggcctatttttgagagaacaaatgaagcactttgtatatctatataaaccataagtgattgaaagggagaaaaaatgattttcatgagaagcagtggaaaagtgaaaactctatcaaaaatatctccagtaaaaacaattagttacgtttagaaactcagtagtttttggccactgttatgagctgggaatacaa

SEQ ID NO: 26316 - DNA, 1497 bp, Bovine  19866880672500
  misc_feature (1)..(1): n is a, c, g, or t
nataaagaatgccccatagcacaattagacagcaatatttctatggactaagaataaagaacttttttgagcagaaggaagcctaccaataacttcttgagatataaagagaagcaagttcaaataagctttgtaatctattcaaaggcacatggtatactcagagctggtagtggaagtagttcggtggttaaagacagtggtcttttcaagatgctgtgtattgaattcttcagttgaaaaaagaaaaaacatatagatatatagcatgagaggcctcttagaaaatattactgactccatttgtgttgactctttcctaagattattacaaaaagatttagccacattttagaaaagttttgctatttgctctgtttcaatacatctgaacagcagccttgcaatggtaacatctgtttactctttcaaatagaagctaagaccagtggcaccttatcctagaaatagtgttggttgtaataattaggggataacatttatttacttttctctatgaatcttacctaaatcacttcagtctcaattattcaccatggtgcttagtttataaacttcacaccttttcaatatatatcaatatttttccttaaatgaaatagctccgtgagatgtgaatttgattttagtgcataaataagaaagcatgaagaattatttaagcctcagaggcaagttatgtgaagagcaaaagtataagaaatgaaaaagtgttcctgattgcaaagtaaacctatattttatggtgctttatcaaaattttacttgtaaatcaattcagtattttcagtacatatttatgactccacatttataaatatatatacatacatgtttatactaactccttctctactcagtttaattagttactctgatatttataggtgaacattattaatccaatactagtaattgcataatctataaaatggtatgacatgttcttagggccataacattaatctatgtaaaatgaaaacattttgtggtttagtatgcatttggtaatctaaatgcagccaggagcctcagtttcttctcccctgttttctgaagtgtattgattcctttttctatatgaaaattggtacaggagaagccacaccctgattgttccctcctaggattaaccacaacaaaataagttttactatagcgtattcataagactagtccgaatagaagaaaatcatttgattattataagatgaccttttcacatttccacctgtattcacttaaatacaatcaaacaatatatttttaatttaaatatgagacttcctaggtggtgctagtggtaaggcaccctcctgtcaatacaggagttgtaagaggagctggttggatccctgtgtcaggaagatcctctggataaaatcatggcaacccgctacggtattcttgcctgcagaatcccatggcagaggagcctggcgtgtcacagtccacggggtcgaaagcagtcataca

SEQ ID NO: 26317 - DNA, 1507 bp, Bovine  19866880799143
  misc_feature (1)..(1): n is a, c, g, or t
ntctttctgctatatagtgaagataccccaataccccatcttatagatttgtgtgctgattaaatgagatattcttcataaagcatctagaaagtaccactctcatagatgagagccaagaaatcttagctatcaatattaaaagattgaatgttaggagacaggagtttctaggtcctggcttaatatttactaaccagtaaatttcacatacagcagaattgcttggagtttcgaatgtaatctgtaaattgttagatgaattgcaattactttaaaataatttttttctgggtccccagattggaagaaatgaatgtttaaataatgtcatctgagttctgaaattaaagaaataaactactataaaagtatcatatttccctgacatattaaggttggaaaaaatatggttaattgaacacatggataattcaaacatatcatgaatatattttattttacttccattcatagtatggaggaagattttagtctttgtggttatctccataaatacagccaagcaaactttaataaaagtttcttcagtgattctcaatcttattaggcatctattatggcttccctggtggttcagagggtaaagactcttcctgcagtgtgggagacccaggttcaatccttgggttaggaagataccctggagaagagaatggcaacctcctccagtattcttgcgtggataattccaggacagaggagcctggtgggctacagtccatggggtggcaaagagtcagacacaactgaacatgcacacaaacttttaactagagcccttgctctatgtcaagagtttgaaacgatgccgcaatgaagagcccacgtggggcaatgaaaaccctgcacagtcaaaaaccaaataaacaaaaaaaaatttttttaaagcagattccaagttggttttattgctgttgttgaatccttaccatcaatgcatctttttactgcctgtggccaggacagacttggcctcccacttccctcaattacttttgttaccacatagaagggcacaagcccctctgtttgcaaaacctatgaacatatttgatggttcatcactttttagaatgtgtcccagagagcagacactgggccccttccaacaggacttatcgtcaattctgtctcattttttccttgactctcatttcctctcatcctagaaaaatcctttcctaccttgaaggacagacagtaataagtaggtgggagcaagtgaaatttaaacttaacgcactgctttctctccaaggttttcctatatgccaacacttagattcccttaggggcctaggtattctgagccatgcagtcatgaaaagtctctttctctcttgctttctgtttctcatcctttccctaaggcataccgctctttgggagcactgcaatagaaagtgaaaatctttatctccagctctttggggttagttactgggttccccccacttgcagaagcagagacatccccttaagg

SEQ ID NO: 26318 - DNA, 2592 bp, Bovine  19866880881336
  misc_feature (1)..(1): n is a, c, g, or t
ncatgaggtattagctcatgctggtcagactagccatcattaaaaattctacaaacatttaatgctgaagatgatatggagaaaagggaaccctcctacattgctggtaggaatgtaaattggtacagctactatggagagaagtacagaggttctttagaaaactaaaaatagaactaccctattacccagtaatcctgctactaggaatatacctagagaaaagcataattaaaaaagacacatgcaccccaatgttcattgcagcttttgtttgtagaaagatgctgaatttcagatgttaaaggaaggaaaatttgatgtatatcttatgacaacatcatgtggatatcactctataatatatccttattaaacatttttatattttgtttattgtagatattatattaatttttagttttataaaatattgcattgaaatattatcttggttgctgagttttctaatattcttttaagtggtatgctttagaaaagtgccttatcctcctcaccccagtcatgcaagttaaaaagtagtcaccctctcccttttcttttgtacaaaattataacattacacatagtgcacgatgatgtttacatatcattaagcattgtttctactaatttaatctccagaaaatgaaaacgacatcatatacgcaagcctaagacagagaatattgttttccccattgcacagatgtgaacactgatgtttgagggtgatacgtaattatccaacactgtgcactcgtgagtcttggaccagggatgtgaaacctaatctctctaaccacaaatcctccactttaaacagaatgggcttcccaggtggcgttggtaatgaagaatcgcctgccaacacaagagacccaaaagacgagggttcaatcccggtgtcaggagatcccctggagaaggaaatggcaacctgctccacagactactacagtgaacatatttttagcctctggaaatccctgaagaaaggacatgatcatggttgactgtttctgcagttgaaaaaggttgtggactcttttcccaaataagaaagttgaactgatttgctgctggtggtgctgctgctgctaagtctcttcagtcgtgtccgactctgtgcgaccccatagacggcagcccaccaggctcccccgtccctgggattctccaggcaagaacactggagtgggttgccatttccttctccaatgcatgaaaatgaaaagtgaaagtgaagtcgctcagtcgtgtccgactcctagcgaccccatggactgtagcccaccagtcccctccatccatgggattttccaggcaagagtactggagtggggtgccattgccttctctgaactgatttgaagaactgtgaaattagttcttacagagaaacttaaaggtcagcttcccaaaaagattttccttcttcaaagttatgaccatagttttgagctcttacattccatgttccctagaatggctgctgcctcttaggtactgaagagacatttaacagaaatcaatatgcacttgtaactgtcactgaaaagggaaggcagattctagtttcccaatatttcagagtaactttctcctgcaaaatgattaggtctgtgtgactttctggtcaacctgacttcaaataaagttatttcaatagacagtgaaagtcctcctagctcacagacaagaaagaccttaattaaaatcaataaagaaaaaaaaatctgtaaaaacaattaagcgctgaggttgactccttttaatttggggtctgaaggtcttcttgggaaattactgaatcattgggatgatttaatttggctgccttgaattaacttgtggtgtactagatagaaagggtctttcagatatcatgtagacacattgcaggaatggtataaaccctaaaagaaaacaaaacatttaaaaagtcagctgagcagaggaatagattctggaatagattctttcagttggcatattttatgagctgtttgttccacaaaatgtttagaaattcaagtgttaatagaaattttattataagaagggtctatgaagtgagtgaagtcactcagtcgtgtttgattcttttagaccccatggactgtagtccaccaggctcctctgtccatgggattttccaggtgagactactgtagtgggttgccatttccttctctaggggatcttctcaatccaggggtcgaacccaggtctcctacattgcaagcagacgctttatcatctgagccaccagggaagtctaaggtctatgcttcacactttttctagaattcagaaatcttatttttttttttttatagatagaaaaaaaaagggtctatacttcacactttttctagaattcggaaaaagtttatttctgaaaaaaaaggtcttatttctttatttaatgaaataagtcagtgagcaaaatagattaggggtggctatgtgactcaactcagtccaaaacttaacgataaacaaaaatcagacctaaagctttatgtttaaatgattagagaaatataagttctctctctctctcttttaatgaactggaaccaaaag

SEQ ID NO: 26319 - DNA, 1880 bp, Bovine  19866880905082
  misc_feature (1)..(1): n is a, c, g, or t
ngtgagcatagcaaaaatcctggatttctgtatgaaggtataatcagagctcaggtacagactgagggcaccacctgccccgctagagatcccccgaaggaagattgagatttagtgatgtcttctaaccctcagagcagaagtccccaaactttttggcaccagtgaccagtttcacgcaagactatttttccacgaatcagggtgagggaatagtttgtggatgattcaaggacattgcatttatcgtggactttattcctatcattattgcatcagctcctcctcagatcatcgggcattagatcctggatgttagggacccctgctctagagggcatcttcagactagttgttataagaagtaagtctgcttctctcttccatgggtgctaattgctaagattaccaaggaaaatctaaaagcataaaagtctcctgaattgttcatcacaacttgactctcaaaccccagataaaagtcagttactcaaattcatatttcatccacaagaaccttttaccactcaccttcaagtgatcttagagctcagagaaattacaagcaaatattccttatgctttccggcctgccacaagctctccagttactctagacagttatatatatataaagaaacccattcagttttctttttcatattaaacatttcatttatttttattattttaatgaaagtcatatactcacataccttgcaggatgaatgaagatgaagtaagtagcatatggtgatgagcagaaattaaacagcacattgtgaagtgctctgagctattagttttgagctataagtgcaaattattattattgctggaccatattctgccaaatgtttttgctgtaatgtgcgtattaatggaaggatacaatgcatttccactaagggcaaagcagctaactatatgctttgggatattcattataaaaaccaaagctgttataactctgtcactgaacttggttttgaaaatgcatattctggggcttctctggaggctcagtggtaaagaatcagcctgccaaagaaggagacaccagtttgaccacgatccaggaacatcccacatgccacggagtaactaagcccatggaccacacgctgttgtgcctgcactgtagaatctgggaactttaactattgaagcccacactccctagagccagcactctgcaacaagagttgctgctgcagtgagatacccgagcaccgcaaggaagagtagccctgctcgctgcaactggagaactcaagcagcagcgaagacccagcacaggcctaactaaataaacagataaaactgttaaacacacacacacacgtgcacacacacacacatgcacactgagtttaaaaaaaaaaaaaaacacattctaaaaatgtttctcctgatttacaacctcctgatttaaaaacccatgattgtttttttttttaatttaaatttatttattttattggaagctaattactttacaatattgtatcggttttgccacacatcaacatgaatctgccaagggcgtacatgtgttccccatcctgaacccccctcccatctccctccccgtaccatccctctgggtcatcccagtgcaccagccccaagcatcctgtatcgaacctgcacttggcggttcgtttcttatatgatattatacatgtttccatgacatacccccaaatcatcccaccctctccctctcccacagagtccaaaagactgttctatacatctgtgtctcttttgctgtcttgtatacagggttatcattatcatctttctaaattccatatatatgtgttagtatactggattgggggtttttctttctggcttacttcactctgtataat

SEQ ID NO: 26320 - DNA, 726 bp, Bovine  19866880964885
  misc_feature (1)..(1): n is a, c, g, or t
naccaacagtaattctcttctttgtctctttggacaagtaattgtattagtgttataaaaaacaactgttgctaatccacattgttcttttcaaaaccagaggtttaagattttatgttaaatgttgactgaccatgcatctcaaatacccttttattacagtaaaaaagttcatagggtggactcataaatgcactccacaccttggaaaacaatgtagctgaaaagataatatagaggcctgggtgagacctgaattaactaggcattctgaggctgccgaacgtttacattttcagcacatctaattaaccttgtaggtattgcattccagtcaattcagggaaactcatacacatgcacgaaaaaatcatcgccactgtggaatggtgagtgtttcacacttacaccctgagaggctgttttcttttttcagaattaaatatgcatcaagcttcatttgagaatccacctgaaacttttccaatacttccttttccttcatgcttgttcacttttaattcctagtgagaatagggaatggagaatgtgaagaataacggaagaaaaattctgaccatattttcaaccacaaacataaaaaaaatcatagtttttacacttcatgggacttgattttaatcaaattcagtaccttgtaaactcattcctccacttctagtccaggaagcaatatccagtgttcactttaatgagtaaaatttt

SEQ ID NO: 26321 - DNA, 747 bp, Bovine  19866881055626
  misc_feature (1)..(1): n is a, c, g, or t
ncactctttctcatgagagaacttaatagcaaatgactgagtcacctgaattgttgacccaagctgtacatccaagcctgataatgacgaggaattgctgattctcttaacccagccgtttggtattatggatgcactttgtcattactgtcagcagatataaattttaaataacgtaccgtagtaaagggagcagaagcatgggaagtagtccatgtggtataagcaagggacagtcttcttgttaccactccattccccaagagactccagcagaggcgtgagtacagcatgactgtacctgaggccagcctgcttcatcagtgatgctcatggcaaagacagagcaccttccaattctacacctggttggtccagttgattctctctaggtatctccacagcgaagtccttgtcattggccaaagttataacacgttataacacgtaggttcttccacagtggtgacagggaaatctaggagtcttggtctgaagaaatctgcttctgatgggcattttgctggtgttgaggctccaggtagataccctgatttctactcaaaggcgaatccaaatcatgactgaattgtataatcatgcaccttaaagaatgcaaccgacctagagaaaaataaattgtgtcctagtaggaacattaattatatataatatataaatatattatataatgtatatataattacaattttatatatattaaaagacttgtgatttaattcacac

SEQ ID NO: 26322 - DNA, 1539 bp, Bovine  19866881082470
  misc_feature (1)..(1): n is a, c, g, or t
ntttccccttcttttattaatccatagacctccactgggctgactattcttaatgtgctcattttacaggtgagaaaattgaagctggcaagtctcaaggtcacgcactcactatgtaaagcagctgggcctggaccccgggaatttgaagccagaaccctggctctgatcccacttctctattacctcaagggacacttaatgaaatacaaatgaaagatgaaagccatcctctttggaagtattaaaaataatttattgaggacaactatcaaagcagagttctagagcaggaaaagtctcattggaataaatgcctggttgcaaccagtgggggaaattatgaaatgaaattcttattaggagatgtaaactttgtattttttcaagggcaagaagtacatgattttacatgtatattttttacagtttcgaggttgatctcccacacaattcagttctaggaattttatttatttattatttatttttaatgatgatgatataatgataatacaactaaaaatcacgaagaaaaatagcttctctttgtaagttatgagctaaacataaatgtagctggatagaagacacgaaacaaaaacattggtagagaattaatctttgcattcatgtttgtggatgaggaagtatgtaaatgtaaagagcaaagctgaattaaaggtggtccaaaatacacaatattttaataacttgggtgaactgccttacaaaaacttatcagtgccagtaatttaacttaacgtaaataagatagagtcaattttgtcactataccgttaagaacaggctgcttcccaactagaggaactatgagattttaagcatgtctacatgacctggaaagtgtttatagtaactccaagccactgttgaattcaattaagaggttggtcttcttagaactctatatggtttcagtttcaagtgtgtataatttgaaaattctctaaaaactttctgcagcaattcctctttaaataacctgaagtatggaccaatgacttctcaaaattgcttgacatggtagagcgtcatggacctttcaacacggtgtgtcaatcctatgtgaaaacaggcagcctcaaagggcccccagttttggtctccgacaaagatctacagagaggacacaactgaaggatgtgatctggaagtctcaggaggtggtggcaggtggagccctgctgggcctccgctctgacagctgatccttgttgaacaaaggggaccaaggagcactgccagtatttatcatccacaggaaacgactcccacccgaatctatatcaagacgctctgtctacagacttaaaggcaatccccaccttggttgtatgattcagcatctgtttggacttagttaaaggtaaagttaaaaggcttttgataggcatctctcatatataaaaaagagacaaatatgtaaagctttaatattagtaaaattcttagtctaaatgtaatatgtgtgtgtgcatatattacatataagggctttatattaaatgcaattta

SEQ ID NO: 26323 - DNA, 1230 bp, Bovine  19866881123944
  misc_feature (1)..(1): n is a, c, g, or t
naaaaatggcattagttgttctacagatgcttttcagcaatttttaaaataatgctttatttgtgaagaaactcagttcagcatatgaacattaaacagcatatttccaagagttgctgtacactgtatcttgctgattctttcacctttcccactgagactctagtgatgcctggtatagcaattactttctgatttcagcacggatggtctcatctaaccctcacagcaaccctgtgggggtacttcagccagagagagagttgacctgccgcatgtcacccagctggagtgtgttagaacctgaatctggactcaggcagtctctcctctgctcctgcacttaatcactgagcagtatcagcttagatggagggagaagagaactcatgaaaccaggatccctggatttatccacagccttgcctgtctctccttgggatgtcactccacctatcacatgtttttcagtccctgaagaacgaatggccaatgcaactattttatattcttgctggacaggagaccacatctgctaggaaagggctctgagaacagtggccatcagttaggtttctgctccatggattaaatctgaccaaaagaaggagataatggaatcctctccccaaatcctgccctgtcgtgttatttaagatacaacttgttttgaggtataaagtcctaaaaaagatgcctggaggccgaaaatattcagaaaagagcttacgtctgcacggcgactttaaacgtatgtgatataaacaaaatgcaaaattagcctattctatttgcattctggcttaatgtacatgagtttgagcaaactccaggagatagtggaagacagaggagcctggcatgctgcagtccattgggtcacaaagagatggacatgacttagtgactgaacaaaacaacacattttcattcacacaggaaaagaagaaactttctcagatcttggacagattggccgctcaaaaggtcttagacccaccagtgatttggctaatcaggttgggaatgaaaccgtagcatgctcagtacaagagaaatgctgcattttagaaacacaggaaaatctggaaaagggacatgaggcacaaatggtgtcttgattcagctttaacagtctatctttttcacacagtcttcctcagagatttgatatttgccttcttattgaaagaaatgcatgcagtagtattaataaaaggaaaagacagc

SEQ ID NO: 26324 - DNA, 1266 bp, Bovine  19866881149114
  misc_feature (1)..(1): n is a, c, g, or t
ntcccgtgtttccttgtgtgtgctcagttgtgtccaaccccgtggactgtggtcctgcaggctcctccgtccatgggtcttcccagggaagaatgctggagtggattgccattttcctctccaggggatcttccagacccagggactgaaccctcgtccctgtgtctcctgtatcggcaggcaggttccatgtcaactgcaccaccggggaagcccatgacttgagccccgtctgcagtgcccacctaactcattttcccttttggacacgttttccgttattcaggtcttctgcataacacctgccccaaagtactctgaccagtgctcctcctgcagtgtttcaattccaacagctcttgtattttactgaactccataattttggtgttttgtaccctgtatgtatataactttttatcatttaaatcattttcttacataaatttgtgtggcaggtactatcttccccaattatcagacagaaaaactgaggctagatgagctgatcccaatttttaggctaaagatggaataggcaacgtttggatccaggtgttctaacttcaagccctaaacatttagtttgatgccaaaatattgtataaatatcacccattcagggtcttattttcatttttattaatttcaaattagaataaaatttatctagcagaagttatcatgtcttacacgtattctagacaaaaaatactaaatatacagcacatctcccactactttcttatgaactgtctcattgaatggaatggcagcccgctccattattcttgcctggagagttctatggacagaggagcctggtgcattacagtgcatggagtcgcaaagagtcagacatgactgaaagactatcatttactataaattatcatttcatcttacttatatgatgcagagtctatttcatctcatttccccaatgtaagttttgtttctattcttcagtctcagaagaggaaagcatacaaatatttccccagatataatgagaaagatgaatactttctgcttggcttaaaaggatggcctctgagccaatccttcatgataatctcatctggaaaatcactgggaagatgagaccagtagatggctctctaattcctgagttacaaaggagaatgaagctgacacatttcgctactggggaacagatttgattcgattgcaccaatgacaggaataaactccatgcacacttgctgaaatgggacactctctgctgtttgtcacgtcccttaa

SEQ ID NO: 26325 - DNA, 837 bp, Bovine  19866881210350
  misc_feature (1)..(1): n is a, c, g, or t
ngttagtcttaaattctttactacctcatcaagccccaaaattcagtcccgatgcttttaagattctacatctgaagtaataatatattttcttccatttttaggaaattattctgaaaatgctttgcaaagagggatttccaaaatagtctgagaattggggagccttgcagaaaacgtctaataaagatacaggtgaaaatgtcactcatttgacagttttcaaaatcaatcacttgagtttgtatccaaattttgaataacaaatgaggtatttgataaatgtccctttcactgggtaaatgaatattacatgagaaaccataatcccaacttaatggctcgcacaacccagagatgacaatgtccatcaccttgtcttctaaagagacttccactccctgtttcttcaagaacctacccagaaatgttccacaaggcttgctgttgataaacctctcatgccatgacgagatgacgagaattaacttcttgtagactgattgccgatcatgtggtcttagttcattataattatccttatagccctggctacagcgttccacttagttttccagagttacaattccctctcgactatgattagactgtctttgggttcatgggcctggaaaatttgaacagtccaatttaatgaaaaacaattttcatagccatctggaaagggtctgactatttctagaagttaacttttcatgtattaaacttctgaaagaaataattaaatcagctttcataatagcccatgtggagagtctgctctgtctgttccctccagcctgctgacttgtgtatctgttatacttcctcagtagt

SEQ ID NO: 26326 - DNA, 1753 bp, Bovine  19866881245495
  misc_feature (1)..(1): n is a, c, g, or t
naatagtttagcctagggagagtgagagagaaatgagactctaaacttaggtgtgagcaccagacacagcaaactgaggtaaaatccttggggaaaacaatatctaaggaactataggaacttggagtgatgcctggcttgacaaagtggttaaatgtagccaaaagcagctgaaagtctgagagccctgggaggaagcaagtcacagagaccacaggcatgggcagatttgttttagattagagaccagatgtttaattacctgacatttctagtcatttgcttaacttgagcctctcataagtctcttaaggtgaatgatggaggctaaacacccatcctattaaagtgaatgagtacaatcctcatagagagctagaattaagattagagctttccatgaggttgattctctgctttacaaaatagagtgatttttgcaggtaccattactttagcacaaattctaagcattaatcatttaaaccattcaaagcacatattggatagtttttccatttcctccaaaacaaggcatcatcttttgaaatctggaagtttaattgactaataatattggtgaaattttcattttttttaaacataaatcatcatttattattgtacttaagatttttatcccatcttctttcaaaatcatgagcaagtgttgccataaaaacataaacaaaaaaaaaaaaaagaaaatctgtactaaaactggtaatacaaaatgatttgattgaaggatcatcaacagaaggcttctgcatggtttagaaacgtgatagaaaggaaagagactgtgatatctagcttttaagtctctgtcctgctctcccagacaagttacctgagcatctaagtcttcatcagtgtattaaggataatagtaattaattatgtttctaatgaagatgaagagaaattgtacaaaatcttcctgtgaatcgtaatgcactaatgactaatgaagatcagcagaatttcaatcttcaaactatttggatatgaaaatataccttattttttttactatatgaattgatttatgtattctctggtggcttggacagtagagaacatacctgcaatacaggagacctgggttctatccttgggttggaaagctctcctgaaggagggcatggcagcccactccagtattcttgcctggagaatcttcatggacagtggagcctggtgggctatagtccatggggtcacaaagagatggacatgagtgaagggacttagcatgcacccatgtatagcagagagatgattctgtcatgttgaatagaaaattcattcttttcctcagggaagatgacacttggtcttgttgctgaagaccaagtcttctctgcattcagcaacaggagaggcaaatgttgtctgttgctaataatctgtggtctagttttcacaagaaacaaagtttcatgttgatcgaccatggggattttccaattgagaaaagatgggcagaatgtttgtggtctacagggatagacagttgagtacatgaaaccagggaagcttgggaagaattggggaaacttggtgatgggaagcctcaagtgggacattgttttgagatgaaaacatctgtccagaagatgccagaagaagtctgcctaagagaacgcctactgggagggtaactgctcgcattcccagaaggtctattgcattggaaccttcaccaactagctgggcttgtttgtgcatacgtggaaaattaatatca

SEQ ID NO: 26327 - DNA, 1729 bp, Bovine  19866881246381
  misc_feature (1)..(1): n is a, c, g, or t
ntaagtcctcctataaagttataaacagtcctctgaatctgaggtttctcatcttctgggtcaaccaaacctgggtcatgtagttttctagtaattatttatgttaaaaaaatccttatataagtggacctgcacaatttagaaccacattatttaagggtcacctatgctttttgccttaatctaatctgtaatttggtttcccaggtgactcactggtaaagaatctgcctgtgaatgcaggaagccccggagatacaggttcgattcctagatcagggagtttcctctggaggaggaaatgacaaccactccagttttcttgctcgggaaatttcatagaggaggctggcaggctccagttcatgggctcacaaagagtcagacacgactgagcattcatgcacatgtacacacaagcacacagtctgtaagattacagtgaagttcaaacttgttgtcacaggactgcagcactcagtacaagcggctgcaaatttctgtttatctgtctctaggctgcaaactttgtatgcataaggatttacctgctttatttttgagctccaatgcacagtagtctctcaatattgcttattgaataaatgaaagtgccttctcaggagcaaagagcaccactcattcttaatacacaaatttaattaagtcatggtcggtttattcattggtggttaggaatgtgcttgtcaacattgctgagccttcaggcattgttactaacattcaatatttctgtactattgattcctggctgcattagattaaaaaaacattacagggaaaaatgataaataaggtaaatgtcatacttttattctacaaaggaagtggaccttgaatttttttttctgttttaaggaaaacataaatattttatatcataaaaaatattttaaaacagagttcaaatatatattgttcttgtgaaaaaatagtatctagccttgcttttaaaacttaagtttgcttcaaagtattgatttagcatagaatgaacatagaaaatgtccacgataatacatttatcaagaaaatctgcttttcttccaaacctcccttctccatgataccatcattctggcaactctcacgatcatctacttctgacattttcgtttcttctcgatcttctcaaatctattcatatttatccccaagtggatgaaactacttttaggcttttcactgcgtgaaataacatgggttaagcttaagtaatttttttatctttctctctctttccctttctgcctttctcttatcctctgtaaaggaggaaaaattattttccctctgctcctccaggtttttggctaaggcaatctttgtaatgttaaggattatgaaaagatagagaagaaagattttttgccttactacactgatctttcttttgtatcaccaaaaaccaagttttgcctctagtgagttgcgtgtttgtgtaggatgaatgctttttattttacagaagctcgagtaagtctggagaactgcagtcccatttacagacgaggagtacaaggccacaacttaaatggcatgcctaaggagcacttgtgctagacttgaacttgtactcctgagtactccttgtacaagtgctcgtgcttgtactccttgtgctaaggagtacaaggccaaaacttaaacgtcgtgcctaaggccacagcaataatgatgaggagtaggaataacataaaaccattca

SEQ ID NO: 26328 - DNA, 1975 bp, Bovine  19866881266651
  misc_feature (1)..(1): n is a, c, g, or t
nagattgatatttgacctgtaacagtaggatgtaattgaagttcaaatgttataagttggaagatgttcctttggctaaattttctcaaactgattcaattaattttcaaccacaattagcaatgtactgtgtctcttcttaataagtaaacaagtccataagatacatacgtagattactaggaactctcctgggaatagcaatgcaattaaggtcataattaaagcattcttttatctgttgggtcctatgcttaaatcaggaaattaagacttaaatgagggcccagaggagaatagagcaagttattaaaataatgaagtaataaaatatataagaaaagactagaagaactgaaaattttgagaatagtaagctctataaattgttgctgttgttcagttgctaagttgtgttcaactctttgtgaccccatgaactgcaacacaccagacttccctatccttcactctctgctggagtttgctcaaactcacgtccacggagtcgatgatgctatccaaccatctcatcctctgttgcccccttctctacttgccctcaatctttcccagcattagggtccagacagtaagaagttcttacagactctgtactttatggaagcagaaacagaattaaggactgtttggaataaagttttccccaagtttcttatagagataatatctgacatgatttgttccagagtgacccaaggaccatagttgtactacctaattcataaatgtggcagactacatcaaaagtcctcttacctccacaccaaagctttattatttaggtacctttacaaaaaattgataaaaaggagtctttgaaccagtgtcaaaatcagacagacaagagaatcttgagagggcttcaagttcattagccacatcctagatttgattaggaagcagagaagaaaatttcagctgaagtctccctagctaaccccatggcgatgcttttgctaaaacaaacagggacaagattttgattctcatggacatagtgagcagcaagtttgtgtgtgtgagacattctttagcttgttttaatttagaatgtctctaatttagaaaaattttaattttaattgtttcgttaagataccattggtaacttcacattttataacaagattggccatttttccttttaaggaaaacacatcaatttaacagagagaaagtggctgtatttcacatttaatgttaagtggttcttatgactttgggaacggtctgggatgtctgtttaagctgcatcctttggaaactggcaataaaaataagggcttaatctgcacaagcttctttagagagttgctgtgagtaactagaaaactgaaatggccaggctttcagccttatctcatacagcaccccaggcacctggccctcttatttcctggcaaatagaagggggaaatgtagaagcagtgacagattttattttggggggctccaaaatcactgtggatggtgactgcagccatgaaattaaaagacgcttgcccctcggaagaaaagctatgacaaacctagacagcatattaaaaaacagagacatgactctgtggacaaaggttcatatagtcaaagctatggtttttccagtagtcatgtatggatgtgagagttgaatcataaatgaggctgagcactgaagaatagattcttttgaactgtggtgcttgagaagagtcttgagagtcccttggactacaaggagatcaaaccagtccatcctaaaggaaatcaactctgaacattcattggaaggactgttgctgaagctgaagctgaagctccaatactttggctgcctgatgcagagagtcaactcactggtaaaagaccctgatgctgggaaagacagggcatgaggagaagggggtgacatataatgagatggttggatggctttactgattcaaaggacatgaacttgggcgaactctgg

SEQ ID NO: 26329 - DNA, 1236 bp, Bovine  19866881275458
  misc_feature (1)..(1): n is a, c, g, or t
nttccgaatattcttcatgtggcacattttataatctctattcttgatatgaagctaagagtataatcataaaattgtaggtctagtaaagtattttcaagggaactgaaagaaaatggcattgaggtattgaaaaatctgctttttcaggaagctttaagtcagaaacttcattttcatgagaaaattgagttaatatgtaaaatgagcaatagaatgcacaactcatgtatgaaaggttatatacaaaatagttatgtaggtatatatacacacatgcaaacacacacatgcatatatcgtatatatgttctgtagaacgagagagctttctgctttctttgttattcattgtgtaacttaccaatgtacctggtgtccttatatccccaaatatattgagtgccaacaaaaatgaaagtgccttttcacagctgagacttccagcaagcaatagccagttatgggtactttggggactttctatggcagatttgttctctgtgaaacactggatactgacatttgaaataaagtgacattccttcaggtttgtggtgtcaaataagtatgcattgagttgagtccaggttcccatagctttcatcacattgcatgtagtagaggaactggaactgtggaaaattcacttaaagaaaaagaaaccagagaaatagggaataatcttatacctaagaggagtttcattttctctcttctcctctccactacagacttggaatccagctgctatattatggatagaaaaacacccccatggacacacaataaaaaatgagaggccaagcatctgtgtgcccaccccttctgcttttgcaggaaattgatcatgattacatgcatctgatcttaatggatagtccctgctctgagccccaaggagaacagccaaaaaggagaggaaaaagcaactcaagacccctgccaaaatgccaaaatgccctgaggaagaaaattgcttccttgggttaaatctgcaaatgattttggacttgtgtttatgtgcaaaaaataagtcaatagcattaatatctattccatttatgccaccaaatagtggtggtattctctccaaagtaaattttcataccaaattttcatttcaaatgctcagaaaattaacattgtataaaattccactcaaagggtcagtacacaaaaaatttaaaatttatcaaatattcatgaaaaacatagactacatagaaatatcat

SEQ ID NO: 26330 - DNA, 1522 bp, Bovine  19866881343735
  misc_feature (1)..(1): n is a, c, g, or t
ntgtttcggtttcttggctgagaggcatgtcggatcttaactcccagatcaggggtcaaaccctcagccccggcactggaaggtggagtcttaaccactggagggacgtctcctacagttaagctttttagcattgccgctcttctacatggtgcagttgggactggtttcctcctgtttgtaagcagtaaagtaaatatttgtgaggaacctcattttctctcacatgactttcaggtaagtgataccatttcatgaaagaaatgtaacccttcactcaggttatattaatagaaagcagttaattctctcttttttttttagaaagctttctttgtgagcaatatttttctggctcctaaagatatttgatctatttggagagttttctaatttacctcaaatttacatatgaagaaacactggatatttttttttcaaaaatccagcctttaaattttatcagactttccctcctctgaatgtgtgatttaagcaaatagggtgtcataaaacaggttgtaatctgtgatttcatgatctgttagataggactgctcttcctgtggtcaacggatggcagttacagacagatgaagagtaaataatgaaaaccaccattataaaatgatttcaggatagccatggttgactagtggatgaagaacagaacactgaaaaaattagttcagataatctaaaatatcattatcgaatcaatatgacctgatttctgtaattaatttcttaaacctgtgaactgctgtcgagtgagtcactgctgtactaccagtaacatggattgtttctgctaattaaatccatcctcaaaatgtttatttagagagtaaaaaatgagagacagagaaacagacaaactaatgatatccagttgtgtgaattttcacttctctggttgagtcggtctcatgcagacgtaagtatttacgaaacccatgtccagatacttggttaatgatgaacttgctctgcaattctttaactccctttggcttttctttccccatctgtaatgggtgacacctcccccactgagtcacttttgactttaaattatgaaaccatgccaaaactctttgcaaaaataaagtgttctatatgtgattcataatcaaaataatgatgttaacctctacagggtctcctaaaaataattatgcttatagagtccaaatcagtacagctggcttggattccatatttaaacccacattaagttatatgcatttgatcaagtaaacccagcttaaaggcaatagacaagctataggagagatggggtatatagttatgaagagaacaagtagaaagagtcagaatgtgttttttttttttttttgtaatttgtatacatgaacacaggtaatttcccaaagcagggaagcaattccttgttaaagagagagagagagagagttggtaaaaccaggtgggttaatgtcctttggaaaaacaatggtaataatttccatttgagggtattgtctgcaccagaaactag

SEQ ID NO: 26331 - DNA, 1149 bp, Bovine  19866881385714
  misc_feature (1)..(1): n is a, c, g, or t
ntaatgcatatacatgtgaaataaattcacatataagagttacatagcttaaaggacaggtgcatgggctctacattttaactcactctacctgtatctttttattcactccattgttatacagcatttggactccaggccgtatcttgagatgctccatcttcccaagccatcagcagttttccaaatgatgtttttagctttcttaggaacagacaatgaaaccaaaaaatgagttacaaggggaagataatgttgggtagttattcagagccatctctgcacagttcctttttttttttgtgggggaatgaatttcaatgattcatttcttctgagccatgtttatgccaagtgtatttcctgggatggattaaattgactgaaaactaatgtaagcagagtgaagaattaacaaggtttaaaataattttatttattggtaggggatagtaaatttggaagtcaattttccatccataaatcaggacagaggtttatttttccctgagtcttatgaatgtatagtgtgagaggcatgcattaatatattcagtaaagatttagttatattaagtaactgtcagattaccacggatgataatttatttctttgacatctactaatggtcatctcaaagtatgtaatgccatgaaagtagcttttattgaataactaactgataacagcagatgcaaagaatatagtttaaatgtatacacacgcacacataaaaacacacatatacacacatatatatctttgctaccatataggaggcagactaggagatataaaattatatgtgcttactgactataaataaggaacaactgtcgtattctcttagagcagcaaagtatccttccttcgccagtggcaacgggtggtaaggaagaagaaatcttgcagcaaaagagattgatttttggctgatgcgatctacataaggaagtcagttgcaggtgattgtacatcttgcaatttcaatcagaaagaatgtttttgtttgtttttttggtttaatgacaatcaaggttatatgaaatgcattccttaaattaatataaaaatataacattttgcatatcttataatatgcaatgctaatagaaggtagtgctggtggctgtgttgggtgttatgtt

SEQ ID NO: 26332 - DNA, 947 bp, Bovine  19866881397539
  misc_feature (1)..(1): n is a, c, g, or t
natgaaataaatgtttcccatgacaattttctgctgtgagcacagtaatgcagaacactcgtcctcaactctcacagcccaggagaattcacctgggagcttttaaaattcaggatgctcagggtgcatcccaggccaattaaatcagatgctctgggggtggagctagggcaccagaagtctgtcacacttcccaggtgattctaatatgtgactgaggttacgagctcctgatgcatgtgccatttcattttatttgcaatagaatcaagtatgtgatagacaccagttaataatagaatggaaagaatatatattatgcttttgatacaagagccaaaagccagtcttactttaattaatgaatcactaatgtttgaccctcaaattgtctggaaaattcaaggtaaagaaacccaacagtcatagctatttattagctcgtatttaatttgaataagtgcgtgatgtatgtacaagagatatttttataagaacaaaactttcactcttaatagagctcagtttcctgccgcctgtttcccgcttaatatcttaatcttctgtgacatcacaattaattcctatggagatggtgctagttacacagagaggattataatttcaggcaaatgataaacagcaggaagagaaggtcatttttcacttctgaagcaaaaacagcctgataggaatgacagccaaaaaaagaaaaaaacaaacaaataaaaaaatagttacttcagaatattatgaaactgtagatttagcttcttttgtgaaaggcaatttactctttaaacagttatctatcgatggcaccagcttaatgacttaaacggtgagtgttttgttacatcagatatttcattaggattactttaaattaagattactgatgtacctttgtggtttggatttatcagtatcattattgcggataatgg

SEQ ID NO: 26333 - DNA, 1560 bp, Bovine  19866880436823
  misc_feature (1)..(1): n is a, c, g, or t
nccctccactagcatcccctctctcagctcctctggcttcaggatgccagggatactgctgagaggtaactgctaacagatgtgaaaataagaattataaataaaagaacgattagaaaaagtgtgttgcggtttgcctcaacagtcagtatggtccaggggatggcaaaggatagcagaccccagacaagtaacccaagttacaagctctctcatctagcagtgggaagacctgggtttcactgggcaccatgaaaagacccttagtttgtgattcaatagactggaaagtccctaggacagtttaagcctgtgacgtacctggtgaaaagtcttcgtggacttttccccattcgttccaaacaatagcatggttcctctgctctcactctaagctctgagcagcctctgcactcaagagcgtaagcaaaccacaccagctggatgtggagctccattctgctgtcggagaagggcaagtccctgtaccatgatccaagctcaggtcctacctagattgggaacctccattttctctgggctcttcaactaggacttggaagatgaaacaacactgctggctgccatagaagatcaactggatcgaagcacacctcaccaaagtcatggtgcttcttggcacagaggaatctttgactcccccagaagcttcctcacctgtctctactcagaaatgttaacctatgcaggcttgcggctaaatggggaagggaatgggaagagcctgctcagtcagctgggctatgaatttcagagccggtgggccttagttcaaagtcttcacagcccagagagctggacctttccacaaggtgcttcacccttccctcctttgtcatcctgggggctgcagtttctgaacaggactgaaagggccaggggcttctggagccaggcagtaaaagactgaggcagcctcaaggtcaaggttaaggccaaggccaaggtcctattttcctatctctcactagaggttttagggatttgagaatccataatgaatgaatgaaagggacttttctcttgaggggataaggtggtgagagaacgacaacatccctcagcctcagcacctgcggaagtggagcagggagtcccagagtgctcccaccatggcccctggtccctgtgctgcagaggaactgactagttctgaaaggatgcccagtttatttcaccttctcttttcactgatgtttagttcaactggttagtatttagtgtttatatccagcctatttctgggtgtggggtggggttacagcaaaaccaaaatacccctaaaaatagagcagatccatttccttgcctatgctccaaacgtgacctttaaaacagatcatttctctgcaaactcctttcctgtttcactaaaaatgcccactcctggaagccctggccataccagcttcctaaaatgaagaaatataatgtagccatcaagttcctctctccccaccccactacagtgggtaggagaaagtgggaggaccattcccaccctaccccgacaatgagttcattcatcacaacaaggca

SEQ ID NO: 26334 - DNA, 1159 bp, Bovine  19866880444096
  misc_feature (1)..(1): n is a, c, g, or t
ngtatacctgtggcggattcatttcgatatttggcaaaactaatacaatattgtaaagtttaaatataaaataaaatttaaataaataaaataaaaagaagagcttgtccaatctgagaaagaaagtaaaatcccttatgttcttgctaatttctaagttacaagactagaaaatgcaattccacattacttcaggagagctgtaagcattgctcattgtattaaagcgaaagctctgaagttaggtctgtgttcaaatccctttattgaattctgggcaagctactaatttttcagttaaaaaaaaggtacccctttcacttgctctcaggatttactgacagaaacattcaggtcaagtgtttagcacagacccttggaacataggaaagttttaataagctctataagctttaactatctgaggattgactgaaaatgctgcatatttaattaatgcatttactccaagacattataaactcttccgttgttttcaatcttcagccttgtggaggaagatcattgaacagttatggtaaattttctctactgctattgttacagttaaataattatttaaatctattccttatcattcccactgcacacacaaaaatgaattgattctgacaaaagcttttcttaatttgctatgaaactgacaaagtttcttgacttttttcagttcagtattttaaaaatctctaaacaataaaattgagattaatttcataagattttttttcaatttaggcacattacatgtatccacttaaatatgaataatacttatttattctataaacccctggaggaggaaatggcaacccactccagtattcttgtctgaaaattcccatggacagaggagcctggcgggccacagtcctcaaagagtcagacacgactgagcaactaagcatggcacatacataatctaaggtatatatcatcatatattttaagatatctaaaaattcctatgcagaatcttagatttcttattgttcttacacaacattctcatatctgaaaattattacaactggctttaaagaaaaatcaaattagttgtcttcaactagcctttatttaaattttaaacttgtacattgcgaaaacataggagagaagagttttagaccaaaataaaggc

SEQ ID NO: 26335 - DNA, 697 bp, Bovine  19866880491237
  misc_feature (1)..(1): n is a, c, g, or t
ntctggatcaatacaatccaagtgtggttgtaggtacactcaacacattaacacaactcttggtatctgacactgatgaaaaataaaaaagggtaggtgaacaaacacatactcatacattattacgttctccagaagctgttctttgtggaaggaaacaagaaaggggaccttcaggaagctattgatggggactgggaaggcttaaagctatggctttggtaagcacccaagtgagctgtaggaaggcatttgtacaagtagattctgcagcatcaaaggataattctctaaaagaggtgggcattttctcagttaatctaaattctgaggctctcagcagttgagggctagaaacaagatccaaagaaccatctttgcaaccgcttacgaaaggtgactgtgccattcagctcgtgatgctaaatggtccaaaagcctttggtggtgtgatatggacaagaacaatattaatacacaaaccacataacaccattaaaactcaaaaaacattttttcatttaaaaaagttacttagaacacatagaacaaggcagcattcattcctttttctcgcccgcgggtgcggggtctgtcggcggctcctccacggcgggcgctgttgctctctgagccagtggttgctgtcgctggtgccttcctctgccagactgtccaccccttcctgcccactctc

SEQ ID NO: 26336 - DNA, 1091 bp, Bovine  19866880555117
  misc_feature (1)..(1): n is a, c, g, or t
ncttagtctgccccatggaaaaatgggcacagtgttgtcctaacaacttccctagagctgttgggcgaattccgctcaatgagatcaagaggatggaggagctctctgtgaccacaaagtgataagaaaatacagactttcttcgtatcggttcacttaatgatctctaactgggaaattcacacacaacaggggcctcatcttggtggtcaccagacatgaaagcctccagcctagacatcagtctttttctttttttttagtttatttattttaaatgaaacaaagatgaatattttaatgagagaaggtacaattcacaaagaatagacatcataaccacaaagacacctagcattagacacataaccgcaaagaaacaaagatatataaatcaaaaattcagaagaaatatagggaaaaagaaaaaaaaataatcatagtgagacatattaacgtttctctgagaatattttatcaagtgcagaaaaagtaagaataggagcatctggaatgatgccattaataatttaaatataatagactttaattaattatattaatcttatatcctacacaaatatatttaaaattctgtatgtcatatgttgctactagatagacatcagtctttagcgagggtagagagagacacttcccacgacaatcactggaataatctctgctgaaggcgtgggtgcctgctttgaccttttaagggtaatttttcccccagagatgtaggagtttagcacccctgacacatgagaacagaagtctcttgctttggctgcagggcgggggagcgactctgccacaacctgtgtgctcccatagcctccggtccctgacaggctgagcccacttctgaccacagttccttccaggaaaggaggtttcaaccacacttcgaaggttcttaccaacccctgattggctggcctagccagtgcctggcacagaatagatcaaaaatgttggtggaatcaatggcgaatttggggtcttcccacacctttgactcataagttttcactctgcccaaaaacccctgcactgcagagatctgtccgggccaccgggccctgcta

SEQ ID NO: 26337 - DNA, 749 bp, Bovine  19866880596648
  misc_feature (1)..(1): n is a, c, g, or t
ntacaaaccagtacttacctccctcaacaaaaccagacatattatattacgacagtggaattctttgtcatgtaatattttaagttgaatatgtgtattgcatatgttttatttctagatttatccagaaccacgctggtaaagacggtggttgaagaaatagatcaacgtggtaaagttctttcatcgagggttcagtccattgaagaaaagacatctaaaatgaccaatggcaagacaaaacaaagagttcccttctagttgtcacttttgagaaaagaatcatttggggaaagatcctgcaaaacttcattattctaaatatcaaggagataataaaaacactttctacccttaaagattagttacttaccaagaaaaaaataatcctgttgtcttagttacctttttatagaaagttgggtgtttgttttcaaataaataaaaaagtagatgtgcgcttatgtccattcactcatgacaaataaataattgagttattttttccatgtctaattcatagggaaacatttatggaatatattttaacttccttttaccctagctttatataatagtcaataccacatggcatttaaatattaaacattcactaggcataatctttgttgttgttgttgactcactaagtcacgtccaactcttagtgaccccagtggactggactaataacctgccaggctcctctgcccatgggattttccaggcaagaataccagagtgggttg

SEQ ID NO: 26338 - DNA, 798 bp, Bovine  19866880597919
  misc_feature (1)..(1): n is a, c, g, or t
ntatctgggatgtacttataccgaaaaatgatttgttatttatctgtgatccagatttaaatgtcttgcgtattttatttgcaaactctggcaaccctacccacgaagccacactttgcatttgaaccagaacttgctttgagtgatgggagttagcagtagcattctaagaaatatcagacaccagagaagtctatcttgcccattttcacttgtgttacttcccttcattagccagttgcttacactgagaatgatgacataaaaggaaagactagacaacctagagttcctattcctttcagtccttccttactcatcagttaacctaagtttactagaatgtgtatgtatcaggaagtgaaataaaaacaattgaattagttttgtgcagtgtttccactgttttcataggagctaaatgaatatacaagctgtgagaaaatcaaatagggaaatccaagaaagctttcctaaggaagcgatgtttgtggtgagatcttaaaaatcagtaggcattaaccaagtaaagcaaagatatgggttgtaaaaataagggcagagacctcgagatgatttgaggaatggattggggccagagtggctggagcacacatatacaaataagtctagagtgagtaacgtgacctgaccacacagaaccttgtaggctggctcagtagttgtcctaagcatatcgagaagctgttgcagagctctttgagcatctttaagacctttcaggctgcagtgtattgcaggagaacaaaagtgactgtgagaccaggttcagagata

SEQ ID NO: 26339 - DNA, 1475 bp, Bovine  19866880668547
  misc_feature (1)..(1): n is a, c, g, or t
ntaaaatggataaccaataagaacctactgtatagcacagggaactctgctcagtgttatgtggcagcctggatgggaagtttgagggagatggatacatgtatatgtatggctgagtccctttgctgtccacctgaaactatcacagcattgttaactggtgatactccaatataatataaaaaagtttttaaaaagttaaaaaaataaaatttatgctagcttcatatcagggcacatttaatctcttcagtgatctagtctgactttataaaaccatgttggtttttaaagcaaaagttatgttctttactccaatgtagtatttttacttattataattaattactttatgtttacctacttcagcctgaagtcatcagcagtcagtctggcattttcattttgtagagcaatgctggcattacaggtagtcacagaaataatctaaataggatagatggtgcaaaatgttaggtccaaaagtcaagggagattccagatctcattgtgattcttatcttcttaatccataaaacatctattttagtatcattttttcctattttaaagaaatctggattttctccagagtttaagagccaaatgtaaacttttccaatcacagacagttttattactcttcatcaaaaagtatgaggtaataaaagatcaatgaagcaattctatctgtttggaaacaatttctctttcatcaattaattctgcaaattcttattgccaggcagtgtgccaagcactgggaatgtagagttagcaaattcacacaaatttgctaagcatgttttctattacatcttttttttttttaaggttcagttcagttcagttcagttgctcagtcgtgtccgactctttgcgaccccatgaatcatagctcgccaggcctccctgtccatcaccatctctcagagttcacacagactcacgtccattgagtcggtgatgccatccagccatctcatcctctgtcatccccttttactcctgtccccaatccctcccagcatcagagtcttttccaatgaatcaactcttcgtttttaaggttatgcacacccaaagcctgtagtatgcatctttcttacctgccttttgagatcttcagtgactgagaaatatttactacagtcataagcaagttgtcggccagaaccaggcccatatttctcataccagcccttgattttctgctcgaggtcagcgttggcctcctccagagtacacacgtggtccagataggatgccaggcggtcattgaggttctgcagtgtcaccttttcattcccagggaggaggccatgctcattttcaagaaaaccagtacagacaccacttcccaaccctccaccaccatgagagaaacttcctctagaagaaacgcttccaagagggccagagaagctgcttcctgctcccaacccaccgcatgcatttccagccctgaagcctgt

SEQ ID NO: 26340 - DNA, 1302 bp, Bovine  19866880707421
  misc_feature (1)..(1): n is a, c, g, or t
natgtaaaagattaaatataaaaaactaaccaattacttccatagatacagaaaaagcactcaacaagatttcacatctatttctctttttttgccacagaaatagcttattgagaaaatccatcaagaaattatttttcctctgtgaaaatgcccaatacaataaatgggatccaggaagcaatatgaccaataaaatagggtctgaggtcttacagactttaatactattttgacaatagatgacatttacctgcccaaatgaaccaaattgttattcagccaaataaccataaaagcttatttattttcttttcattaggataaaaagtaggctttccatatctatgccatcggatctacctcaatacatgataaaatactgagcaagtgaatgccaaatagacagtttctgtgttattaccaggcactgagtgagtcaaacatcagttagcagcagcttgggacacagggctcaaggtgggctgagtgaaggctgtgaggttgatggtttccaggtctggggtgggctgggtagagttgagcaggaagcaggtgggcacatagggttgaggaatgtggcagggtttgggcagctgtcacggcaggttgtctccagtaaccaaaccatacgtgagcaggggctgggcaggcagactcatgcccagaatttgtcagaggagcagacagtagtggcggggctggtgggaacatgcagcagaggggagcacaataagctatggcactggaaacctggtttgcttttggtatcttggagtgaaagatgaaatatctaggatgaaatgtctcctctcactttggggctctttatatatctgcttcatcaggtgttgatccatcaaaaggcttcctctcgtttttatttatgccactgttttccactaaaattctctaatcaatttgacatttacttgtccattaagagtacctacccttattaaagtaattgtatttttgactcattgacttatcactttttgtcataagataatcacattttatattcacagggtcttggaatgccaaatcttacatgaattatggataattaatccaaaagacaattcagctatagtttcagaggctaaagtcttctcatttttttcttcttagctttaaataatatgtacatgatatgatttttaatggttaattttagaatatgcaacttaaatgattaattggatcaacaaagacatggctagctacagatgaatgttgcatatgactatatgcatctcagatgtatctgccttatttattgatgatataattcaattt

SEQ ID NO: 26341 - DNA, 1141 bp, Bovine  19866880764487
  misc_feature (1)..(1): n is a, c, g, or t
nggtagtagtggctgagggacgcagccagagctaaggggcatatttaggcaaccggaactggcttaaccccttactgcccatttattctttgtattaagcacctttgacactcttcttactgcgcttgtttaaagaagaatggttcaggtgggaataacctaataggatccctgtttgcccctttcccctttttttcctttctagttatacttcccttgaatcttcctatatcgactccattccatctaagtctgcgctccatcccccatcgccccgcccgattcttttcctcagaatccctttccctttctctagcttgatttctccaacctcaaggctgactgctaccggcccggtctcctcagagtgaaatcatgaaggtggtgaacctgaagcaagccattttgcaagcttggaaggagcgatggagtgactaccagtgggcagtcaacatgaagaaattctttcccaaaggagccacctgggacattctcaacctagcaggtcttaagtgaagtaggaaggaaggatgggagggctaaacccagaaatgttgtaacactgaggcttcctttgttattctccttgcagaagcactactggagcaggccatgattggaccttcccccaatcctctcatcctgtcttacctgaagtatgccattagttcccaggtaaactcttctatctattccagacaaggtttgaaggtgaaaggcttggaatacagttgtcagctcaaatttttaggtgaatttgtttgaacacatcatttccctgagcctcagttttcttgtgaaaataataatactccagtggttatgatgaatattacattaatttgctctatcaataaatactcacatatgccctggggatttagctatgaacaaagtctaattccagcgcacaggtattttgtgagtaatataggtatgtgaataagcagtcaatcataagatgggattatgatataggacagagtactatgggagtacatgggagggatacctaatcccaggttgagcaaccaggggaagaagtgatgtttaaaccaagacttggagtgttaaatgggaattagccaaggagattgatgagagtgtacaaagcagagagaaaagaatatgcaatggttgg

SEQ ID NO: 26342 - DNA, 1416 bp, Bovine  19866880793430
  misc_feature (1)..(1): n is a, c, g, or t
nttttcttgcaatatatttttgtagttttggtattggctaagtttagttgaggctttgtcaattttgctgatcttttcaacgtaccaacttttggttttgttggctttctctatttttcctattctctatttcatttaaataaatatttctagtctttgttactttcttccatctttttgaatcaggtttagtgtgttcttgttctgatttcttaaggtaaaagcttaggttctttatttgagatctttcttcatttttctaatataggcatttacatttaataggcattataaatttctcactaagtacatcttcagctatatgccataggttttaaaatctttaattgggggtgaggataattatttaacaatgttgtgttggtttcatcccataggtttttatatggtgtgttttcatttttattcacctcaaagtattttccagtttctttccctgtgaattcttctttgacccgttgattatctaagagtgtattgtttaatttctgcatatctatgaattcttcaaatttccttctgttattgactgtggtcagagaacatactttatatgatctcaattcttttaaatttattgagatttgttttatgtcctaacgtgtggtctatctacgttccgtgtgcacctaagaagaatgtgtatcctgctgttgctgggtgaagtgttctacagatatttaataggcccaactggtacataatattgttcgtgtcctttatttccttactgatctactgcctcattgttgtatccattattgaaagtagcatattgaggtgtctctgactgtgattgttgaatcgtgtatttctcatatttctccctccaattctgtcaacatttgtttcatttatttttggtctctgttgtttaggtgtgtgtctgtttacttgttatgttctctggatggatgaccctttttatcatgattacatatcctttgtctctgcaaacattttttgtcttaaaatcgatgttgactgatatcagtatagcctttccaatattttgaggggtaaatatttgcatatttttccatcgctaggatatttcctatctctctctgcttccagcacccggtggcacccccagccatggctgcatgtttttgaacccagagtccatcagccaacccctgtctctgtggtgccagcacctgatgagtaacctgcactttagttccaactcctgccctattttctgggctctggtagcactaccttttcctctgttcctccagttctagggatggtggcaacttcctgctgtttttaatatctgggtggcttcaccatccactgtttgacttatctgctcttctatcatctgtgtaactgactccctatgttaaattccttttgtctgaaatatctagagcaggtcttcttttt

SEQ ID NO: 26343 - DNA, 2954 bp, Bovine  19866880829247
  misc_feature (1)..(1): n is a, c, g, or t
nttcccttcttcggggatcttcccaatccgggattgaacctggggtctcctgcactgcaggcagattctttaccctctgagccaccagggaagccccatcatcaccttttaggtcatcataaaactcaagctaagggacttccctgctggtctcctggttaagactccgcacttgcactgcagagggtcccatctctggtggaggaactaattatcttacatgctacaagccatggcaaataaaataaaatagaataaactcaaagtagaaaggatatttaaaaaggttaaggcagaaactgtataaaacaaaacaaaacacccttcaaactaagcttttgagtccaactgttaaaatatactccaaacttcagggtagattattcataatcataaaaataaataaatttctttgacacaagagaatgagaaaactcaaaattcccttttgtatgactttgacattcatttgtgtcagtcccccaataaaatatataattcagtgagtcatttgaacacgcatttggtttaaaacaaataaactcaaagaatggaggtgacctcaaatagcctaaataaaagagggaaaggcttaggcaactgttttggtttcttttcagccccacttactttagtctgaagtcatcagctgtgagccttgcattgtcattttgcaggacaatattggcattgcttgttgttgcagaaattatctgatcaatggagaattagttatgaatgaggaaatatttttaaaaattcagatttccttgaaataaagtcaactataaaattatagcaatatttttggcatcctgtctctaataagaagatgattcttgaaaatggaaaatttaagtatagcctcttttactctctatcttacccattaaaaaagaaaaaaactttctatggaaaactttctatgtaaatatataactggagacattgggcagtttttgatattttagtatttctgaaagcataaacatgtataccacataccagatgatgagtaagccaagtttgaagaccagaattttaatataataattttaatattaatattaaatattagttttaatattaataaactaccgaaaattagcagctgagagcaaagccttgctgtgatcacttaggcatctgtgcctgtgtggctaattacccttataggtactaaacctcacggcactgtgtttcttacctggttcctaaggtcgtcaatcaccgtgaagtatctgctataatcgtgatcaagaccacggcaggaaccaggcccaaatttctcataccagcccttgatcttctgctccaagtcggcgttggcctcctccagggcacgcacgttgtccaggtaggaggccaggcggtcgttgaggttctgcatggtcaccttctcattgccagagaggaggccatgttcatttccagtgaaggccgtgcaggaagcacttcctccgcccagccccccgctgtagcttcccgcagaggagctgcctccaaaggcgcaggtgaagccgcttccaaagcctggcacactgcctgtgctgccgaccccaaagccggctcccccaccggagagccgcacagagccagctcctccgcaggagccaaggcgtctggatgcagaagaaaagcgcacgctcatggtgtctagactgccctgcttgttcctggaggtaagctctgatggcaaatgtcctactgaaacagtttcgtgtacctttatatacacattatcagggtgtttcttggtgaactctgctacccatagcaaaatgttgtttgtcagctcatctgaagtattcataattaggtatttttttcttaaatgaatgcctttaccctaatgtgtccattctgtaggtggatagttgccttggggttatttgttatctccaaaatgagaaaggggaggagtattatcaagattattatagggatgcatttcaaatttagcatgagtaatccttcctgtcttccaggccttaggactataaagttcctataagaataaaatagtgtgacacacaagtttctttttcccttgctcaaagcaataactttgctttttctctagtaagtgagccatcatagtcatggttttctatagataatcatgatccttttggatagatcaaaaataatttcaagaaccagtgggttcatggtaccagaggaagaaggccaggtacaaaatgaaaattaaggaattaaatgggcttttctttgaagacagatagtcttctcttgattcttatccctcctgagttacatctttattggttttctgtctaagctcttttctaaccaggttaaataacagtattggcgtttttagggcagtgaaactgttctatgtggtattatgttggtggatacatgtcattatacgtgcgtcaaaacccatagaatgtacaacacaaagaacgaaccttaatgaaacggacttagttaatagtaatatgtcagtattggtccatcagttgttaccagtgttccccacttaatgcaagatgttagtaataggggaagctgtgggggaatgtagaggaagagattgggaggagtgggtatatgaagactatctgtattttctgttcaatttccatgtaaacctaaaattgctctaaaaaataaagtctatttttaaagcttgacagagtcttgatgacatcatttgtcattgctatgcctaaaattagcctagtctgtggactatgcagctacaagtcaatgcattctccttttagcttaagcaagcttgggttcattttctgtcacttgtaatcaaaagaagttctgataggtttggagaggaaatccagcatagcggtcaggtaacaacatgcagagatgatgacagaccgaggcccagcagccatccaagacgggtttcaacaagccggcggtgccaggttggagctgctgtggcgttggggatccgagca

SEQ ID NO: 26344 - DNA, 1518 bp, Bovine  19866880843076
  misc_feature (1)..(1): n is a, c, g, or t
ngagaaacctatgagggatactaaaagtcttcatggtaattagccagggaaggatggtgagcagtattccagacgaggcacagaagcaagaaacattatgatggtatctcataactactggagtactggaaagggaaagcttcaagtaggtaccctttcagagatctttcaatctggacattctgcagttctctgcctgcttccccatagtccctgactcttgtaggcttttcttggaccagtgctgtatttcttggtggatgcttccataggctccagtatgcacattaagtactcatggctgcttctgctccctctgtaattaagataggtaggttgttcaccaccatcccttaaaagctcgctgggcacttgttaccattggttatgaaagacaatttttaggtgcccaggttatagaaataaatagcaacagtggaagttgcttcctaggttctattgccctattaagagatcagaaataccagctggtaaaaaagcctcaattctatggtaacactttctccatttgtggcagcctatgcccttcattcttacagttttcatctcctagaaagccttcctcaaatgtgttcccttgccctctctctgctatagaacctgcatctgtctattgggcttccctggtggctcagctgctaaagaatccgcccgcaatgtgggagacctgagttcgattccttggtggggaagagtccctggagaagagaacgtctacccactccagtattctgggctggagaattctatggactgtatagtccatgaggtctcaaagagttggccatgactgagaaactttgacttttctattactccttggatgtttttactggttaggagtttgatctcctttcagacttcctgggttcaaattccaattcttccactcactagttgtgtgatcttgggcacatctccaacctctctatttctgtctccatattagtgaaatggagataattccaacttcatggggttcctgtgagaattaatagggtgatataggtaaaataccagagctcaaagcctggcgtacacataagtattagcttttataccctatatgaatcaactacaactaacttgattgtaatattgttgttttcctattacctggttttattgctctatttcatttgatatagaaggatgagagataaatgcttaccatcacctagaattgggttctggtttttaatggcgcctgaggcttaactgggttattagctttggaagctggcctgtaaattactgctctaatttatattttttcattaaaagctcagcttgcctcttctatagagatcttctctggtcctgaaacccttgtgtttagccattaaaaaatatttttaaattaaggggccataattctctccactccccacattgtgtggatcaatgggactagtgatgggaaggtacacaaaatatcatattcttatctgtaacaaaataaaagcaaaggcctggccctatttctcatctttgaaa

SEQ ID NO: 26345 - DNA, 978 bp, Bovine  19866880844116
  misc_feature (1)..(1): n is a, c, g, or t
ncttttgcatgcctatgcagatatttttatttctgtgttttcctcgtttgagctcatttctcattcgtgtttttgtctcatttgtttccatcagcaaatgcccagcacaccagggtttgtgggatacaatccatacagtcatctcgcctacaacaactacaggctgggagggaacccgggcaccaacagccgggtcacggtaggagaatcaactcttacagcatccagcaaacaactggaattgaccagaaatgccttcaggtttaggtccttttgaatcatcagcacagccatttaaaaaaaaatttaacctggctttcagattattttaaatattcattgtacaatcttatactgaaaaacaaacaaaaaaaaaatagtaagatctggatatgtatatagaagagaaggagaatccattctgtttggtgattggtagagataaagccttgggcacttaatgctagtactctatgtagacaaacctaggatttcctatggttaagatgccctttttgaggcgaagagtatctttcatttaaggtatttggcattaggttcaataactattttcttaatagagactgggcttatagacgtggcctttttgggctatcctaccagtttgaactgctgcacacaattatttgtcttttggatttaacagttgacgtaactgagattcgtttctttctagttaaaaagatacttgtgccaattcaaagaattgcagaatgaaagctgaaggaaattactttgagttaccagactatacatatctacaacccagaagtacatttatagttcagagggtaaaggatatgatttctgaaactttagatgtttcacttaaataatcagcctgagataccaaaattgggatgatgtacttcaaacttttttttttaacttcagactttttattttaaaattatctttaacttcatttaaggaaatttaaggtacccaaaaaacaaa

SEQ ID NO: 26346 - DNA, 1217 bp, Bovine  19866880985142
  misc_feature (1)..(1): n is a, c, g, or t
naatgcaaagtaccaacctcatagaatggttggagggttaaatgagtaaatatacataaagtgtctaaaacagtgcctggaaaattttaaaggtagtaagagttatcattaccactatgacctctgcgacctataacatactcgtgtagcctaagaaggatcaaaagcatttgagagaaaatgttgtaatgggctcctggctcctagtgtggttaagagaagaggctctgagattgaaccacttggattcagcttccacttttgcctcttaaaacttgtatgaacccctgttacttgatctgagcctcagttttcctcatctgtataatggggtcagtggagggatttaccccataaggttagtgtgagaattaagttagcactttgcctctcacaagatgaatgctcagctattattcatttagacattctctataggacctaatgtggctttcatggtaatggaaatgcttagtgtaatcttgaatgcttttcaagatattcttgaaaatatcttttcaaggtattcttgctgcttgggtgaagtgtggtacagagaagggtccagctgaggtgtgcatcctgggaaagtttaggatagttataaaatgtaaagtctgagtatcttcattttaaatgtgatggtgagcttggaaaatggcccaaatcaaaaaagagttagtgggagaaaatatttgtgaaccatgaaaccaacatctcccaaaatttgcaagcaacttatgtggctcagtttttaaaaaaacgaacaacccattcaaaaaatgggcagagggcgtaaacagacatttcttcaaaggagagcctttggtttgtaagttcctctctcgttctgctcctttctgtcccccctctctctttgtctctggaggatgctgcaggatcatgcccaagcccagaaaggaaggtcaggacatcctagtggtacattacaaactgttgacctatcacttctgcttctagctgggtaaacagcatccttgaaaaagggaaggaaattcagaccttctgctgcatgaactgtgggtttgtcctttgggttacagaataggggatagttagtatcttaagcatgattcttcagtgacaaaacagagtggtcttgcccttacataccaggctctgctgtgcttgaagctcaatttccagagtgttggctgtgcgcttcagttccaagatctccgtctggcagccctgca

SEQ ID NO: 26347 - DNA, 1208 bp, Bovine  19866880985718
  misc_feature (1)..(1): n is a, c, g, or t
nacagaatagctggcttcattgccatccccctgcaagatcccaacagggtccttcagcctctctttggtcatgtccagggtcagggaacccattactggagagggtgaacaatctactgttggagaaccttgactttaacaaagttttccctggatctctagtactggtttcaattcttccctctggtctagaatcggtgtattgatgcatcaacaaagcacttattcaaataaatcttatctttgaaaacagtgaccatgataaacattcctggcttctcatgatctttcatacagcatactctatagatcttaaaatgaggtccccagaatggcatttaaggctctgtacgttcatagactctatgacgcaagggctcaaaagcccataaaagcagaaaggacccctccaacacttgtggtccaatactggattctgtatcaggaacacttggggtgaagggcttgacctctagaaagtgacactgttcagatacctcatttcctagaaggtgggaggaaaatcttccttggtaagatcttttttcactccattagagcccaccatattgcttagtgatcattctagagagctgagaacaggagccttggaaaggagtgcagttcagatggtggggagagcatggcagtgacctctttgttgctttttctttttttaatttgcagctccaaagatcaaggccatcacacaggagagcgtcaatggaagaataattctttctcaagtgaatgagatctgaaagtacaagtgaggccaataaaaatttctgcctgttgtaaaaactatttcccctcaatggaaagtccttgcccaggtgaattctaagaggtttccttggagttaacaaactcagaaactttttttctctgtaacaatcccaccataacgatcttcatatattgctgcactttttcaattgaagtatgagttcatgagcttaaagctgtactttactactacagttgtcagattcccatcattgtacaagttttatagccaataaaactccacaccagctgcatcatgtcctttttttttttaatatcacaaggcaagacaaaacctcaagataaggtcagtcttgtcttgacaagacctctttatcctaaaaatggatcctcggagcattgtccatgaaagagcgacagggaccttaatgctctgaaggtgtctgcagcaaacactg

SEQ ID NO: 26348 - DNA, 1977 bp, Bovine  19866881023533
  misc_feature (1)..(1): n is a, c, g, or t
naaaaagttgaaactaggacaccgaaaggaaaaaaaaaaaacaacccaccaaattcacacataattttctcaggattactttttttcctcctggttacagaagttgaaagtccatccagatggaatttattttatttttatagaatggatgtgggggaacctctgtaggccagcattgttgattaatgtggaccccgttcctacctcctcgtggttcttcttcaggtaggccagctcctcagtgaggctctcaatctgcatctccaggtcagagcgagtcatggtcaggtcatccaggactttccgcaggccattgatgtcagcctccacggtctgccggagatgcagctcgttctcatatctggaagagcacagtacagcccatttcaaagagcacagtgcattctcacatatgcaaaaaaatgttttttctcccccgagcaatttgatcaatgaacgataagttttctcttaggagttttccccttgtaaagcaaaacctgaactgtacattaactctattgatggccaacatttttgataacaaaaatttcatcctgaaattgcctttgttctgttcttgtttgtggaatgagggttttgtaaaatgtacccttgtgaatttaggtcttgatcccataaaagatttctttaaaatttagaataaactaagccaagggattggattttatttttcctacaatgtttgttttcaagtcttcacttttcttacttcagtctgaagtcatcagcagccagtcgggcattgtcaatttgcagaacgatcccagcattttcaatggtggcagtaatgatctagacaagacaataatagtgaataaatcgtggttgctttttttttttaaacctatgtctacatgcccatctgtgagagtagatgtctcctgagttaacctttaaaggtgacttgctttgaaaatttgcttagtaatgacacctgcattgatgagcctaatgtactttagactaacatccttctgcaaaaattagcagcctgcacatttgctggaatgagcatggaacattgtttcccagaacacaatcctctacatatttttgctgttttggaagatcagttattctatgagctttttcagaaaatagtgtgaaacatgaatttcacttccaaaagagtctttaaaactatatttcccatacaactatgtctaagcatgttagactccatcacattctcaaacaatatttgcaccaggttttctaggaagaaaaatatctgtaaggctatttaaatctagtaagaggctaaaggacaccaatctgccagaattaattgtgatgaaaaattagaggaagatagtgtcgacttatagccatcactcttaggttaattagctgcctggcattgtgtaaattctactcttctgtggaaatactcaaatgtgagatgcaaacaaaattaatatgtttggatgtgttgtacacagtgtcacagttaaagcacaccacatcccgttttatacatacaacaaaacaaatatgttttcaaataattctgtgacttaaagtcatcattcatgatctgaataaatgggaaagatacagaaataatagaaactcagcatggctagtgtctcacctgagtcctgacatcttcaatgactggatagtatttgctgtaatctcttccagctccaccatctccagacctgggcccaaatttctcataccactccttgattttgttctctaggtcagcgttggcctcttccagggctctgactttatccaggtaattggccagccggtcattgaggttctgcatggcttgcttttcacctccagagaaaaggcccccgtcaccaaggccgccacccacgccaccacccacaccaccagcatagctgtagaaacctccactagcgcctccagcgtatcccgcactcccgccgaagccagaacccccgccaaagctagagcccccaccaaagctagagc

SEQ ID NO: 26349 - DNA, 1542 bp, Bovine  19866881026021
  misc_feature (1)..(1): n is a, c, g, or t
ntctgatcgataacgtggagaaccgctggctgagatccgctgcgacctggagcggcagaaccaggagtatcaggtgctgctggacaccaaggcccggctggagtgtgagatcaacacataccaggggctgctggacagcgaggacagcaggcaagttccacacgatccctcttaaaatcccccagagtcacaaagaggctcttgaaggaccatcctgtttcccaaagatctggccatattcaaacctccttaaaggtgttaaaggatattcttaaagagtgatgaaaagcagcaaggctagtcacatgacaattgaaatgttcaaaatgttctaaatttccaaggcagaaaaaaatataatatgtaacatttcaagctgggactttcactttgctcctgacttcaggaaactcaggagaaatattccagggtactgaatgatttaactactagacaaatgacaaaatatgcataacttttggctaatgggacctaaataggtattagaaagcaatggaattaataacactgctgtatgtgatatattaacatgaaagatgttaagagagtaaatcctaagagttctcatcacaaggaaaaaatatttttccttttcttttactttatatccatatgagctgatggatgctcagtaaatttattgtgctcatcatttcatgctgtatataaatcaaatcattatgctgtacaccttaaatttatacagtgctgtatgtcaagtatatctcaataaaactggaagaagaaaaaaaggaaagtcagtaacacacataagatggcatttgccaactaaagaaaatacataaaacgtttatccaactgtctctgctacagtgaacatgaagtgacaattctgggtccagggataaaacaggcttcattcaaatgttattctgaaaacagagttcaaaatataatttgaagggcaaattttggcatgatttttttctgagttgacattttatccagcttctccatattgagattagttaaaaatggatttttcacaggcttccctgtaacccatgttctgcaacaagcatgtcaaatgacacttgtgagccatgttcggcgtacgtaatttgcacagtagaaaacagctgtccctgaaggttaaacacccaacccagcagatggaggaagggaagccagcagaatccttgaaagaagacggtgcttcaatcagggacatccaaacttgaaattcaagttaagaaggcttttgtattctaaaattgtcctctaagcatgcacgaagtatctctattctgtcatttcctctcctgcttgcttatttgtgatattctaggagtctgtaaagctttcttgctgctctccaataaaatgttttcattcctttagcacgataaatactgccttgtagctcattactgttaatataataaccatttgatgccaaggtaattgtctaaacccatgccagtagtttggttttgcctaaacccagaaggaaaatatttgttaactcctgaatacaaatagattagctattcatataaa

SEQ ID NO: 26350 - DNA, 715 bp, Bovine  19866881026505
  misc_feature (1)..(1): n is a, c, g, or t
ncccccagaagagggacaaacaagtcaccctaaatactaggtatcatccacctctctcccagagagcctgcaggagggcagaagcctcagggcaacaccaggagctcgagctctgaaaaccaaggagcccagggagctggcatggctgggtggcctccctgatttggtccacacccccttccccagccatctgggctgattctattctggcctgggccacactctgggatctctccccttccatgcatatagccacctctatcccaagcttatagatcttacaaccatatggtctacacacacacacacacacacacacacacacacagtgggggtgtgtgtgtggggggggcgcttttccataggtgttgaggtgttggcaaggatgggaagggctctaacctgaaagaacgtccccccaccccagggaaaggtcacccccaaacccctaaaaagctcacaatctccactaccctcccgcacagcctttggccactccaacgtgccatgagcctggaagcgggcactgggtctacaaggagagtagggattcgggggcaaagtcctgggctcttaaggctggaggggcggggagggtaggcagggaggaagcaagagagaaatccccagggagtcttggcttccccagcggtctcccggtccggctcccggtcaccttagcgtgccagttctcccctcgaggtgaggtggggga

SEQ ID NO: 26351 - DNA, 1938 bp, Bovine  19866881033740
  misc_feature (1)..(1): n is a, c, g, or t
ncaccctccagaaggctcactgttctgtcttctgtgcccctcccaacccgtagcacttgttcacacctctaatctctctgcaaccaagagagctgtgtgcacatctgtccctctgctggggaaagagtccccaaaggcagcatcctgctcttgttcctaagattcccgccccctcagcaccaactgtggcagctggcacacagtaggcactcagtaaatgctggaatctaattgaatggcaactaactaacctgaattagggacagcctgtaacaaccgccaggctgagatacaaaaaccaagccatgacccagatggacagattctaacttgtacgcaatgcaaatatcttgttcctttcctgtagaagtttctgagcttctgtcatcaggacctccaccccaagtcctgccactttgccaaactcaagtaaacatgttcaacgctgggagacagaactttggtttggctcagccctttccccaccccatgagacagagtcaggaggaccagacagagctcacctggatttacgggaacccactgggtggggataggatttttcatcctccagaatgacacatttagctctggggctgggtgaggcaggatgctttctctgttattctcctctgccttcttgggcagtagatgacagaagaaaacatttggggccctgacctctcccctcttcctctctctgtcttcatctctgacccaggtagggtcaggccaggaatcaagcgaaacagagatataacacagtctgtatgaaggaccctgttctgggacctcacatagactgcccatattgggtgtcactggtgtcacaaacaatgaatataaagtccctgtcctccaggagcccccgggctaatgggagacaggatagggagacacagcatagtctcagctttcaagtcgctctccagctaacgtggtcaccgccacactcaggaaacatccaggccagagtgggggactgtgctggtgtacataagcatcatccagagttaagtagatacagccccagtcacggcacctactatgtgccaagcattcgatatatgtatcagtgttttcaaactgtggtgctggagaagactcttgaaagtcctttggacaacaaggagatgaaaccagaaaatcaatcctgaatattcactggaaggactgatgctgaagctgaagctctaatacttcggccacctgatgcaaagagccaattcattggaaaagaccctgatgctgggaaagattgaaggcaggaagagaagggggtgacagaggatgagatggctgggtggtatcattgactcaatcaatggacacaagtttgagcaagctgctatcaactcaaactactatctcgaggagacagcaaagaacaagaaagcctggagtgctgcagtccatgcgatctcaaagagtcagacacgacttagcaactaaacagcaataacaacatcgtatacatggtcatcatccaagtggtgcggtctcaaaactgtgttatcatcaggggtggcaactgaaaaatgacaattttgaaataactaggtttgtttacttgaattcctgaacctgaacaaaagggcttcacagatcacagcgatgcttcttcagtctccttgctcccaccctctttctcctcacacattgcagctgctcccaaacctccctcctctcttagtcttgctcctgctatatctttctctctctgtcttcccaactctacaccacatttgtctaaggattattctgacaaatcagacgcctcattggaggctgagagaggcacagaaatcaagaagatcaagccagaatttccctccagtgtgcacggggaagggaatgcccaggaaagaatgtgtacttgggtgctaagtcgcttcagtcgtgtctgactctttgtgatcacatagaccataggctcct

SEQ ID NO: 26352 - DNA, 1067 bp, Bovine  19866881061699
  misc_feature (1)..(1): n is a, c, g, or t
ntggagagagcctcccgttttccgggggaggggggcttggcgggggtggaggtctggaggtcgcagaaggaaaaccagtgggatgggagcccacccctcaatgctggctcaggccccaggaaggggagggatatagggggctgtggtccaagatgagggggaagcaaatgtgccatgcagacacagagatatgcccacacacacatgcacacccagggacacccaggcggactcaaggacaggaactgctggacacacccacatggggacaagggaagaggcacgctgccactgcacaggggagctcagaagggtgggacacacccatgggagaccaacccttgcataggcatagggtcacggggagatgctctcatacacaacaaggaggagtcgctgtcacccacacagaaaaagtcactattgcctgcatgcatgaatgcagagcaattgcacacggccacacattacaaaagaccctgtcactcacaggcacacacgtgctcgcatgagcccagtcacacaggcatcatcgccttgccgtgacagtcgctgtcactcggtcaaacgcaaatgcagttgcacatcaacacacatatacacaactcagcaacaagtattttcctggactcttcctgtggctttctgaggtgctgtgtaccacacaaaaaagaccctgctcccataatggtggaaggcacgcagtcactatagataacattctctgtctctttcccttgtcatcccaccccctagatggtgagctccttgagacccaggagaatcactggaattgctctggatcccacccagagccaagcatatgaagtgctctgtaatcctttgtaattgattgactgtgggaaccctgcacacaggtgcaggcatctgcacacagtcccaggggctcaggtgcaggaggcactcagaaggttcaggaccacacagtcacaggtctacacccctggatgcacgcactgtagctgtgcggccaggcacacccctagatgtacacgcagtcgtagacttttcccctcaagcttcctcctgccttctttttccaggct

SEQ ID NO: 26353 - DNA, 1918 bp, Bovine  19866881090241
  misc_feature (1)..(1): n is a, c, g, or t
ngacagtaggagtccgtgggctactgtcccagggttgcaatgagttggacatgactgaggcaactcaacatgcacaagaaaatattcttggggttccctggtggcttattaataaagaatctgcttgccaatgcaggagacgtgggtttgatccctgttccaggaagatcccacatgccacctaagcctgtcacaactgttgagcctgtgttctggagcctgggagctgcaattactgaagcctgcatgccctatagctcatgctcaccaacaagagaagcccccgtaccatagctagagagaagcccccgctctccacaactagagaaaagctcagaacttcatcaacaaagacccagcacagcaatatataagtaaatgaaaaaactctttaccatctgagccactagggaaaagaaagaaaatatccttgaatacttttgtttgtgattattttaagctcttttcatcattttccaggaagttatcttttctactgatttctcctctcatgggtctcctggaaatgcagtcccctcttgagttccagggttacccaggatcttacctgctcctgcaggtggctgatgctttcctcatattgggagtagtcttgcttattgcctgaatctctttgctgatgccacttcaggatgcagctttctagtttcacattggcctcctccagggcgcgcaccttttccaggtaggtggccaggcggtcattaaggttctgcatcatctccttcccatttccgcctaggagggagctgcctcttccagacctccaagacccttcagggagtggacagctcggtgaggagaaggaaagagagatgcgaacacccccggcaccaccatggacactaggagcccgggggaagctccctggccggccccagctgcctcctgtggcatagagggaacctgagcgcttctggctgaagctctggttggaattcatggtcccatctgtgtctggggcaggactgggctctggtccactccctggcaccacaaaactgagccgccccagactgccccagatggctttatgccctttgctgtgggagttcccttttctgacagctgtaccgacaagatccaatcattgtgcaacacgtgtttcctcttggtcaatcccgaagcgcccccgggccttcacacacgggctgttgtttagagtcgcatcgatataccaggttgcttctcccttccagtggtaacctggaggtgtggcccacggccttaggtgggtgttagtctcaggtgtctttccagtctgtctgtgggttttttccattgtccatttatctggaaaagctctgattaaagtccacagaaaggtgatttggggtggcatagatttcctttgaaaaagtagacattaaacacacaaacacacacctgcccctacccaatccccaaataaacacaccccagctctaaagcaaggatgggagggactcgtgatgcaagagccagatcaggacagaatctcaggtcctggatgaaaatacttgtgcagaggaaaatggagacaattctgaatatctgatcctctgtcgcagccgctgttggatggaaagtaatttcaaaggaatcattcttaagaacaaacccacaattataattaatgaatgaatgaccgaatcttccacttccaggctgcctttcatcccagcacacctcaaaaccaaacaaccccagcctgtgcccaggactttcctcggcccctgggaggcagatagcctttgttaagtggccagcagctctgataccactgagccctggaaagggcatctatggcctgcggagggaacagagggaaacaggaaatgtgccatgggttgtcgaacacgccttgatgaatcctttgctttggctgccaaggtaaatgttaggaatgaataaagaa

SEQ ID NO: 26354 - DNA, 656 bp, Bovine  19866881099724
  misc_feature (1)..(1): n is a, c, g, or t
nctgttagggggagggggcgctgtcctaagtcgccgccgccgctgcaacatctgaaagtccttttctgccgcaggaggaagcggcgcagtttggaagccacggcaggggccgagagcgcttccgaactggggccccggggggcagcgaagggtgaggaaaagcgaaggcgctgctcctcggttcccccacccccgaccttggaggattctcccccggacccctgagatggcctgcggtcccacacgctgagagcgcgacgacctcctggccccaactcccgagtccgagattaagtctccctggccggagagagtcctttccaccccactcaagggcttctcgtctcagccgctggagaactggtccggggaggaggggaaaaggggcccagaaggttctgacggccctaagaagttaatgggctctctcctcacttgcctcttccaacctgctccggcccccagcctcctcggcggctcattggaggccctgtcccgtctggcttacccaggatgaagtcaacagaactcccacctggagagggagatgcccagacgcttgctccttcctggatgtttgcttctactgccccaaatcggctgaggagattgccactctcaaaggcaaagtgtgcattgcacaactccagggggca

SEQ ID NO: 26355 - DNA, 1354 bp, Bovine  19866881102021
  misc_feature (1)..(1): n is a, c, g, or t
ntcctagaacttatgaagcccctcctcatccccacccccaaagcttggctcagctgcaggtggccaaataggggccaactatgtctgttccctgactcctggagtggccccaagtggccctcacctttggcctccttggccttgatagacggtgaggttcctgctctgggggttgggagggggaagggctggggctcagggttcccgtcattgcaggcctggcagctaccctaccggctgcagatggctcccctgccagcctggcggccagcgcaaatgctttacagctgtacctctatggacttgcctgagagcctggagtcagaggcagggagctggggacaccgagctgtggtgggtgggggacaggccaagacagcagtccagcaaacccatggtgctaagatagtgagggcaaggaaacttgagatccaggaaaggcttccccgacgtgcagggcttggagtggaagcttcccgaggaaagatcgagtttcgggtcctggaaggtccagggctcagggtccctgtcttccttctgggtcctggtctctgagcagagccagaagcttctaagttgaagcagcagggaggggagcctgtcctcgtccccacccaggggaaattggaccagactgctcaggaaacaaattcaattttccagcatcatggaaggttagtcggacaatagaggttttttccccctaaaaacataagaaaaaaaaaaaagtccaattgcttttggctgaactgtttcccaacttcatttctcagcctcagttcaaggcttctcattcaaagtgacatgtgactgttcagtgaccctggcctgatcgccggccttgtgaggggtcaggccaggccagcctggagctcctgctcccggggtctgtgaccacccccacttataaaagccctgggcgggcccagtcctaagggagggactgtggtaaaagcaaaaagcttctcccgaagagattttgaatttagggctgagtgctaaatcccaggcaacaggcccagacgggtttatattaaaatgtaaacggacctgaaaagctttggaaagttttcttttcgaggggtggggtggggtgggggaagtttgcctttaaaatgcaaacagaccttgtaaacccctgcttgggaaatttaatggggctggaatgaggggagctggccttgcaggctagggaagggccagcctccagtcgtgttcgctgctgatggtggccttgtaggggaccctgggcactggcagaggaagagaggtcagcacaacctaaagaagagggaaggcctgctaggagctgggagagaacagggcttcccaagaggtagattcggaagttcta

SEQ ID NO: 26356 - DNA, 1198 bp, Bovine  19866881106740
  misc_feature (1)..(1): n is a, c, g, or t
ngttcaataagagtttcttgactgaatgaaagaaggtgctggaaaatgaacagggcaaatgttataccctgcagtgaacaatacatttttcttatttttttgtaaccttgatgggctgatgtaaaaagaaaagaactataagaatcttttttgttgttgttaattattctaataaagtgcttcttttatttttttgatgtggaccatttttaaagtctattgaatttgttacattattgcttctgttgtttatgttctggatttttggccatgagacatgagggatcttagctcctgactggggatcaaacctgcaccccatgccttggaaggtaaagtcccaaccactggactgccagggaagtcccaagaatcttcttgacttaatctccagcctcaacatctttagctcagtgtttatcgacttcatcagaagtatttcacaaacctctctctacgcccttgactgtattgttggtgtcaagaaagtacacgtttcacattattacctggagaaggcactggcgacccactccagtattcttgcctagaaaatcccatgggcagaggagcctggtgggctgcagtccatggagtcgctaagagtggcgtcaagaaggtacacatttcacattattaccattcaccttttattaaaattaactttattaaaacaatactactcgattaaggtcctatgattaaaaatatgttctaggtcaatagaaaaaagtttattaaaggactacctcaggtccagaaagatgtaaggcaattttgatttgttatcaagacccacatttctacaattatttgtaattaaattttgttcaaaggcaagaaaaaaaaacaaacaaacagactcaaagttaatagggaatccaaagaaaatgaaacaaacagaagcagagattgaactaatatatcatcttactctaaaaggaataatttctacttataaatttcttgttcctaaggaactaatcatggggcagatcttgtgaaattttacatcagttcttcaatttccttaacttgggatgagaccacctcaccattcaccacttcctgcacaattgtcttgattttccgggctttgttagggtctaaagattaaacatggaacaaacggagcaaaagttagtgcttcaaatattcatctaacatttgttgtttaacttaggcttctaaattaggt

SEQ ID NO: 26357 - DNA, 3199 bp, Bovine  19866881124994
  misc_feature (1)..(1): n is a, c, g, or t
ntttgggagtagtttttgcccattacccattctcactgaacccattccagtcggctggaaagatctccttggccctgaggtagaccaacaagtttagatttcaactgatttatttcaggaacatggaggcttggtagaagtagtcagatatgcagaaatccactcccaagctttactattaagagacgtacttccttagacccaatggctctgagaaggatccacaaggagccccagggctcaggaccatggctgctgaacctctgcttccagctacaggccttctggaacaggcaagacaggttctaaaatagttttcccccacccccacctctcactacgaaccagtgtttaggatgcccaccacctccagattgtggatgttttgctctggcaaggaaatcctattatggggataggaaattaggtgatggtgacagagaatgacagatgagccttttgcttagcaggcagagagaaagagcgagagcgcgcgagcgagcaggctatacaggattgggtggctctcctgtccaaagggcttccccttggccaagccccaccccaaagcccaggaagtccagagcttggcacccagccagggtgagagcattcctccggactctgacaggccgtgggggatggtgggtagtgctcctacggcgaggatgggggaggggaaggaaacgcgcaggggaggaaatgacttcggagggtaagaggtggggagctattatagttcttggtcccacgaatcccttttagaaagaaaggctgaggctgaatgtcttcccaacagccatgcgaagggtctgcagcttcagagcaaatgacccctaagtcacctctctgctcagggtcaccactgaagtcctgaacagtcctctggaggttctctgtctccgcgtccctaactctggggctgtggttgagctcgggagaccccgagtggcgaaaatctggaattgcagctggactgggggaggagtccatcgggtctccctcagcctctccaccagggcccctcccttttcctgcactaggcccagaactctggaaatagcacctggtaaccggagcgctgacagatgctgagttatagaagggcaagtgtcctttacgttctagcttcattgccttggagctgtttcgctggaaaataagtgccttaggactcctcccattcccttccacacatctctctttagtatgcccctgggtagtgtacctcttggctacaatggaagtccccctgtttgtgtcccaagagacttttagcctttgggttatctactatgacctctatgactctggagggacaaatggcacccgactattctgattttaaatttacccttccttttctgagcactgcttaatgtacaaccctttctcctagtcagccttcagtcgcataccttccattaccccaattcctacccaaaccctcagtctcacatcttacctggggaaaaggagtggagaagaaaatggacaaagtctttgtgagaatttttcccaaggaaaacggttccctctgtttagcttcacttgaagaattgatgcttttgaactgtggtgctggagaagactcttgagaatcccttggactgcaaggagatcaaaccagtcaatcctaaaggaaatcagtcttgaatattcattggagggactgatgctgaagctgaagctccagtactttggccacctgatgtgaagaactgactcattggaaaagaccttgatgctgggaaagacaaagcaggaggagaaggggacaagagaggatgagatggtggatggcatcaccgacttgatggacatgagcaagctccgggagttggtgctggacagggaagcctggcatgctgcagtccacggagttgcaaagagtcggacacgcctgagcgactgaactggctagcttttcctggttagtccccttgctctgcatcaaaccttaccactggactgatttttactgtcctgccctcccctttcctccaacatgatcttccagggctctacccatcctgggcaaatgttctcaacgctgggagaggattctgcattctggaaataatttgcagcttgaggaaacagcccatagaggaagaactgttttcagtgttgttggggaaagggaggtgatggaggaggccacaaactgaaggctcactctaggagaggtcacgttcccgttatccggcacataattaaagaactcagctggtattcggggatctccgagagctctgccaacatcgtgaagaactctagggaaatcaagtacaggtagtcaagtttgcagctagggattaaaactctacccaactcctcctccaaaacaatttcctttcacgatatccctcctcttgaatttgcctcatcttttagttgtatgatccttaaagctatcagccagggagttacgtgggtttgaaataatcttaagtagaggcagcaacagcccccttttgcactccagccctcaatcagctttcctctcctccccatgctgctgctccacattcaccctgaagggggcacttttgttcagtcgttaaaagtccttttgccagcgaaaaaggagccgaagaaggaaatgtaacaattggtcacgtgttgggcgtggggtcctcgcagaggtttctgggaagggaagggaggtccacgtggagtgggcgggactcgctgaaagttttggcggggctggcaaagggagaaatatgcccgaatttgagttgtgattttatttgaaaaaaaaaaaaaaaaaggcagcagagagggtggagggtgtgtcctgcggagaggcccccgcggaggggagaaggggagcggcacgcaagcatcctgctcgcggaagcctggaacgcagggcagggtatttgccagaaagagctctgggccggtgccgagcttcagagccggaaacttctgtggctccatgctggttccccatcccccaatcctccagaagggaaaggtagcctctccacccgtggtctcatttcggtgccctgtggagctgggctactgccagctacgcagccccagtctttatttacctttccgagagcctcaggaagctgcagagatgaatcttctctttctgggaagaagccaaagcaagtctctttttactacttagttctaccccactattagtagggaaaggcaacttcatgcagtcttaaag

SEQ ID NO: 26358 - DNA, 2732 bp, Bovine  19866881145621
  misc_feature (1)..(1): n is a, c, g, or t
ngttcaattcccggggtcgggaagatctcctggagaaggaaatggcaacccactccagtactcttgcctagaaaactccatggatggagggtcctggtgggctacggatggagggtcctggtgggctacagtccatggggtcacaaagagtctgacagaactgagcgacttcactttcactttagacagaagagaatggagagctagaagaggtccctgtgtaaactgattgataacagcagagagaagtctgatagaaaaaccaaaaaggaaggaggattttaaatggattatattataagtaaattgtatacccaagactgaaagtcctgtctaagggaattttaagacattccagaagcaacaaaatcaaagtttaagtattaaccaggaataaaacagttttgactaaagttagaagcctcagctctggccaggattaactaaaaaagccaggtaactatgggttgtagtagcaagtaccaaaacacgacaacacaagttacatagtgatcacaggataattttctaatggtacacaaaaatgtttagtttaatagttacatattcatgggtcttttaaaatactataacagtgcatctcagtcccctaattttacagatactaccgcttaagacaaagctaaataaataatattgggtatgactcaaaaagtaaagattatatttagttgactagaatttaggaaatactagagactgtccaggcttcttgaagagttaatatagaaggcctaaaggtgtgacttatgtcaagttaattggcacttagaacctcactatatcacagctagtaacattcagtatccctcaaagtctaataaattgactatagtagacactgagaagggggtactatagaaaaaagggaacaaatgcattgtaaggggccataaccaagagaaatcaatgtttggatggtggcactaagaacttacctgctcgagtgttgaaatgaaaagaacagagtataattgaggttgatatttatcagaaataaaggttttgattgtcttctgttatgattagatcacaacctcatatatgatttgactgcccccttgtggtaatttatatttatcagtggtttagggagaagacttggtgtccaccaggatgtacaaatttatgcaaaaagaccttataagttccagttttaatcttttgacttaatatggtaaaaactttatcctttcctaaaatattgctcaaaactactgtctctgtgttcacatttgtttaaatagaaaataagcctaagaaagagtaatttaaagttctgattcagagaggatatgattcggatcctgtgaaggcttggaaagaagcccagcaaaaggtaatttcttggttagcattttctatgttattagagattgtgtacaatctaatgtctatatttcacatttcctattaaagatacattttaatttcttgtttaggttccggatgaagaagaaaatgaagaaagtgacagtgaaaaggaaactgaaaagagtgactctgcaacagattctggacctaccttcaactaccttcttgacatgcctctttggtatctaaccaaggaaaagaaagatgaactgtgcaaactaagaaatgaaaaagtgagttgttgctggatagtacatgttgcttggttgtattctaatggtgaaagaaaattgtgggctttgggaaaatgctgtttatgcacataaattaactcttaattttctgactgtcttatgaaggagcaagagctagaaacattgaagagaaagagtccatcagatttgtggaaagaagacttggctgctttcgttgaagagctggaggtgtgtagtttataatgcccatgttagaatttgtattaatgaaataagctattctagcaatatacctcgtcaggaaatttcacagttgacaatagaaagaatatagggggcataagtaaatggtaccaggaaacacactacctagaagttttcacaggaagaggggaaaggacaaaagttgatttttgacctattgggagtgagaatttaaatgtagaagaacaccaacccagcccccgaagtaaacctgaaaggacaaagacagtttccttcagggctggctaatcagtagtttaagaagatcctttgtttccaaatcagtaatactgttttgcaacattatctttaacataagaaaaagtatcttaattccataaattaagctaaaatctttaatgtgaagatttatgttattgcacttcagtttggatgtctagcttataatcggtgattggatacattactggaatcacatcctttctgcttatttgagtttataaacgtatacatttatgtgtatgtatatgtattttatccttaattctgattccccattttatcctcaaaggttaagttgtagaatcaaacgtagaactcagtcttttatctccacttttcaaagtgtgccttaatgtttgaacagcttatcacaaatttacctttgagatgtaacaaactgaaatcagtttaatcattgccttttattctgtccctagggataaagtgacatctatgctgtaatgtccttgttaacttatagacttgctttcttttttttttgatgtgaccccattgtatatatatattttttaattgaaggataattgctttacagaattttgttgttttccgtcaaacctcaacatgaatcagccataggtatacatatatccc

SEQ ID NO: 26359 - DNA, 948 bp, Bovine  19866881163898
  misc_feature (1)..(1): n is a, c, g, or t
ntttctaaaccctccggttcctgggatgtgtgggtggggaggacacattagttatgagcattgagctgctctgcatcatttcactgtccaagtccaggaatctggtttttgttgttgttgttgtttgaaatggagaattgactcaggctttaaaaacagatttactagttatctgtcttagatttatacagtgtcattttcggagatgttaaagtactgtggtttgaagtttgtttttaattttgacagtatgagagggcacattctcttctttttgtgttctagatcgttaggccttacaatggagaaggaaatggcaacccactccagtgttcttgcctggagaatcccagggacagaggagcctagtgagctgccgtctacggggtcgcacagagtcggacacgactaaagcgacttagcagcagccatctttttaatgaagccattcttcacaactggttatttaattgaacacaagagtagacttctcattgatttgtgttccttttagatgagaggacttggttgccgtgttgccctgtatctgggaatcatacataacctttggaacctggtatttgccacatcaagtagtctatgcatatgtaggcttctgagtttatgtttttcaggcttttgaaaaataacttgggacaagaggaaagagtcttattagggggaaaagctgaactcttggatatataattttattcttattagaaaaattatgtttgaaagattattgtcataaagttatatatttttcttctgccttcccggtggctcagtgggtgaagaatctgtccgaaatgcaggagacacaggagacacgggtttgatccctgagttggaaagatcccttggaggaggaaatggcaacccatccagtattcttgccgaaaaatcctgggacagaggagccggcaggctatagcccaggagtct

SEQ ID NO: 26360 - DNA, 1328 bp, Bovine  19866881165545
  misc_feature (1)..(1): n is a, c, g, or t
natgggtgtgcaaagctttaattctgcgaacacatgctcttgtacacatcggaccagataagcacacacggtgacacgtgtagtacacaccctgttcagttctaccaccactcccaggctttcgcattcctgtctctgcctggcccatgcacagtaaacagaggtggggcattgtccaaggagcctcaacccatatgttgcctggtgccactccccccaccttgttactttaaccttgacgtgcttaccctgagcatgtctccatacccgcctctacctgggacagtctatccttagcgacagaatgctttgggcataggcatcagaaataaggattatctggagtgcatattcggtaccacttccccactccatggctatgtcacctctggagggtctctctatgcctcatggtgttggttggcagttctagagcttgtcacccatctccagggctctgcttcgtcctgctgccagtaggtgaaagtgcccttgtgctcctggtctcgctctccctctgcctaccatctcttctcctcaccctaattagacttgccacaacctgctgctctctgcttggctcctacctgcctgccagtacctgcctctcacaggccaggccctcaccatctattgcgccctaccagaaagggcagatgggtggtgcccccccttttccctccccccttccaatgccagttcactcgaggcctacccagccctttttacagaaggaagataaagaccacatactccactgagtatggcaacagagggcacagtcgagatcgagagtgatggacacccaatcagcaatttttgtaggcctccctcacttgaatacaggcaggtccatcaaggtgtgcagcctgattttttgcagtgataccaagagtcctcctaagcctcgagccaggaagctccctctccactggtaaatggctccctcacccttgcctttaatgtctgcgtctactccgaacccaatccattcagccccttactgtttctctcacggtcagccccagcgcccaagttcaagcctcgcgcggcccaagtgggcgggcccctgaagggtaggggcggggactgggcggggactggaggagggggtgcggtctcagttctgccaccttccccccggccaggagcgcagccgccgacgccgccgccgccgcgtcctcacagccttgcgctccgcccgctgtctctgccgccgcagcccggcccaggagcgcagagcctttgggcaccggccccgcagcctgcccacccttcgggccgcgtgcgctgcagccggcatggggggccactgagagccggcactc

SEQ ID NO: 26361 - DNA, 1479 bp, Bovine  19866881330205
  misc_feature (1)..(1): n is a, c, g, or t
nacaactagtgaaaacctgcaggcagcaacgaagacccggcacagccaaacataataaataaatacgtgaaaatttataaaaataaatatttaaaaaagtttaggggaaaaaatcctgatgtaatcaaggtccatgcattgcatctggctgttagatctcattagcctcttaatctagaatagcttcttttttagatgacattgacttttcagtctagacagatatcttgtaaatgcatgaattgtctgattgtttccccaccgctcttctttacttgtaccttcatcccctccgtagagtctaagctactggttctgtctagagaggagtgtccaatacaaatataatgtgagccatgttggtaattaaaatttttctagtactcacattaaagaagtaagaagaaacagataagttaattgtaatattttatttaactcactgtatccaaaataatgtcatttcagcttgtaatcaatataaacgtattaatgagacattttactttcctttttttgtattaagtctttgaaacttggtgtgcagttttacttgcaacatatgtggattcagactaatcactttaaaatttatttttaattgaagtatagttgatttacagtgttgtgtcaatttctgctgtacaccaaagtgactcagttatacgtatatatatacattttaaaaatattcttttccattttggtttatcccagaagagtgaatatagttccctgtgctatatagtaggactttattgcttatccattctcaatacaatagtctactaaccccaaactcccagtccatccctccctgaccctaacctcccctggcaaccacaagcctgttctctacgtctgtgcagactaaatcacaatttaattgatcaaccgctaccagtgactatcgggctcctagattggaccgtatagttctagtggttttctggagcttaaatattctagggaagaatactttataggtgatgttgttaatagcattacaccaggaggcaaatagtgtccatctggcccctgttagtggtggctgaggttgactctgtggttaaagagacgctgccaggtttctccattaaaaagataccgttcccccactgcccccgctttgcagttagtatgcagtgatttttgcatatggcaaatatcctgggtatcccaaccattcactcttgttcaaaagttatttttaaatgtattgtgtaacatttcaatcatacaaaaagtttaaagacaaatataatgaacaccggtctccactcagtttaagaaatgaaatcttaccctacacctgagatccctggtaccctaccccagtcacatccttttcctttctccccagaggccactacttttctgagcgtggtatcattttcatgcatttctgtaaactttcattacatatgtatacatctcaaaacagcatagtgttttgcatttagggggaagtagcagttt

SEQ ID NO: 26362 - DNA, 1218 bp, Bovine  19866881336927
  misc_feature (1)..(1): n is a, c, g, or t
ntaaacgtatattaggggagttggggggtgggggttggtttggttgagtgtgtgtttttctttttttaggacttgtaaatttgtgttatttaattctagtttgtgagataacttgaattttttttctctcctctattctttatttccatagacatggatggataacatggggaaagctggtgagatggaactcaaagccctttagtggagaagattatacatgtattaccttccaccctgatttgtctaagtttaaaatggaaagcctagacaaagatattgttgcactgatggttagaagagcatatgatattgctggatccactaaagatgtcaaggtctatctcaatggaaataggcttccagtaagtattttactgaatgtaggcaatgaggtactttgtgtgaccatcatcaaaagcaaagttgatttttttttcctcccatttgtttttcttagcacttctcagatatgttctgtaaagaaaacataatgccacattttaaaaaaatcagttaacttattttaagttcactgaagtctttctcaaagaatcttctaactaaatccttttgtgtcctttaatgaccaccctcttatacatatcagtgaacaccgtttcattagttttgaaaaatctttataacctactttttcatttacttaaaaaaaattaatactattattttttaggtgaaaggattccgtagctatgtagatctgtatctgaaggataaggtagatgaaactggcaatccattgaaagttatccatgaacaagtaaaccacaggtgggaagtatgtttaacaatgagtgaaaaaggctttcagcaaattagctttgtcaacagcattgctacttccaaggtaattttatttttgaattatcaatcatgattatatttacatatttcatataagtattcttgttttaaatatataaaatgaacttgaatatttggctaccttggcatcaagggaactaaattagcttttaaaatgtttgattattattacaattttgagggtaatggatttacagtttggtatttttcctcattagggtggccgacatgttgattatgtagctgatcagattgtgactaaacttgttgatgttgtgaagaaaaagaacaagggtggtgttgcagtaaaagcacatcaggtataatactttaacactgttctttactgaaagtcaaggaagaagcaaaagt

SEQ ID NO: 26363 - DNA, 722 bp, Bovine  19866881371783
  misc_feature (1)..(1): n is a, c, g, or t
nctgcccctctccttgtcctcaggagtagacgtgccttcttcccattctgttggctttctgtcgtatcttcaaggtgtgtctcctctgtaatcacacatttgtcactgttagttcccagacaaaaacgaactcttctgtgctgacagtccagagccgcagcatccaatgataaggtagtcgctcagtacaactgaatacacataccaagccctgagacgggctagtgtgaccaaggaactttcagcatgtttaaaacaaattggaatttggaaaaaaaaaaaaaatctactttttaactgtaaattttgaatctaaatacaaatcaagtatttctgctgaaaatttagcttccaaatttcaatgtgctttaagtctaaagtgcacactggtgtttgaagagttatgaaaattaatttcatttaaatttcattaaaaggagtcggtagcagaacatttctaattacacagggacatatttctttggacaatgctgcgtgaagtacttggatttaatgagtgagaaagcacgtaaggaaatggtataagactgataaagtattttgttataagtcatggtaggctgttttctgttattgctccaatagtctgaaatgattttcttcagtttttttttttttcttcagctaggaagataaaaatttgagtaaagacctatggtgggggtgttttagtcactaagttgtgtctgactctctgtgac

SEQ ID NO: 26364 - DNA, 1094 bp, Bovine  19866881374414
  misc_feature (1)..(1): n is a, c, g, or t
nttaactttgctgtagctggtaagatctttactttataaaataatttccattttctggcaacgttgcaataggtttgaaacattgtatagtatacacgttcagtgaactaggcctgagactctagaaccctctgatattttaaactctcatacacttgtgaattattttcattgcaacttattcatcaaatgtcttcattagctgtagctcacagttcgcacttcacatgaaaacaagtaaacatagtgtttggcagcctgaaatataaaatagaagctttgagtataagccagtgctttcagcgttgcttcaccaactattcgtaacacttggtactacatggctgctagggcaaccttcctgtagacacaggagcttggtttttttcctgccgtatatatgaatacagttcttggccaagaaaacccacttgtgaaataagttctctgactcagagattgtaagaaaagaacgtgactaagagagtgttttgttttctgactactagttgtgtggtttgaaagtagaagtggatatggaaaaaattgcggctgaaattgcacaagctgaggagcaggctcgaaaaaggcaggaggaaagggaaaaagaggcagcagagcaagccgagcgcagccagagcagtatcatccctgaggaggagccagcagcaagcaagaccgaagacaagaaggaggacgagagcatgccgatggagacaggtagcctgccaggtgattacagagtaaatgttgagggcttttacagctgtctttaattctgactttcctttctcagtgctttctggaggtcctgttaatcttgcctcttgaattattctccatattacatgcgcattctttcttcccaaatcttaatctcttataatagattcacttaaagtgttggtattggtacaaaatagcagtgatgtgttgcctttagtctggctgtttgaggtcttgggtatttgcccagattgagtcatatcattccctgacttgggatataaagtactgaatgtagggtttaatggttaagggtgctggcctggagggcccacagatgctgggtactgtttcaccccatgctagca

SEQ ID NO: 26365 - DNA, 911 bp, Bovine  19866881413421
  misc_feature (1)..(1): n is a, c, g, or t
nacctcttgaaattgagttcccaaggataaagaagcagatgtacataaaatcatcattactggctttgacatggtattggcactcagtattttaacctttattgctaaaattgtttaaacagcatgtggtccttgcccttaagatcagtcctctttgctgtcctagaacagagttgggcaaataaaacctgcaggccaaatcctgcctgccacctatttttataaataaagttttattggaaccgtttgtttacacattatctgtggctgccttggggctccagcagtgtagttgagtagttgcaactgagacagcctgactcaaaaaacctgaaaattttctatctagtctttacagaaagtatttattgattccatcctagaaaaattcatacttccagttctactgattttcctgactaaaagcatgcctcaaggcaaacaataacatgtaaagcttacgtgaagtactgattaaatcaattattggttgaaatcttgggatcgccctgcacgctgttttgaccctgcccagtgcgctggatagtaaacagaactgagctggaagcatgggaaacacaaccaaaagctccctggactgtcattacaagggctgagagggcccagagtcaccctgggtgctctgctgacagcttctgatttgacatctggaaaacatgaagtggaatatgctagctatcttgaccagatatttctacagaatgtatcagcatattaacatttcagatagtcagattttaagtttaattatctgaatctttttctgttttgtgtgaacgtgttttttatcttaacaaatttggagcatgaacacgttttgtggttaaagcgagagcgtgagaacgacagcatggttccttcactccctcggcagctgggacactgctcag

SEQ ID NO: 26366 - DNA, 731 bp, Bovine  19866881421256
  misc_feature (1)..(1): n is a, c, g, or t
nggcctactcaggcctcagggatttctcctagagttgcaccagctgctgttggccccgtctggtcatccaaatgccccctagattctgaagttcctcctcagctcttccccccacccagtctccagcccagaaaacctccagctctctggccactcagaaacccccgtttacctgcctcccctctcttccattcagagctgaatggcatggtgttgctgtgtaaggtgtgtggggacgtggcttcgggcttccactatggcgtgcatgcctgcgagggctgcaaggtgaggcaaggggagggaagggcaggggcaggtgaccctctcacacaggacacatcttggcctggaccaagatgctcactcgctgccctgctccacagggctttttccgtcggagcatccagcagaacatccagtacaaaaggtgtctgaaaaatgagaactgctccatcgtccgcatcaatcgtaaccgctgccagcaatgccgcttcaagaagtgtctctccgtgggcatgtctcgagatggtgaggcagcaccatggccccgccagcttccccgcaccttccccctttcttccactcgaggtttctgaattagtccctcccttaaaaagtcccaagactgtgcgtctcgtctcgtttgcagagggggtggccacatttcatcagggcttgggtaaacacacacttctttcccagttagtttctctggtcccctcctaccacaa

SEQ ID NO: 26367 - DNA, 1085 bp, Bovine  19866881603801
  misc_feature (1)..(1): n is a, c, g, or t
nctgatctgatgattatctctaagtcggttctaaaattttagtaagattaccatcctggctcagacggtaaagaatccgcctgcaatgtgggagacctgggttcgattccctgggttgggaagataccctggaggagggcatggcaacccgttcgcgtattcttgcttagagaatccccatggacacaggacccatattggctacagtccatcgggccgcaaagaataggacatgactgagcgactaagcacatcgtattagcctgcactttgagggagttgatggctggggtgggaagacacatgaagggggaagaaatgagaatacaggggaaacactgtagtggtgcaacactaaatcctcgggcttctcctccgccctttagcttaaaatggactgatacaacaaatctgaagcagcacaacggcttcagaggtttcccttgattcgtaatttttactaagcaaacgaatacagtcaaacaatctgcttcaaacgtaggtagaaatgagagatggaaaaagaatatcatgaaacaactctaatgccgcagtgaagctgtgacaggtcaccgctatccacccaagcccaagatggccgggcaaggaccgtagccgacagcccgcccaagagcaactctcctcgcccggggcccaaccgccgggaagtcagaggcctcaccacgccccttcacatcaccgaatacgcaatcccgcgcacccgcaaacgtgccgcagccgtgccagctccgcccccagcccctccccccgaaaagcgaggcgaccagcgccgcaagtgaagcatgctgggaccagctctcaagcctcccggcagcccctgcgacgggcgcggtacgtcaggatctggcctgcggcggccgttctccgtaagatggcggaccggcggcggcagcgcgcttcgcaggacaccgaggacgaagaatctggtgcctccggctcagacagcggcggttccccggccgggggcggtgggagctgcagcggtagtgttggaggcggcggcagcggctctctgccttcccagcgcggagggcgagctggggcccttcatctgcggcgggtgg

SEQ ID NO: 26368 - DNA, 776 bp, Bovine  19866881609261
  misc_feature (1)..(1): n is a, c, g, or t
natacagatagcttttccaggaaatgaaagtcatgcagggtgcggccggggggaacgtgaatgtggagataaatgcagccccaggagtggacctcactgttctgttgaacaacatgagggctgagtacgaagacttggcagaacagaaccgtgaagatgccgaggcctggtttaacgagaaggtacatgtagcaaatcacaggccaagggtttgttcaggagaccaccaagcgggtcactaacctatctgacaattacgcttcagagcacatcgctgcatcagcagatttctgacgatgcgggagctgctacggcagccagaaatgagctgatggaactgaagcgcaacctgcaaaccttggaaatagaacttcagtccctcatggccatggttcgtaggcgtcatcgtgacttgaatgtgtgtgtgtattaagtaaatacatacatatatatgtgtatatgtgtgtgtgtgtgtgtgttgttgttgtttagttgctaagtcatgtctgactcttgcaaccccatggactatagcccgccaaactcctctgtccatgggattctacaggcaaggatactggagtgggttgccatttccttctccaagggatcttcccaacccagggatcaaaccagcatctcctgcattgacaggtggatgctttaccactgagccacctgggaacccaaatgtatatatgtatatatactaacatataactgaatatatataactaattatatatcgaatatatataactaattatatttcacta

SEQ ID NO: 26369 - DNA, 1837 bp, Bovine  19866881664555
  misc_feature (1)..(1): n is a, c, g, or t
nttagtaaagtgcctggcatatagtaagcatggaatacatataatactaacatactacagagcagtagcaaggggctgttacctgacttcttcctcctgagtctgccctcgaagatcatgctcaaaaaagagccctttccggggtatgtatgctgggttcttccgatcttcatcatcatccaaatgcttagggccctttttaccaactttgttctccacaggctctgtgctttcctgtcggacagataaagagctctttactcactccaagtttaaaagcccctgttccagaattcgaatggaaatggaggcctttggtgggtactaacctgtccatccccactctgcctctctccagtcacagtgcctttggtgtcaggcttttcttctcccttctcatcttttgctgaagaattagcagcatcattggcttctgatttcagctccactttggagttttcctcttcactgtactccccgtcatcaccctgaaaaaagtttcctggtacttccttggtggtcccatggataagactccgtgctcccaatgcagggatcccaggttcaacccttgggtcagggaactagatcccacatattggcaactaaagagtttgcatgcccaactaaagatcccacatgccgcaactaagacctggtgcaaataaataaataatttcccttttaagtttccctgttagctatggagataagatctaaatagcgcattctaaaatttttcattctttaggaaaacattttctaacaaattttactataatgcaaggattaaaagcaaacacttcaatgtttttactaaaatttctactgaatagaagcattgttaaaaaaaaaaattaaagccacattaaaaaaaacctatacagggaattccccagcagtccagtggttaggactctacaccttcaatgccaagggcccaggttcaactcccgggagaagaatgaaggttcatccacaagctccacggcccagacaaaacacacatgcacacatctatgtgtgcacacacacggcttcccaggcggctcggcgataaagaatctgccaacacaagaaacggggctttaacccctggggcaggaggattccctagagaaggaaacggcaacccactccagtattcttgcctgggaaatcccatggatggaggtgggctacggtccatggggtcacaaaagagctggaaacaacttagcgactaaacaatatatatatgcacacataaacaagcttatatagatctctgttaagttttccagtaagatatgcatggaactgtcaggagcagcagcctctttcactaagcttactgtaataatcagttcaccatgtaagtcaaacaattatgctgttgttacaccttaaacttatatagcacaattttacctcaataaaactgaaaggaaaaaaacccaacaaaacaaatagctgcagcctctggggaagaagcccagggcctatggatcagaggcttttaggtgtctagaccatacagaagaagctttctttttgataatttctctcaatacattgtctcttaaacatgcagtgcctaataactactcaagctgttaattctctcatctcaaaatgtcttacagcagagattcccaaccttttagattacgtgaatccccttttaggacctaaaattttcatggaatcccatgagatatagcacagtatagtacccatgaactgagaaaacacataatgacaaacaactgctataggttcaataatactttaaaatacattaatatatttttattaatttatatatattaaaaaatagtagtacataaagatagat

SEQ ID NO: 26370 - DNA, 1079 bp, Bovine  19866881677913
  misc_feature (1)..(1): n is a, c, g, or t
nagccgcctggatccactagaaagtcgaaaagacatggcgacagcaccaaacgaccctttctcagagaggagcaaggtcaaaagacaccatccatggaagttagctctgctggccttttataggacttagtaggtcatttcagccttaactatgtcgatctgtaataaaatattacttgcatgctaattgttgtttttcataattgggtgattttttaacagtgtccagtctgtaggtggaaagctggcccaaggatatctttgtatacgaaaaaggtgccagatacagtaataccaaatcatagttttaaaagtcaatattacatatgagtcaatgtacatctttttgacctccgaaatatattttagttgttttttccttccaatataacaaaagattcataattcaaatgcacaatgtctaatgcttttattctataaatacttatgaagtattttattattcatgtgttattgaatgttttctttcttattcaaatcaggtgctctcaatatatagtgatcctttggtagtgggagctctctaattgattaaaaaaaaaacataaataaaagtcctgcagaactttgcttatcaatttaactaaaaattagtgagtatgtgacattgacagaaaaattacttgtattgagatttcttggttttgtccaggaacagaatgtctattcaagtaacttctgagcctccaaattgctcctttttctaattcaaaaatattgtttaatgttttatagtttaaatgtatgtatttaagacattatgaatttttttgagaaatgagcttcatgttggtgcggagggagtaaaatatatgaaaaagagggggattttcatcactacttagaaaaccaataatcatggtactctagataaaagattagttgtcattggtgagcagagtcttcctccttctgctttgatgcccatgggaagtcatcctgtccggttgttcttcttttccctgttgggcaaatgaaaataataacgtgaaaagtctcaaatgaatgttgagcagttccaataattaagattacaacacagtggagggcacaaacat

SEQ ID NO: 26371 - DNA, 1730 bp, Bovine  19866881692330
  misc_feature (1)..(1): n is a, c, g, or t
naggtgaatgacgggacctccctcgatcctgcctgttaaagatataccttccttcgtctgccttttcaaccatcttgtgttcagtcttcgtttctccaccccctgaaaatagtagaactaacccatgtcttctttccttcaggagagtgaagatggcatcgagggcgatggtgagtagcatcatgatagagatcttcaaactcaggtcacctgtctgcagcagttgacatcttctcagactgttaagtggagaaggaaatggcaacccactccagtactcttgcctggagaatcccagggacggaggagcctagtgggctgccgtctgtggggtcgcacggaatcggacacgactgaagcgacttagcagcagcagcagactgtgaagggttttggggagggtgccacaaaggggttctttgtagtttaatgttcaagagcttaagttctagttgtatgatcttgggaaagtcaaagtcactctttgaacctgttttccgtctgtatatggggactataatttcatctacctcataggttgatgtcagaattaaatgagagttttagcttgacccacaacaagcactggaaaatgtaattataaaatttctgttgcattttttttttctttatatgtttctgttttctttcagctgttctttcggattatgaaagtgcagaagactcagaagtgagtgtgatagattctttttcctatgatgtaggttggaaaatgtgttttaaaagttgtacccacctgtggtttgaaagcatctgacctgtttgttactccgcttgtgcattcttcatttatgcttctgaaaaactattatacaaagtgttgttcagttatagagagggaaactttgtataaacctcttcaggccacatgtgttacactgtttatagctgacctttcaccctatctaaagaaaataagatgctaaataagagaatgagaacattctttggcccttcacaggatgtttgacactccattttatgatgcctaggtggtgaaaccagccagttgggtattttttgagtatgtctgaagacctcagaagggtaggattctgagtggtttgtgtcagaaacatttctcggtttacagatgaggttttctgtctttagcagaaagtttccctaagccaaatgtttgtgaacttagtttgctttgattgggtaaactactagagatgttatcagaatggctacttgtttcctggaactgttgaatagagctctgatttatacagaaagaattggattgtggatcaaaggttcattctgtaaattttgtagaactgttgctacatattagatttaccattaagccctggagatgcagaagtgaacactataacaaagttcctatctttcggaatcttacagcctactaaggaagtcagaccgacattgaggaaatcataggacttggtgacaactgctgggggatagggttaaatagggtgttaatgactgggtactgattccatattaggcagtcagagaagaataaattggagttagccaggcaaatcatgttctaggcagagggaacaacagctgcaaaagctcagagataggagagaagattgactgtctggaaacttgaaagtagtttggtgtggctggaacatcgttgggacaggatggataccagaaataaaggcaaattatagagtaggggtcagatcatgcagggattacttcttctttttctttat

SEQ ID NO: 26372 - DNA, 665 bp, Bovine  19866881993016
  misc_feature (1)..(1): n is a, c, g, or t
nttacttgtgtgttatcctactctgcagtaaccctttgggttttccccctctctttctagactgtgttcctactaagtggcacagtgcttggcacacagtaggtacttaatcagtgtattgacccactcttgaagaaatgcattggtgctttgcctgttctccattagccaaactttacaaagcgtgaggtattgactggtttacaacttaccctccggggatgcggtgggaggggcttctggcagggtctggctgtggctcctggtggctggacagggcatgctggaagaagtagccccagggcggacaaagtcctggggtcctggggtcctctgggatgggggagatcctggctctgggaaaccgttgatcagcacaatgggtatgtctgtcatggagttagtgatggatggtgggcaactgctggcatgttccttggccagtggtggggagcgggttgctctgggctggcccatgcttggggtggcgttgctggggaccctggaggtcactggctctcgtatacagggacactggaccaaggttgttgaggctggaggaagagctgctggggctttccaaggatctagaagatgactgatggctggagatgctggagtggaggagggactggctgctgtgaggggagagagcagcaggaagg

SEQ ID NO: 26373 - DNA, 785 bp, Bovine  19866880275656
  misc_feature (1)..(1): n is a, c, g, or t
naaggcaatggcaacccactccagtactcttgcctggaagatcccatggacggaggagcctggtaggccgcagtccatggggtcactaggagttggacacaactgaagcggcttggcagcagcagcagtatcctcatatcaactggactgaataacagattagaatttaaaatcagtttttctctagagtcagtcctcataacagtacttcattttccctggttacagttactgttggtggtgattaccacagtcttttactagactgtgatctcccaaaacgcaaggattctgctttgttcatgtatttatttccagaaaggtgttcaataaatataggataaatatgtgaagtctaagtatcaaattatggcaataaacataaatggctaaaatttcttcaaagcctcagattaaactgaaaaacaaaatctagaactttttttgcttttaagagttatatctaaactttacaatattgtattagttttgccaaatatcgaaatgaatccgccacaggtatacatgtgttccccatcctgaaccctcctccctcctccctccccataccctccctctgggtcatcccagtgcaccagccccaagcgtccagtaccgtgcatcgaacctggactggcaactcgtttcatacatgatattatacatgtttcaatgccattctcccatatcttcccaccctctccctctcccactgagtccataagactgatctatacaacagtgtctcttttgctgtctcgtacacagggttaagtttaaaaata

SEQ ID NO: 26374 - DNA, 1588 bp, Bovine  19866880461620
  misc_feature (1)..(1): n is a, c, g, or t
ntaaaagttggtctcaaaatcaatgaaaatagattttacaggactgtgtaatgaagcccctgtggccagtgtcacagatcacagagtggctgcattttatgtctcatataaggtaccctgacaacgctgagtgggagctttggtattttcctgactcacaaggaagggagcgtgccatcagctgaatcatcctcctcgcttcctggggtgcctggttgttccaagacactaatggaggattaaattctggttaccatgacagctacgtaaatgctgtcatgatcttatcaacagatgtcgtacagtgctccctggaatttgaatttttttccctgtcaaaaattcaatttcaacataaattcttcaataactaggcacagtgggtctaaagaattggtgatatccttccttttcttaactagctgtattaagatacaactcatcttttacttaaaatgtattccttctagtgaatggtgtttgtcttgtgatgttgcttattgtgcttttagaaattaaaatgaatagtatgaatagaaataaaaatgaaaagtataatcaattctcttagacttacagaaactcaaatttgagaaaacaaatctgaatacctagagcattagctggcatctagtggcaatgggttggttttatctgtaacggcgctaatgtaaactgttttgtgtaaggacctgatggtggagactgtgtttttggtagatgttctgtccctttcctttctccattccaatggttagagtcatccctgagaggcagagtagcagccacagaggttcctgaaactcttagttcctcagtcgtgtccgactctctgcaaccccatggactgtagcctaccaggctcctctgttcaaagaattctccaggcctagtgaaacctgcatttttattttaaaaacttttctttggggaggtttacaggtgcttcccaggtggctcagtggtaaagaacccgcttgccaatgcaggagatgtgggtttgatccctgggttgggaagatgctctggagaaggaagtggcaacccactccagtattcttgcctgggaaatcccctggacagaggagcctggcgggctacagtccataggttgcagaaagctggacacaactgagcgactaaacgacaacttttaggatgattgccgccacgcttcaaggactagaaacacttaaaagtcttccaaaccaacatcataaaaaaaggtcagtgaccttcagagttcttgaaaagcctttactaaatgtgttcaaaacagctctgagcactagttgctttttgtcttttccctgctttttatatagtattttctcatttcacttgccttcagatgttggtcattattatttttgctgaagtattccttggaatccttctaatttcagtggcacaaaaaaattgccaagggcctgttatatttctttgtgttttggtctgctttacatggcttgaggatcccagttccccaactagggcttgagccctggagtgaaagcgcagaatcctaactaccaggccaccagggaactcccaggcctgttatatttctaacctgttcctggttagg

SEQ ID NO: 26375 - DNA, 1297 bp, Bovine  19866880545008
  misc_feature (1)..(1): n is a, c, g, or t
ncctcctgtggctcctcagtctggaactttctttcctcactctccacctgcctctctcaggtcaccatttaggtcactgctaagacaggccatccctttccccagactgagctgagaccatgcgtgatctctgtcacagtacttctccctttcctacacaacacttaggactgtttttattctgtttttttattattcttttattatgtattacttgtgtgtcccactaaatggtccacttcacaaaggtagggaaccagtctcgttcatcatgatttgcccaggaacacggtgtctgcgccacaaaaaagtattgaatgaaagaacgaataaataaatacagctagattttaatatcccccgggggtagagtggggggatatttcttttcaccctcagccaaaagtttaataaatacttattgacctcagtactgtattatggaaaaaaaaaagaacaacagtaacaacaacaaggaaaagaatgacagcgttagaagtcagtgtgactgaaggaaagtcgtgggctgtaatgtcattagtctcagcaaatgaggggcaggattatagccacgggatccctgagtttgtgaaatagcgatgtacttaataatggaagtttgttttgcttggaaatagcagatgaattggatgcacatctggatatttggcatcgtgcagacaaaaacatctggatgattggctgaatgcttcaacaaaactaatgtgtttcagggctgtgtaaacagtcagagaatgactctgaaattatgttttttgggacgtggccacgtgaataagtggaggaggagagttctcattccagaaagacgatggactcagagacttgaaatccctcctatcccaaacacacagggaactcaggatgcatgtgacccttggaagctgcatggccaaggccatgagtctttgaaatcaggaggagactgaaaatcagagccatgtgagcccatgaactgacctgggagtctgtttttgctcccagtaaaccttgggagcttgggcttgaaacccagttgaggacaggagacaaggttttggaatcctgagaagtcttaagtcaggacatctgaagagctgaactctcagtggaaagggggattagaagaaatctggctcttggcacaaggaggagacgaggaagctggcttagctcgagtagaaggaaacagtctccctagagaaaaatgaagccctgggcttgcccttgggctttgggtccaaaacatgtctttactccactcagaaagcatgcaaatatctctgcaaggctcaag

SEQ ID NO: 26376 - DNA, 2938 bp, Bovine  19866880555929
  misc_feature (1)..(1): n is a, c, g, or t
naatttacttctattggcatttcttgggtagtttcccaacattcaggccaagcgacttaactgagagcacagccacattctcaactgtgagtttccatttctgtgagttgcccagagaagaaagtgctactcagcttgtcaacacatttattaagtctttatgatactcctggcccaaataggtataggaaatagaggtttggagaggagaaccatttgtttctttcctctaggccacctccaaaacctagcctagtctttcagagccaaggctgcagtgcggtacttctatgaggaccagttcagctcatcagttgttctgtgagaacagggtcagccctcgcgatgactctcactgtttgaatctgcagtggccctgattgtgtgtttgttaaatagtgggaagaaaaagaaaggggagatggaaaatgaaaagcaaagtcaggaagtgagaggaccacagacagccagtcaggcccttccttgagggatcagcacccacatctggcctggagaggaccccttagaccaccctgaaacagactcaggacccatgggagctaatttcccatcaggggaaagcaggagttgaggcagctgctttcactagtgctgcatctttcctacgatcaataccccatcaataccccatctgcctgggggtgtatttccattcactccaagtcttcagggaacaagtagaactagtgggattcccaggtggctcagtggtttaaaaaaaaaaattgcctggaatgccagagacatgcaggagacatgcgttcaatccctgaatcaggaaaatcccttggagaaggaaatggtaacccactccagcattcttgcctagagaactctgtggacagaggagcctggtgggctacagtccatggggtcgcaaagagacagacacgactgagcatgcacatgtgcagaactggtatctcagacatcaaagaaatcatgtttgtttcagaaacaagtttcagcattgaatcctttggtatctccagatagtgatctcttccttgcatttattccttcactaattcattgacttggcaaatatttatcaagatcttcttaactacagagcagtaattaagaagctaaaggattaagaaggataaaatgtatttcgtacataggtaacgacaggtattacagagtgtgacaaatccatgatttagggacaagttctcacaatgacattctctgaattggaagtccattcgaacaaaaaaaaatctgtaagactagccatcaacaggagttactcaatctggaggatatggatgtatcagtcccccctgacatatccaccataactgtaactttattttgtgacttgggtaaacagaacacaaggttgtgttgtaatgctgtaatgacagaagcattattttctggggaaaaatagttggaaaagaaaagtatttgcaaatggtacaaatgaacttaattacaaaacagaaatagagtcacagatgtagaaaacaatcatatgttaccagagacggaagtgggggagggataaattgggagattgggactgacatatacataccactatatacaaaatagataactaataaggacctactgtaggcgcaggtaactctactcaatactctgtaatgacctgtatgggaaaagaatctgaaaaagaatagaaatatgtatgtgtaaaattgaattactttgctatacacctgaagctaacataacattgtaaatcaactacacgccaataaaaaatgatacagggagagagaggaataaaaaagaaaactatttgccagcatgtttccagtactgtccaaggaagaggaaatcatacaccaatattcgttatctagatggaaatagctccagagagaaggctaataacatttgcacagtacttcagtttacaaagtgcctttgtgtacattatctctttcaacattcacaattgcctccataaagtcagtgccattatcaagtctgttttattgaggaggaagtggaggctgggaaactaagtgactttctaaggtcacactgcttgggaagaacagaattacaggtactctgacttctcggcaagccctactctccaccaccccttagctgtcttaacatgcaccaaaagcccccaccaccctaagttaatgcatcatacacagcttccaggcaatgccccatttcctacctgactctaggctcaccaagtcttttttgtttttgggggctgcacggtatgtggaccttagttccccaaacagggcttgaacccacatcccctgcagtggaaacgcagagttttaaccactgggccaccagggaagtccctacaccttttgatcagtaacttggtctcttgggagaggtcaacctccaggaggtaatcattgcacttaggatgagcttcacgggtgtgcaaccagtgtagctccctggggttctgtgctaggaaaagccacttggtttaatgcttttctgtcattgcctgtttttttctttaatattttttggttgcactgggtctgagttgcagaatgtgcgatctttgttgcagcattcgaactcttagttgtggcacacgggatctagttccctgatcagggatcaaacccaggctcccctgtattggaagctcagagtcttagccactggaccaccagggaagttcctgtcactatattgaaattcttaacaacttttgaacaacatacaaattgtgttgctggtcctgagtgcacaaatgatggttaccagctggactgggttcctgggtcatcaaccaatgccttgggagtttaagagcacgtatgtgggatttagaaataaggacaggagagaaagtggaggacagtcttgctgggggagaagctttgagaaaggcagagtggtggatgaataaggcatgttttcaggagtaatatctttttgcagg

SEQ ID NO: 26377 - DNA, 1849 bp, Bovine  19866880582894
  misc_feature (1)..(1): n is a, c, g, or t
nactctttgcaaccccatggactgcagcccaccaggctcctccgtccatgggattttccaggcaagagtgctggagtggggtgccattgccttctcctttcaaaacacagttgctgccaattaatagagcttctcaaatggtgctagtaagaaagaatctgtcttccaatgcagaagacataagagacccaggttgaatcgctgggtagagaagagcccctcgagtagggaatagcaaccagatccaatatttttgctaggaaaatttcagacagaggagcctagaaggctacagttcatggggctgcaaagagtcggacataactgagcacaggctatcaattattagtactggtatgtatgccattttcagacactaaaattaactaacctctgtacttttcaacttttgtagttcattttccagcattaatttctcctctgataatacttggagatcactttgaatctgtgtgtatttctaaaaacaagtattataacttcattaataatgaaaagcaaacatatcaatatggagaggttattcgggtacttgattattaaagtaaaaaagtcttttttaactcatagaaatcatgaaccactggtattaatctgcatagtgaagttataacaggtgctgaaagaggcaaaggtactatgattgacaatggaaattcagagactgtgggatattatagttcagtatttcaaaagtcaagtgtttctgagtgatttaataaagtctactaaaatcaaaagaatagataaaaatttccagctctcatatgcataaaaatctcttgaataaactaagcatctatcagcaacatcaaggacaaagtgcaaattcaaactgagagcactatacttacagcctctaacatcagttgctcattcatagctctgaaaaacaaaccaaaaatataatttaaaatttttatttttatttatgtaatatcatgtattttctatgtaaaaaaaattaatataaataaggttagagtatactttgactagcattccaaaatttcagtgttcttcctagagatactgttcgattgctgtgtatctttccaaaacttgttccatggatttatgacactttatatacctattgtacactttttcttaatgagctggatgtttgttttgtttcctttttcatataaatgacatcactggatatgttctcaacatttttttcacttaacacaacttctgagatctatttatataggtaaacatagattcctctcactccctttaaatacaatttcttattccatatcaagagttggcaaactttttctgtaaagagccagatagtgagtcttttacactttacaaaccagttagtcttgtcactaccagccagctctgcagtggatatggctgtgttttaacaaaactttataaacaaaaacaagcttcaggctagatttttttttttaaactttacataattgtattagttttgccaaatatcaaactcatggactgcagcttgctgacaactgttccatagtacagataaactattttttggactaatgagctttttattaattataatcagaattttttaaagttttattatgattaacatactataaaattaactcactttatacaattcaataccttttaatatattcactgagtaacaattgttgtttagttactgagctgtattgaactcttttccgaacccatggactgtagccaaccaggcacctctgtccctgggattctccaggcaagaatactggagtaggttgccatttccttctccaggagatcttcctgactcaggggatcgaacccgtgtctcctgcatttcaggtag

SEQ ID NO: 26378 - DNA, 909 bp, Bovine  19866880729164
  misc_feature (1)..(1): n is a, c, g, or t
ntttgttcctttcacttgactgaaacttcctgcctgtccatcagtaacttcccctttcccctctgtttccagtctctcgtaaccagcgttctactctttgataccataggagtttgactttttcatttcacatacctcatataagtggaaccagggttttttctgattgacttattcactgagcataatgtcctcaagcttcacttgtgttgtccaattttgcagaatttctctctctgaagtctgaatggtattcttttgcatgtccctgtcgcatcttctttatctgttcatctgtcgctggacatttaggtcattccacatcctgactgtcgtgagtgatactgtaatgaacactggagtgctaagacctctttgagattctgatttcaattcttttggacaaaaacccattggtgggcttgcagagtaggattctgaacatggaggagaggagcccactggggggtgtgtgtgcagtgctccctccggttctaaatgctctgccggccctgtactgggagcacaggaaagtgggtatcaggtggggatatttttgtgtttgcaaactggaggctggctgtgtctcctgggccagggagttagccagtgcacctcgtctgctaagtcatcccctcttttcgcaggagacagtcttataaatttggctaataactcccatttcatttccccaaactccattagagggaaattataatgaagctcaaatactcgccaggttattcatgggaaagacctttggctcttaaaaaatatattttagatggctggattaatctagtggcacattataatacggccctgctgaagtttgcaggagactcctggcaccaggcattgtgccttccacaatgctgccaaggagcataattatctttacaggaagag

SEQ ID NO: 26379 - DNA, 2034 bp, Bovine  19866880936126
  misc_feature (1)..(1): n is a, c, g, or t
naattgtattctctaggccctttaagggacccacataatcaaaactattaaaaataatgttaaaatgttagttgcctttttaaccatgttgacatttgatttgtgcatccttgcacttgagattgaacaacatcctttggtttcttgatgctccaagttcctttcaacctcaggctccttaagcatcttgttcccagtgcctggagtacttccccacactcactctccctcatgagtaacactgacgagactgacagttggtgtgctctttattctttggttcattaacatcccttctccagagtgattctctgctgttcttctgccttccccagtctcaggttctcccctaagtgctgtcatagcccttctgaagtaccctcttgtgcaggatggaattctagtcaattatttgtctgatatctgccccgctgttatttccactaaagcagagagtgaatctgtcgtggtcatccttctggtgtggtgtccagcataactggcattccataaatacttaaatggatgaacggttgaaatgctgttgcactacactgaaaagctgagtggaataatggaaggaaacctgaagtgaaaggagacttgagattgaattttaattgtgttgtttatatatttggacctttcacgattctaattccttatctgcaggatgagttagtgttgaaaatagagtctctatctgccagaaaagacactcattaagtaacaatcactcaacagtatgagtgaccaccatagtaacacttaatttctgtgctgggccttggaaatacaacagagactaaaacagacatacttggttttgtggagtttattgtagtgggtttgttctgggccctaagtaaggacttttccagaaaggttctaagtgatgcatagtaggtatcctattttgaaggttaaatatatggtgatgtctttaaaggagcttagaaatgtctgtttcacatttaatttgtatagttgaaacttttgtttctgttttttagtccaagccttatgcatttgaccgggtgttccagtcaaacacatctcaagagcaagtgtataatgactgtgcaaagaagattgttaaaggtaaatatattatataccttctaagtcatcccagcagtaagtccagttttgtttgtgatctcttcaatttacccagctttctttttttttttcattttaccttccctttctttttagttagttgcagaagttcagataataaaaaggtcaaatatagttaaaccctattgctcaaatttcatgaaataatttatgtacaatgcctgttgaagggtgttatgagaattacaatgttgtatacatatcctggaaaatcccatggatggaggagcctggtaggctgcagtccatggggttgcaaagaattggacatgactgagctacttcactttcacttttcactttcatgcattggagaaggaaatggcagcccactccagtgttcttgcctggagaatccccagggacagggaagcctggtgggctgccatctatggggtcgcatagagtcggacacgactgaagtgacgtagcagcagtagcagcagcagcagcatggcgcctgtgctttcccagtctacactgcccaggctccaggtttctctgaaggggaactatgcaatcgggccctggattgcgtgcacttcccaggtctaagctgctcagtttcaggttcttgagtactccacaaaggcacagactctgttgggcctgcattttgtgcccttcccaggtctgaggagctcaggccaccaggtgcttggcgagtgcactatcccaggtgtgcagtgcttcttatcacctttctggtcccagctgatctcaggctgtgactctcctggcatatgtcaaccgtccaagatcctaggaagacttggttagcaaacgggagcctgctcacagttcggaggatgccgtctctggggccaagattgcctctcgccttccagctctggctgtcgtccacctgcctttctccctcctgcagggcag

SEQ ID NO: 26380 - DNA, 2251 bp, Bovine  19866880966050
  misc_feature (1)..(1): n is a, c, g, or t
naagtcaatctttgcttctgtttgtatgatgtactgctccccataggatatccatggtgaagcatggacgtattcaaaaaattttttaatgtactggagtatgttctgagctctgtagatgccttcatcttttaagtgacaatgacatactgtacagcttttctgaaagcagtattcaatttacctcttcctgatccagcatttgtgtcttcagtttttctaccaattggctctgttgattaatttcttcatcctagaattttcagttacaagttaacaaaatagttcacaacctggttctgtttcctaacacaaactgtaagattactacccactccccagtatttcaaagttgttttctccaaattcgacatagcttattctaacctcttatcttagaaagatgttgaaacaaatggagcgtctttcaattatcagtaactgtaacatccttatcatgcaataagaaaaaaggcttatgtttatgaaagttattcacaaaatacatgctaaaataaacatgtttaaagctattactgaaaataatgccatgtagccacttcaaacctacctaccatccctgtttaaaatacattaaaaatatcacctactaagaaaaaaatcaaagacaacaccagaacaattttttctagcctctttactgttgtttttcccatcctttttatttggttcataattgtgctatttttcatactactgatatcatcaaagtacaaagaagatagtatttccatttgattctattccctcagtctaacctcttgcatcatttttatcattagcaccatagacagctgattctaaaaggtcatttcattaagactctccaaggatccacgtcaaatttccttttgcaagttcttttagcttaaagagaaggggaagaaaggtatgccttatacatttgtttctgcacagaaacagaaattgtcattttatattttctgttaatacaatgatcttgaaaaagttaacaggaacctaggaatatgtacataggtcatgaggacccattaatactgaaattagaaaataaaaacaagtcaataatgttctaaaacaaaacagaacacaaataatacttaccttgtcatcgagttgtttgtacagtttagcaatttcttcttcacactttcttctttcagcatcagtaaagcttccagtaactccaattgtggctgctggtttatcattggtaatagtaatatccttatccactgcaaaagcttccaagttggctttctctttgtcaaactgttcatcaataggcactgtctctcctaaaataagacaacagaatggttaacaaaactcacctgtctaaaattaattttaattttattcaatttcagcagctcttatcaacttaatctgctcagtccctgagatctgaaaagttggaattatctttgactgtcccctttatcttctaaagccagtcatctaatcttgtatttttaattgatttcatcctaaacatcttgccgtcttgagacttcaatagtcagctagctggcctttatgcctctatttataattccaggtaaaatcagaatttaaagtaaaagattttattcatttttatttgatgatccctaatatgtttttattttcatttatatcagagtctcaaatttataaaatagctctgaatctctattccacaaactctaaacaacaaattcataaggtattaattaccattacgccatcggttgagttcattttcaagccactgaatggtgttccggagggtcttatttttttctttctctctttcatacttctttttccactgttctgcagttaactctacattgacacaaactgtgttcttaattgttttggccctaagacaagtagttggggggagaggggaagtatatgacttaattattttcaattgatatctatatctctgtaatataagcatatgtggctaggtaattgaactattcttctctagttatctctgactaaattctaggagctgtacttagtttagtgtttattcacaacccattagatttgggtcagttacaacacctctgaatagcttaaaaaaaaaaatcagcaacctgataagggaaaaaaaaaaacacgggcccattatttttccaattcacttgtaagacagaattaagaaaagcaattatcaacgacagtccaagtcatcattattgatttgcctcagctaaccacctcatatacagttatcccattatttgaa

SEQ ID NO: 26381 - DNA, 1372 bp, Bovine  19866880969485
  misc_feature (1)..(1): n is a, c, g, or t
ntttgacaaagagtaaggaatccagtttgacgagagcagagtgagtgaagaggagcataatgcccgagagcagcaaggaaaggggaatgccaatcctactggaccttgtaagcagttttaagaactttgactctttttctgagtgagggtggggaataattggactattttgatgtaagtatggcatggcctgacttacctatttttaactattagtttgtttattcccatgaagacagacgaaagtagaagagaaatcagtcaggaggctgtaatgagccaggcaggaactgggtgtttggatgcaggacctgggagcccctgctggagccctaggcattgctggctggttcttccaaatgtcactaggagacaggagagaaagtgattcagctctccggtagcaaaaaggcctggctctccatgcataaataatcaggggtttaaacttcttaagtggcttcttaaaaatgagtcatcacttatttccccataaggagtcttacacaatactgttgtttttaataagctgtttttaattcagtaatctaaaaggtataaatgtggtcttaattgttacggctaactgttaaagccattatttgcttaaataaataatgaatataattaaatctttgcataggaatttgcacagtataaccttgaataattgtttctggcttggtaatatttattagaacttcctatagagcagatagaaacaccttttccaatttagacttatcttcatttttctgtaatattttataaaatatgagtgcctgcagtaaagcaaaatatagttctagatgctaagtaaattacaaagataatttagttctcattctttaaagaattgaggcccccaatactacaagagaatacatcttttaaaggaaaaaatgtaaagattgttagactagcatctatctaagcagctcacgttttggacatcagtgtgtaaatgaataaatgattacagcacaatttcttaggcagagagtgtagtactccaggaggcagaagaaaggtccttttaaaccaggttttgaagaacaagaggaaatttgaggggcatggggtgaaacctggtgaatggtggtccatcccggtgaacaaagcacagaacggatgttgcagacacactatagtgcttcccttccggtggatcttatctgcgatagccactgtcactctcagctgactcaatgaaaatggtatttctgatgcctcaaatatgtgatatgcttgtactgccaatgcatttgtcaaaagactattaaaagccacctgaaaaggcaaaaatcttctaggggtaagcaaaaataacaaaggaagtaaaagaaaaaaacataatgttagaggggaaaga

SEQ ID NO: 26382 - DNA, 1928 bp, Bovine  19866881009344
  misc_feature (1)..(1): n is a, c, g, or t
natagagatatgaggaattgttatctgatgtattctaagtaacccccatgggagcaacaccagatttagctgcaggagatcaaggtgctaaaagtgatggttaatgactatggaaccaggagaaatcaccaactttcctgggtctcttcatctattacactagatgactgctaggtctcctccctcaatttgactatctatgattcaagatttaaaaagtactttggtgatactatataccagtgctacaggatagctccctttacctaaaatagctacttgatcgggttctagcaaagaagtcttattggctattttaggatggagccacccttatgggaggaaaagtactctgatttcccctttgtaacaggtacacttcattcaatacaaggtgtatgtcttggtcagctcagctggtggtaggttatctcagcataggaggtgtgaggtgagaagagggataatatggttataccagtaccagagtcagaaagtaatactgtttgttgttgttcagttggtaagtcatgtccgactctgcaaccccatggactgaagcacaccaagcttccctatcctgtatttcccagagtttgctcaaactcgtgtccattaatttagtgatgccaaccaaccatctcatcttctatcacctcttttcctattgtcctcaatctttcccagcatcaaaatcttttccaatgagttggctctttacattctgtttactaggaatctatatatcctggggaatttaaatgccaaagcagtttattcacaaatagtaaacatcatcttcagcatctgctgtaagaaagtatcataggctgcgaggcttacactgcagacatttatttctcacagtttcagaggttgaaaagtccaaggtcaaggtgatagtggtgaaagccctcagttcttggtgaaggccctcttcctggcttgcagacaacctccttctcactctgtgctcacatagcccgtcctgggtacgtagagagtgctctcttcctcttcttaaaaagacagtaatcctataatgaggatcccaccctcacaacttcatctaaaccttattctgttccaaaggcccgccttctaataacatcacatcagggcttagagcttcagatatgaattttggagggacacgaacatttaacccgtagcagtgtttttgttcagtgacaccaaatgtcaaaacattcacaagagctatggaatccccattctttcaggaaacgtgcactacaccaaattctgtttcctgctttttctcctctctcaggagtataacattggaagatcaaaataattatcacagaaaaacaacatcaaactttcattttccaagctagtcaccacaacaaacacacattcttggcttgggctttgaagagctcccttcatttcctctgttactggctatcagtgggtttgggtatgacacaccttctttctcacttgcagccataaaggtaaagggtacagagagagagagtaagactcacgaagccatgactcatttttgcatcttttggtttttgatcaaatgccaacagatggcaagagataaataaatgagtcttcaataatgggctatatggaaaccagtaacattatgggtgattattcaagtttcattattaattttcttcctccttaaattgtaaataaatgtcatacaatagacaaaggatacattcctaacactttctgggaggagagagaagttgcagttttcagctacatgtgtgacttactcacagacatgcgagtaagagatgaggtaataactgttcaccataagcctgtggtgtttcagatcaccatggaaaatgtgtgttatttatgcaacaaactataaaatatatttttatttcaaaacacattcattttctgcctcaatagcagtacaaaggggg

SEQ ID NO: 26383 - DNA, 1372 bp, Bovine  19866881057143
  misc_feature (1)..(1): n is a, c, g, or t
naaaaattagtgaagtaatacaaactgtctgctcttgatggagctacaatatggctactttacatggtcctcttaggcctaaaatacattttaaatttgagctgagagctagcccagaactcagtagagaattcaggaaaatgaaagcagaaaataatggttttgtgagtactgaatgaaagtgaaaatgaagtcgctcagtcgtgtccgactctttgcaaccccatggactgcagcctaccaggctcctccgtccatgggattctccaggcaagaatactggagtggggtgccatttccttctccaggggatcttccctacccagggatcgaacccaggtctcccgcattgcaggcagacgctttaacctctgagccaccagggaaggtgactgaatgaaaatacctgtcaatatttgagttgatctttcatttaatagatttcactgtaccttttgtgttttgttctattaggcaagtttagcaagtatagatgctgagcttcagaaacttaaggaaatgaccaaccaccagaaaaaaagagcggcagagatgatggcatctttactaaaagacctggcagaaattggaattgctgtgggaaacaatgacgtaaaggtaattgtaactacctgagagtaagcatgattatctgtatagagctcacgctttcatttttcacaaagctcttttcatgcctgtcatctcctcctccaagacccatctgtagtagagggtattagcttcattttaaatagatgaggaagagggagaggataaagggtcctcaaggagacatgctcagtcagtagcatttatctggactacatgtttagttttcttctctatgtaaagaattttgcacttagaaattattgttaataaatgactccacagaaagtgtgtaattgaaacaatagctccaggagtaaactgtaagtaaattagcttctgattgctgtaagtgtttaaaaagataaaaggtgagcactgctaattaattctctatatttggaaattttttaaacatacagtagtaaacaggacaatactgtgaacctcagagttaatcagttatcaaaattttgttacatttttttcttttctaataatctttttcagggtgcggatacttagttatattagcactagtgtgtagttaaaaaaaaattgcaacctggtagattttaaaacttagatcaaaaatacaagctagactcttaactgaaaaaacatgcacataacatgaaaggtttgtatgttgcagtagatatttgtatggacttccttttttttaaattaaagtctaattatagtgacaaggagagcaaatttataccttgagtttgtagtgaaagccggctaagcagcc

SEQ ID NO: 26384 - DNA, 867 bp, Bovine  19866881121340
  misc_feature (1)..(1): n is a, c, g, or t
nagggaaaaggaaagacgcagctgaacaaccgcaactttgcttttggtttattactgacgtacgtcacaaaaacaatctcaactgctgacatgtctctctccctacctgaggctggaaggacgccgttcaccccaattccaagcaccacatcctccttcatcttgaatcccatcagttgttccgatgtcaccaaagcagaagcagcaaattgagcactagcagaatccaaagtcttggacacaaaaccctacaaaggaaaacaagagcagagctaatcagcaccacttagtttccaacgattattaaagctacacagctatatgccaaaatcagtctgcacacaaaccaaagtggcaaaccactgaaatatctccatttcttctcgacagtcataactttgattaatgttcagcaacagcatcttgtaacccgaggattataaatttaaaaaataaattcttttttgctgtacatcgcattttggaccttagttcccagggactgaaccaacactccctgcattggaaggtggagtcttaaccactggactgtcagggaagtcccaaggattatggattttgatcttatgtgacaatatataacatggaattaccaaaataaacctttaaaatgtggaaatggtaaacctccaacacaaagtgttagacaagaaacacactagtaaaacatttcagtgatttgcaatcaatcaatgcatgaataaattcatataatgagtaagtgcataggcaaaatttccttcaccaaacttacatacatacatacacaaccaaaggcagccaagggacagtaacagaactacccctttagaacagaaggaacaaaacatcgatcacatcctaact

SEQ ID NO: 26385 - DNA, 1014 bp, Bovine  19866881213710
  misc_feature (1)..(1): n is a, c, g, or t
ntattttgtcagtgttgcctaaatttcaatgtacatattttctttgactaatgtctactaatgtaaatgtatgttaaaagaaaattgtatgtgactaccacatacgagtagaaaactagcatcacttgccataaagaaaaataaataagtcatgtaatgtaaggagaaatatatttaatccgtttgtcaaaatgttctccgatgagaagaaaagtgtttaagatcagtgaagaagtaaagatattcaggtcaattttgcatagcttaaaaaaaaatatgaggatctacagtcatgagaatgtttccattttgatgtaaacttgcacaaagaattctaattcacgtgcattcatcgtttgaggggtgattacacagaatttactcttttgacagttcctaacaaaagtgatgaaagtgatttttgttcaacaactcttagtcaaaaggtaccatctgaagagattgtcaaagtttgtcctcacatagagttatttggtgatgacacccaaagtgatgcaaaacacattccttagtcactggaggttgccagtagagttggaaaaacacttatgagacttttttttattaagtggtttgagtctccttagctcaaaattttctcagcaagatgtggggactcctctgtggtcaggtggctaagaccccacactcctaatggagggggctcggttcaatctccagtcagggaactagatcttacatgccacaacaaagttcgaagatcccaagtgctgcaacaaagacccactgcagcaccaaaaaaaaaaaagatctgagatttgagctagggcttagttctaaaccaatgtgatcaactaacaaaaggaatcacacacagtaaacaaagtgtgcctccctgggtccagttttaggaccactgtgtacactctggagaaggcaatggcaccccactccagtactcttgcctggaaaatcccatggaccgaggagccggtaggctgcagtaccatggggtcaccaagagtcggacaa

SEQ ID NO: 26386 - DNA, 1163 bp, Bovine  19866881418646
  misc_feature (1)..(1): n is a, c, g, or t
nttgtagcctgtgttggaatttcctttggtgagcttccgcttaaaaatgaattttctaagaaataccaaaatccctgggtgtcatttaatgttacatttctctatgtgtcgaagttaccccagcactgcatattaccatggtgaaactgcaagagttgtaatctattcttagaaagtatcctctagtcactagtattctccttatgaatatccccctttgtttgatcaatgtccacatggggatatttattaccttgaatcagccagcattctctcctctgtcagcccccttgttcagaattgttttatgaagtttaatgagcaaaaaggaatgctgtacaaaagcatatttcacaccttaaccatgtagaccctccattgattggggaattcctgagcaattttaatttaaaatgtgccttttccacacccattcctcctgcgactagattcctttccaggctccacttcaagcctggctttccacgttctttcttcctgtttggaatgcacagcttcccagagttcctggaactcttctgaacgtagtgattagggtctcctctaagacctttgctgaatgtagatgccactgctcactgccccagagaatcaggcacaaggcaggcttggtggttagcagaaaatattctctgagtcaacctacagcaactattattcaatcttttagctgttggagtgatttcttttctccctctgttccatgaggtagaggagatggggtgtgggggaggggggtaacccagctatgaagaacaccccaaatagggtcaacattggccccctctcccagttttactgggatatatgcattgaatataaccttgtattagtttaggatgttgaacataatgatttgaaaaatatacatatagtgaaatgattaccacagtaaatttagttagcatccatcacctcacatgatcacaatttttccccttttaagatgagaactttgaggatttactctcttagcaattttcaaatataaaacagtgtcattaactttactcaccatgctgtacattacatccccagaacgtatcttatgactagaagtttgtaccatttgatcaccttctcctatgccccacctccacctcacgcctctaaaccacctgtttctacgagtgggcttttta

SEQ ID NO: 26387 - DNA, 1434 bp, Bovine  19866881471395
  misc_feature (1)..(1): n is a, c, g, or t
nacttattcatacctattcattccagtgaatccctttcactcacatccatccaccatgtatgtatgttatctatatttaactccccattagacaacagggaaatagaaaacaagtgtactcacactaccctcagccaaagcagaaatgacatttccaagagcagaaagggacttgttgatgttcttagcttcatccagcacagcaccttcagcaccagttttactaacctatacataagattgcaaaagaatgaaacaaaattatgtttcagtgattctaattttctaaaacgttcagaggtcatcaataactagtaaaaaagaaaagggaaagcttcaagactttgtttgccaagtatttaccctggtagtagcagtgaaagtcactcagtcatgtccgactctttgcgaccccatggactatacaatacagtctatggaattctccaggccagaatactggagtgggtagccttttccttctccaggggatcttccccacccagggatcgaacccacgtttcccgcattgcaggcggattctttaccagctgagccaccagggaagccccagtatttactctaagttatcagtatttatcaagtatgacttttctgagaccttggttttttttaacatgacaaaaatgagattaaggagataccaaattttatttttaggtgtgctcatgaaattaacctatttatatgtagatttgtattgacagcttactaatgtgttaacccccttcgatgcatgggaaaatgaaactaaaaaatttactaaagcacaatgttgatgttgtgatggttagagagagactgaatttacatatatcaattttatacaagcaaacttgcttctattaaaaaaatgtaaaatacataaagataacagaacaatatgtcagcaatgatgcctgaagcagcagcttctcagtatttgcaaaattagagatacactttgaaggatgtgtttaagatttttgtgtagaagggagcaggtatattattccaatcagaagaaaacacaaattagcagaacaaacaacaaaaaaaaggtcacataggtcagtattaagacatttgaacttattttgattttgacataaatcagaatcagattgtataggactataatatttaaataatcctccaaaaggagtacggcgaaatccaaaaggacttattcatggacagtttttagagggaggccattgtcagggtcaataaaatagacaccaaaaattaggaaaaggatacctagtaaaattcttaatgacatacattcaacacactatcaataaagcatacacctatgtcaaggataacacttatcggcagaattggattatggcctaaaggacagtaatttgcaatgacaaaacactggcataaatgcttatagctctcaaaactaccaccaaacccagt

SEQ ID NO: 26388 - DNA, 2231 bp, Bovine  19866880531000
  misc_feature (1)..(1): n is a, c, g, or t
nttcaggcaaataaaaatcattattcaagaagaggctataattactcaaaggaaagtaccctcttttcatgatcaggaaagccacacagtggcatttggcatttagcttgcaaacgtgtgcccacatgaaattaaaataattaggtataagggccaacttaattcaattctaaattcttattacccaaataagtctcaagaaatagagcgaccgtgccagcaatgtgctagatttcaagcccgaatgcaaacttgccatctgctgaggcacaggacaaggttttcaaagaaaagtgaccgtaggccattgaaaatcttcattagaaacagaccccactgcatgttgggaggtgaggcgctgcagtcccttgacaacagcaggactgcccctccaagtagattttcatgcacaaggaaacttttttctttgcttcccacttgatcagcagggacagtgctccttttggaacaaccatctggattcagaaacacaaaaatggtcccagaaaattacacatgcttaaatgtcaagagtatgtggcaacattaagaagcatggaaaagatgcttttcctattacattttctacattaatttagcagccaccataggtggaaacacttggctcatgtcagtggcttaagtggcatgaaagccattttgccactcacaaattatgcagaaacagctttagttagatttctagtacaaaacaggtctgcctccatgcaattttaaaccttctttatcctaccttgtgatttgacatgacatgacatgatgtgcgtgctcagtcatgtccgactctttgtgaccccatggacagtagcccatcgggctcctctctgttcatgggattttccaagcaagaatactggagtgggttgccctcatccaggggatcttccagacccagggatcgaacccacatctcttgggtctcctggattttttaccactgcgccacctgggaaacccatttattctatcgcaaagaaagtcaaattttaagttaaattataatggaaattatccaagaaaccacctccttttggaaggctacccaacaaagaaaataaattgttcaggaaagcagcagtgcatacaaactcagttgacttatgaactctgccatcataagctttccaccttctatacaactaaggttcctagaaaaagcactgggcacacgcatctgtgagacaggaagcaccttgaagtgaggcctccaccctgttctcctttgtcccccacagcctcttattcacatgatattttatcaagaaagcaatgaataatatgaccattcattcaacacagttgtcgagcatccattctgacaagtactggaggtacagagatgagtaagccaaagttcttttgtttgcctgaactgttttttatttatttaaaaaaatcaaatatatacaagcacaagaagtctcaaactgcaccttaacacaaatttcgccacaaacagaaactgcaagtgaactctgcttcttcccgtggcttcctgagaggccaaccagtgagccccttcggtagactgtgattggctgggcattttcaaggggggaaaactaaaggaacgtttcatttttcccccttctgttttggtcacaccgtgcagcatgccagatcttagttccccaaccagggatcgaacctgcactccctgcattgtaagcatggagctttaaatgctgctagagaagtccctaaagggccatttctttaaaaagccaaaagggaatgtcaggtaacttgtttggtttgttgtgacccccagttcagattaaatttcctaaggaggtgaagtaaccctggatactctcaacagttaagagatttcaacatcagccatactagtactgatgtagaaacttgctccttaaccctcatcagatatactaaggtcactaatccttagtcatcgaagcagaattctcatccacagcagctttcccatcattgacatcaccttgtactggatatggatgctggtactgtcatcccctctctagagggggagacctccgtacacagctgacccaacaaagaaacattcctgtccagggccaggagccgggcactcatctgccctcttgatggttcccaagaggagaatgttagagttggaatccagccctgccacttaaaccagctgagtcacctactggataactactcatcctcctagccctgcctgcctctgtctagataggcag

SEQ ID NO: 26389 - DNA, 3745 bp, Bovine  19866880550163
  misc_feature (1)..(1): n is a, c, g, or t
ntaaaacacttagcagaatgtggcacatcataagaattaacacataacaatgagcatttggacagagcctttacatctgctttttgtctcatcagaggcctctgatgaggtgaggttaaggaaatgacccgtttacagtatttctcaagccaaacgaatttgcagacttttccataactgatcgtgagccttatctgatgatgttttcaagatacatggtaacaacttcaataaatatttataaatgttagcaaataaaatcatttgaagagtaatagttctgagtccatgaagtgcactgagttcagaacgaaaggaagaagtaaatcaccgacttgtttcatgaacttcaggaattcctgaactctccatagtctcctcctttcatttttttgtagacagttttctttgtaaactgaagggcctgaaactaaccagcccatgaatggaccaactttattacttcaagagataaattaaaaaaccaaaccagtttcttaagaagtcatatatttactgcaaatctgtttgtgcctcttgatcaattggatttcaacaccccctcctcgcgtctgactcaggtcagctaatgcaggtgtgcagatagcaatatagtagaaggcagctgtgctcccataaatattatccatgaagattcttgagtcacgtttcctcaaggcacgtgtctgtgatcggcacttaattttacccagattttgacttcttacaatattatggatctctacatgcccaaacctgctagtgtttttatttcataattattgtcaactgtaggagggactttgatgtcaaaaatcttgtcttccattttgcgtgtctccggaggctgatcctgcccttctttcctgtgtgatctgacctcccatcaggatggaattttgagatgatgaactgcaatgcctacgcttatgatttccaaagaaaccaattaacctttgctgtgatcttgaccttcatcagagcttgcaaatgctaatccttggagcatcttcctttgataaatttagcacaaatcaatatcagaaataacaatttctgaggtatttggagaagtagccgatggaagaacaatgaccttgtccattcccctgtcacgtgttgtctggatgaagaaagctgaagttcacacctgctcctgagcagaaagcagagtcattctataagctggactgtgagcgccacaagggcagtgtatctgtaagtccccacatcatgcctggcacatagtaggctctctattccataaacattgttctgataaatatgtcttccttcggtgagcatttactaataaaggaatgcatggaacagtgaactaataaatttatctattgctgtactgggcttctccactcagcagcatggaatctgcctgccatgcaggagacacgggttcaatccctgggtaggtaagataactgggagaaggaaatggcagcctactccagtgttcttacctgaagaatcccatggacagaggagcctggagggctacagtccatggggttgtaagagtcagacaggacttagcgactaaaccaccaccaccatgttgctggactacagttaaaaaaaatatgtaagagagcatttggttcaggttaaaccaagatcatttctttattgtaatggaagaagcatttcagagaaattaaacaaagaattctgatactcagattattttctggaagccttggttcttggctctatgttattgaagatggcatatacttttgaagagaagtgagaaagcagagtaagggaacagaaggtgtctgctggagtccccaggggtgaatggggtctccagaaccgtgggggccacagaggatctgacggttcttgggtcctgggaactcttgtaagtggtccagaaagttggatgcccttggtggtgctggctaagtcagcgctataatgatccctggtcattgtgttgtgaggctgcggtcatggccctccatgagcccctccctgcacccgcatctgaccttggactggacagattaccagcctctgacttacgttttactgatatttctaaactgcctacctaccacctgtgctactaatttcctaatgctcttagtattttcctataaatggactcactggaaaggacttaagtttgtccaagaatcacttaaaccatctgctttatgagtcacactttgggaaacactggcttactcagcctcaacctgaaatacaccacctttgctgaaactcctttgtctctaagcaatatctctgatgtaggattcttttgtgtgtgtgtatgttgcatatgctctcatatgctgctgctgctgctaagttgcttcagtcgtgtccatctctgcgaccccataaatggcagcccaccaagctcctccatccatgggattctccaggcaagagtactggagtcgcttgccatttccttctcccaaatggatctcctatggaacttgcctaacacaattatggattttattttttttaagattcagggtcttatgctcattttaaaatacagtacccccatgctctaaacgctataatttcagtctttgcttttcatagagcttatgatttcttaattttatgtactgtcaaggaaatagacttagattttacaacctaagttagaaagatgtttaacaaatctcgtgaaaaattgctaaaacataggaagtgttcttttgaatacagaaattgcagttgatccttagaggagggtaagaaactcagtatccttgttcttgcccctgccctgttacctgttataattagcttttttatgggatagaaatcttccgttctttggagtttctcttataagctggctttatttaggataacagcagatgttgttgatcttggttatctccagcttctgaggggcattttcttgaggcaagaattccaaagggatctgtgcttctcatctgtgttcttgagattcagacagacactgtctgagtgttgatcctttatttctaagctttatgaaatcagaatcacagtgtatccatacatagaaaccctgacgattctggatttactattctcagatccctcagaataaagctgtaaattcttactacctgttaactttattttctcttgacactctgtggtgactcttgaaccattgaagggctttgattctaaggcacatttttacacaaaattgagagtttgatgttttattattttgttctgtactgaaagggatattctaacaattggccccctgagcttagattttggatcgactaactatccttggtttcagcttcattctttcagtaggtatttatcgagcacctactgtgtcccagacatagtgttagattgtagaggtgcagcgtctttccttcaaagaccagatgggagactggccagcccacctgaacttctactagatttcattcaaaggcctctgtgttttttcgtttgtttgctttattttggtttcgaacagttgttgatccacatatttgccatttacttctggtggccaatgtgttcttttcaattctggctcaggaaataaccttccttattagttgacggttgttgttccaaactttatgcttatctcaagggttttaagtatgggatgtataacttaggttgagagttgtgaacagtaggaaaaatgtcatttgctttgcaaagtcctcaaggccacagattccttgttgctagctgtatcggctttcatttccaagattcc

SEQ ID NO: 26390 - DNA, 1135 bp, Bovine  19866880556146
  misc_feature (1)..(1): n is a, c, g, or t
ntacaaacttacagtccataacagtgtatttgtctgagactctggtgggctggattattttttaagaatctcttgcaaatgacacattttttaaaacatacctagataaaacttgaggaagcatagctgagcatggccaaagttgtccttgaagcgttatctcctgcaaagaacagaatgtcctttaaggtgggagagggtccttctctacttgtgccctctgatcccttccttcaccctccctgcctttctccatgctccgaggagctctcatgggatcccttttggtgggtttctgacaggatggcttcaccgactcgatggacatgaatttgggtagactccgggagttagtgatggacagggaggcctggcgtgctgtggttcatggggttgcaaagattcggacacgagtgatcgactgaactgaactgaactgataggatctggcagcagagggcaatggaggcaggaagcaggcagtgttcccctgttcccttcacgcttcattgtctggctcagcaagtggcaacgtgtccccgtgacacaccttctgccagcgcgagcacctcctctctgagtccagctctcaccgggccctccacttcctaccaggccagcgtctatcacagcttcccgctgttttcatttctggtgctccgaactctcttaccctgcccactccactgtccagtcccttcgttaaggaatcttctgttgaaccacctgagaagttttctatctcctctgggaccctggttgatatatgcaattataatacatttcaatattttcccatgcaacctacttccctatcagtcatgctcttagtttaataaaatattttccatcattaaaaaagaaattctggagaatctccaactggcacatgcagcttttgcaaggtcataataataattgccttaagggaaatagtcatttttagtattgcttggaaacgagattgagaaatgcagtcaaggaaataccatctatgctcatggcttgatgtcttaagaaatgtgataaatgggaaattagatgtcggaacaggaattcacagaattgagttatcaaaagatcatttgatcatttctcattttgcgttcccactttaaggcaaagtactaattat

SEQ ID NO: 26391 - DNA, 1122 bp, Bovine  19866880620906
  misc_feature (1)..(1): n is a, c, g, or t
nactcctctcacggccaccctccagcacatgtgtatttttgagaacattctaggtaatcagttgattgtattagaacagctgacacacacatatttagttcctttttgcgctgtttgtttcatagaatcacttatttttagagtactgggggcatgtcttatttttccattcctgtatcaagggtccctgaggtgctatcagctacagttggagtttaagagcatctgtaaagatgtaatacattctttggaagaattggtatacaaaacaaaagccttgtatgtgcaataaaataagtcagaagttggttatgaatcaccactttcctattattctagcactgtgctctgtggagcagaaagaggttttaagcatcagaaagttgttttttttttaaaaagacttaagcacacaggatgtggaaggtttggcctagaagcaagttctgttgcatttcagttgtgtgaccttagatgtattctactcaattgccctgagtctcagtttccccaactgtaaagacgatggggctaaccactttcaaccagcttcttcctgggaccagttcctcagaatccaggaagaggggggcacggagctcagagcaagggaatttgaggaggcgaaatgacatttacacccggaactttgatttccaccgcagacagcggtgtgctctgacatgtttggggacatcaaagtgaaaactggaactcagaaactgggaaaacagctcagtggggcaagaagccaggtcggggctctgccagagtggggctcacctcaggaagcaaagtgaaaaggatctgagacagctgtgatcacgtggcaggtcagctccctcacccgctccgagctgtgatgtccattctggaaggaaaagctggttccagaggcggctctggcagcagtgccatcaccatttgccaactggcaggtccagcgtgagccagaagcctcttctcttctcgttagtcttggctgcatttttgaagagtgaatgtttcttgtataaaggaggattatagaaatcctatgaaccccactgaatcacccaaatcaaatggaaaagaaaacaaacaaaatgcccatggcctcttttcagctccttctacacagat

SEQ ID NO: 26392 - DNA, 848 bp, Bovine  19866880675652
  misc_feature (1)..(1): n is a, c, g, or t
ntgaaatccttttgaaaattaaaaaaaaacaatttttttttatgtggaccattttttaaagtctttatttaatttattacaatatcactggtgtttttggccatgaggcatgtgggaatcttagctccctgactggggtgcgaacctgcactccctgcattggaaggagaagtcttaaccactggatcgccagtgaagtcctgaaaatttcttgctttaagcttgtatttcttccttgggaaaagtgatgagtgagccgctatttcatccctcattctcagaccggtacatactattgcattctgaactgtatctgttgcatttcacgataaagaattacgttcatcttcacctgagttcatagagttggctgtattttatagcacctgctttcattaaagtctaagcacatgcaagaaaatgcaaatacagttcctaataagcgctcttggatgggagaggggtttttaacaaaatttctttgtcttgtcccttccagcaaataccatttttgctgtttcaccatctatgatgaaagtaaataaccttctaggtaatgaacaaaagactacattttgtgaaacttgtggtcatttaattggattagaatgaaatagtcacccagcgttcctttatttttttcttccattttttaaaaccttatcagcctgtgaaggaaatggcaacccactccagtattcttgcctggagaatcctgtggacagaggaactgttgggtcgcacagagtcggacatgactgagcgacttcactttcacttttcactttcatgcactgggagaaagaaatggcaacccactccagtattcttgcctggagaatcccagg

SEQ ID NO: 26393 - DNA, 1168 bp, Bovine  19866880713889
  misc_feature (1)..(1): n is a, c, g, or t
ncacgtgctgtacagtctccctgcttcctccactgccgtctttctaggtcaggagtcctgcttccaggctgctctcccggggagcctccctcctgctgtctcccttcctgccctcgattccttgcccttctccacgtttatttacagtcgctttctctttctgaggctgccggggctgctcaaataggccaggccccagccctccccgacctcgaacccagccgccccgagtgggccctgggcaggcagccgggcgtggaggccggtgtggaaggaggcctggggcgagctgagcgctggccgctcctccagagctcggggaccgctctgacctccctcgctcctcctggctcgtttataatcagcttttccattatcttgcagcgaagccctctctgagtcccattaattgcctgtagctgcagctgggtggttcatttactctttctaatttggaggatgcaagtggtttaacccttgtttgttattttaaagcttcaggggttttgtaaactttggaggcactaaagccagagtggccagacacgtgctcacatgagtctaagcacacacaccgtggtgcacaccacggcacacacagggcggacttttggggtgaggcattggggaagcaggtaatttgatttgagaggctggaagtaagggcagcacccatccctccaacccaaggacactgacatcacctcctccatcaccatcaccaccatcacctccaccatcaaaaccttcacctccattgccgctgctctcaccactatccccatcacctccaccatcaaaaccttcacctcaccccgaggcctaaaattccaccatcgcagctttattcccatggcttaattattggctttcttcagccattctctctgaattatgttagtgtaaaataacaaggcccagacctgcttttctcagtgactgaatgtccccaggagtaagagccagtggggagggctctaaaaacttcggctagccaagaggtttgttcgggtttttccaaaccatgagaaactggaacaaacctcttggtcaacatgataaggttggaaaaaatgtgcatgggcgtgtgtgtgtgcatgcatgcacatgcagaaacatgtcttatcagttaaatttaaaaaagcctacgacccctctgcgacaggat

SEQ ID NO: 26394 - DNA, 2093 bp, Bovine  19866880726392
  misc_feature (1)..(1): n is a, c, g, or t
nttatactcattcaaccaaaatttattgaacacatactacgggctaagggcttccctggtggctcagtggtaaagaatccacctgccaacgcagaagtgggttcgatccctgggcggggcagatctgtgaaggaagaaatggcaatgcactctagtattcctgcctgggaaatccaatggatagaggagcctgatgggctacagtccacggggtggcaaaagagctgcacacaacttaagtgactcaacaacaactacacaacagacaactttctagggagcggggctgctgtactgcacaaacgtgcatggtgtccaggttcaaagagccggcctgtttctcacctataccaagatgcactatattccaacattttaacatctctgagccagaaataactactgtagtgctgtctcaagaataatattggcgcttttttgggtgtgtgtgctacatacaatatggggcctcttacaaccgagaacaatttacctagatttagctttaaggtcatgttgtgaataggaaatgtattggatgagctttcaaagtcttgctctgctaacagtttaaaaagcacataattacttcttttaaatgaaaataaagacagttgattaatctgtacccttcttgaatctacgaagtccacactggtttacttcttaaagtaatacgaaaggccatcaacactttctattcaaaacagctgccactgatttgtaaacagtaattgtgctaccaacggatttttatgtcacaaaccttattgaaccactcaggacttttctttttagccaaagacaacgttgtggcaaatccagctagcattcctgctgcagcaacagaaccaaggaaaattccacctgtcaagagtttcggcggcaggaagaaaaaacaaaaaacctgaagttaaaaagatggacacaaataagtttcagatactatttaaaaatcaatttcgaaattcgagaaacgatagctaagaagctcctggcaaaggtaaatgatagcggctgtgaaacctgcgtggccgcacgacccctggttcctgaggccattctagtgtaagtgtcccaagagtacagaataggcacagggtctcttaccctctttctcccgaggacgaaaaaagagacattgggagttagaaaggggaggtgctgtgggcgggggggagacatgagagaaactacagagggaacggggtaaatgcagcctatacagaacagccactaaactcagggcactcaaaccaaggtctcccccggcagcgtgtgcgtgggaacgcccgctccagcgcaggctagcgccccgggtgagcctgacctgacacccgcacctcgccacaccacacctttaaccaggaaaagccggtcatcggcagacaccgaggcctccggctgagaggacggttcagccagccctgcgtcccccgcctccatgtttctgagctttcgctactgcgtccgccgccaactggacccgggtagaaacgagcgcgagatcgaaaagaaaggttccgctgccacctccctctgtgcaacccgaataccggtccggagaacgacctctgcacgcaaaccttctctgctgccctcggggcccgggcgaagatgctgtagcttgcaccctggggggcagtgtcttccacgactgtctaacccgggaggatcatttgcccgctccaaggtgatgatcgatgcgcttcaatccatacctacttgaaacactgttaggctctgactataggaggcagtgaggggtcgcagattgcgccaggagcctagtctcagcctggttagagaccccgcagctcggtttcccgatcggcttcacactgtatccagggagttggctcagtctttcctccgtactttgctgggaaatttcgtaaccgtaaagctgtcactttagatgtaagtgacagggtgaatatatgctttcatttctttgggggaaatactagaggtggaattgatgagtcagagaacagacatatacttagttttataagaactgactcatttgaaaagaccctgatgctgggaaaggttgagggcagaaggagaaggggacgacagaggatgag

SEQ ID NO: 26395 - DNA, 1578 bp, Bovine  19866880806628
  misc_feature (1)..(1): n is a, c, g, or t
ntgattttaggaattctctacaaatggaatccttttaggcactcatgttataaagtgttgattatagcatcatctgaaagaagcacaatttaatggaaagggcctcatcctgtacttaggaagtctctgctttgttagcccacatgtgcgtgctcagtcacttcagttgtgtccaactctttgtgatccaatggactgtagtccgccaggctcctccatccatgagattctgtaggcaagaatactggagtaggttgccatttccttctccaggggatcttccagacccagggatggaacccgcctcttgtacgtcgcaggttctttaccatctgagccacgtagtatgcccacacagatcccttcataccttatacctcaagaccccttgagaagttctctctcccagtgttgtcacgtatgcttctcattacggtattgagttatctttgcacttgttatagcatctgtatggagaaggagaacattgggtatcacatcttaattttaatttagataaacctgtgacctttttcttgatgattttataatactgccagtactttggccacctcatgcgaagagttggctcattggaaaagactgatgctgggagggactgggggcaagaggagaaggggacgacagaggatgagatggctagatggcatcactgactcgatggacgtgagtctcagtgaactctgggagttggtgatggacagggaggcctggggtgctgcggttcatggggtcgcaaagagttggacacgactgagcgactgatctgatctgatctgaagtgaaagtcactcagttgtgtctgactttttgcgaccccatgggaattccccaggtcagaatactggagtgggtaacctttaacttctccaggggaaccttcccaacccaagaatcgaacccaggtctcgcgcattgcaggcggattctgaaccagctgagccacaagtctccctaaactgaagattaaagagaaaaatgacaccatgagcgatctcgtctagtcatttctgaatttgaatttatttttaaagtgaatatttaaatggatttcatccaggtaataatatcttagtgaaactcgctttttatctcatacagtagtgagtacatgcctaacatccaataaatatccagaaagtctatgttaatgagtaaggtaaatgcagacagtcagcactctatcctcccactacattcttaagtctttacactgagaatgtactgattttttcagttttacattcttattttaacttaaaaattgagactactttatagccaatataaatttgctgatgatggttgtataataacttaactcccatcatacaagcacaaatctacttctggctttgtataggaattataggtgttaggcttgtgcaatagaaaatacttaccttatttttgtttttacaagattgaaatttattataaaagaaccagaaagcttagctgatttctgttgagagtgaaattgaattactaccacctgaaaatcatgtgtgaaggctgaaatactccctactcccactagagggggattccttccaa

SEQ ID NO: 26396 - DNA, 1493 bp, Bovine  19866880833387
  misc_feature (1)..(1): n is a, c, g, or t
nctgggcatctgtccttagagccgtgtcccaacccccctggctctgctaacctgttctacgttagcaacagagtgtgctccccaaaaagcttttccctcagccctcgacttcaggctacagagcccctacaactttgctctcattacttacttaacaaagaaaaatacgctttaggaagctgcattttcctctctcctctcccagtgcaaaagtgacattgatttgcatgcctaggaaggaccaacctgagcccattcattaccatggaagggaagccacatgtttgaacactggctttcagcacatcattgtacttttttcccctggctgcagaaagtagaattctttcaataaaaacttgccatctaaaaataaagtagtggcaaactctgcaattatacttctccattggagacaactgctttccactctattttccaaaatggacaaggtccaatttgttggtcagctaatgggtcacacccaaggcccaaatgtagtgtaatgaactcgaaagccaaaatgatgtaggtctgagttgctgtgtggttgttccccgagtgcagcaagtacatttactttccgtcagctgtgtgctattcctctcacctgtgccccacagagcggggccctgattaccgtttgcccactttcagcccaaggaccatcaaatgaagcttagaggcagctactggcaatgtgctccttgtctagttccctcctctgctgctgctgctgctaagtcgcttcagtcgtgtccgaccctgtgcaaccccatagacggcagcccaccaggctccgccgtccctggaattctccaggcgagaacactggagtgggttgccatttccttctccagtacatgaaagtgaaaagtggaagtgaagtcgctcagtcgtgtccgacttctggcgaccccatggactgcagcccacccctaaccttcccccttctgctcctttccgtttgcagctcttcatcctcccattacaggacagcatcaggcttgcttgtggagttctgggttaccatggtgacttggagttaccaaaaaggttgctcagaacctatcagaagggctcctggacactacagactgatggctcttattgtctcactgggagtttctagcaactcaaggggtaaagaatctgcctgcaatgctggagacccgggttcgattcctggattgggaagatttgctggaaaaggaaatggcaacccactccagtattcttccctgaagaatcccatggacagacgagtttgtcaggctattgtccatggggtctcaagagtcggacatgatttagcaactaaaccaccacagaattgtaccattaactagatgagtaattctggtaagaggattttacatctaatacatcagggttctttgaaggaagaaaggtgaagtcgctcagtcgtgtccaactctttgcgacccaatggactgtagcctaccaggcttctccgtccatgggattctcca

SEQ ID NO: 26397 - DNA, 1328 bp, Bovine  19866880877119
  misc_feature (1)..(1): n is a, c, g, or t
ntttctctaatagatagtaatttgttggcactggctctgacagaaaacagatgggtccagcattaagcacaatgaaggcagcagatgctaggccagcccacctcagctggacgggccttgcagccaagtcctagagcccacagttttcaagtgggttcatcttggcacaccagctttggaaaattggtcaccaaatgaattcagattttaacttaccgggagctgtattcaagcaccagataacggaagcaggagctacactctattcacatcctcagcattattttaggaggatcacaaataactctatacctgactccgcaattttaaaatttgctagttaatattaatattccaaggttacggctcctatggaattattaaatgtttccacttattttgcttcttggtttcaaccatccaacaatgacttaggaacaagtactgcatgcaaggtcctatattatttccctttgctgtggagggtaaaacggtgcacaaatcacagaatagacacttgaaaaaaatgaataattagctatatattatgatgaacacatttgtgaattaggtttaaatcagcactttttatggttatctactacacacatttactactacatctgtcatgtttattgaggcagaatttctatgcattagcatgcatacatgccctatgaccaccagcacagctaagacatggcgagggtatttctatcaggacaaagagttgccatctggtggtcaatcttgtccccagccctggcagccactggtctgatttctgttcctacagtgttgctttccccaggatgtcatgtaaagtgactcatatagtactgagtctagctcctttcactcggtattgtgcttctgaaattcacccataatgctgtgcatatcaggagtttgctcccttctgctgctgagcagtattccattttctggggacatgtgggctgtccctgtttctggcaatcgtgactgaagctgctgacatttgcacacaggtctcccagtggatatgtttcatctctcttggtaaactctagggatgactgctacctttgtacattaagtgcatttttaactttgtaagaaactctactacgatacatatgagagttccaagtgctctactgtacatccttgatattgcaaaattttaaaaaatatcagccattccagtagctgtgttgtggatactgttatggctttaattttcattttcctaatgacaaatgattttgagagcattcttcatctaaataagatccttgctgtgtaaaaaagttgtatttcaaaaaccttcttccaatgctactttt

SEQ ID NO: 26398 - DNA, 755 bp, Bovine  19866880984784
  misc_feature (1)..(1): n is a, c, g, or t
nttcgtgttataattttaaaataacaggattaggaaacaagaaaaagtctgggagactatttgttgtgtctacattctgcttttactctggttttttggcagttgggtttttgatattgtattactgccttagcgtctctgtgtgcgtttaagggccgaattgtctggcagaattgtggttgaaaatctcacaaattctaaataataaaagtcaaaaatatatcttagttgcctcgttgcgataatggtctattttaatattttcctgaattctgctgatgtcacggctaccactgaatcagtaagcagagagttttgccgtgtatagtttattcacttgcacacagccacagtgtccttgcagtgtgcagtgattgtgtggtcccacatgccaagtcacaggacttgctgctgtgatttgttgcccactttgcccatgagtgggcactggcctccatctgagcagggaagccttctttccaggccagaactacctctggtgtggctttcctttgatcttaggtggaaatgtgaaaggaatgattcaggggaggaagtgaaagatgtacagggaattgtaggtctcatgctctatgtgatcaagtcaattaaatcctacggagctacacattacaatttaaggcccttatttggctgcctcctaagatgccatgtacatttttctaagaaattcctcttaaactccctccactcttcccaaattaaattttcatttcagtatgactttcttatct

SEQ ID NO: 26399 - DNA, 1627 bp, Bovine  19866880987976
  misc_feature (1)..(1): n is a, c, g, or t
ngaggcctggcgtgctgcgattctggggtcgcaaagagtcggacacaactgagcgactgacctgacctgatccgaaagtgcaagcagtcaggcaaggatcaccagagaaacaaacgagcgggaataaaaggaacttgcaggacatagaaaacttagaagaaattttaaaaattatttttggttgtgctgggtctttgttattgtgcatgggcttctctagttgagatattcagttgctttgtgcaggcttctcatcatggtggcacctcttgttgcagagcatggattctagagcgtgggcttcggtagttgtggctgctccttggcatgcggaatctgccaggaccagggatggaagtcatcattccattgtcttctggcttcaagctgatatttcagatactattctgatctcaatattttgtataggacctgtttttccctgcctgatgatattaagaggtggggcttttgggggtgggggggtgatacagtcatgtacttggagctctcatgaatgggattagtgcccttgtaacagtttgcttccttctctctgctctctaccaggtaaggatacgaaatggcaacccactacagtactcttgccttgaaaatcccatggatggaggagccatggacggatgctacagtccatggggtggcaaagagttggacacgactgagccacttaactttcactttcactttgcaaaatttaaagcaatttatagatgtaggaatgtacattatttcaaagttatttagtctgttcttttattaaaatcaggaaaattaaataacttataataccatttctttttaagtgagagactggtatctgggtttataatatataaagttaaagattttttcatgggctttcagagccttattgaacttctctgtagacaaaatgttttgtcatgttaacaaagtttaagaaggactcaacagagatattgcattagtcattttacttcagtgtgctaaaatgaatctgattgtaaaaccaatttggttaaggattctgagtgcctgtcatttccttcaagaccaagttcaaaatttacttcctttatgaagcattcactgatgtcttcttccacatggcaattagttatttaatatcctttatatttaaatatttaaagcatactacaggtaaaatcttattttaatgagtacaattcaaatgtgcttagtttaggtctattttatgctgtcagcgatactaccattgttttattaacttgaatacaataaagtatatgtcaggaagtgaagttaagtcgcttagtcgtgtccaactctttgtgaccccttgaactgtagcctaccaggctcctccgtccatgggattctccaggcaagaatactggagtgggttgccatttccttttcccatatgtcaggaagtactgtataaaaatgactcgatgtaaatactttttttttgatatattctgaggaaagtcaattatttcccaaagtatattggaatttttttcttgttttcactatagaatgctaaatattttttaagtttctataaactcttttgggacaaagaagtggaaatcagagatatttagggaccccagtcagagggtcggttttacaggaa

SEQ ID NO: 26400 - DNA, 2672 bp, Bovine  19866881027869
  misc_feature (1)..(1): n is a, c, g, or t
ntgctgagctgcgcggctgtgagaagggcgcagggggggccccgctcaccaggcctcccagcctggagcgtattctgaaggtgaggaggggcttcttcagctttttccagcagaaactgggttagatcagcaacaacaataaaagccagcaattcatgtttcctgtgtgctaacctcagctccaagttctcagcattacctcctttcatccttatgtcaagcttaagagagcccagtcactggcgtcctcacttcagggaggaggagcctgaggcgatatgcagagtgacctgacccaaggtcatgtggctaacaggcctcaaaaccgtggtctgaataccctattccgctagctgcacccaaatggcctctcaaatacttaacagaaaaccacaccgacataacagcatggtcccaatcatgaaagcaggttttctttaagggcacctacaaatctgtaagaagcccagagttttcaacagtgactgatgtcagctctttgttaggtgctgcccgtgaactctctctctcacatggctgcccatgaagtatatgaagagtgagtattttaggctttgtgggctagatgatctctgtcaaaactaaaccgccactgctgccttgatgtggccagaggtgacacacacataaatcagagcatctgtgttccaataaaactttatttacaaacacagtggctggccagagtggccacaagctgctgagccctgtgacagaccagtcttgggacaagctccttaagaaagtgctccatcagcacagaaagtgacctgttaaaggtggcagctactttcccctgggtattcctggaagtccaagggctggagaggaacaagagagcaaggcactggccatctgaggagctggaatgggcaggaaaatcaaagggaggagaagggacagcagaagttcaatacaaatcacatcaggtgcccctgagttgcatgcgagtcagtgttttacagcagcacctcaactataaaccgtattttcaagaagataccctgccattgcagaaataatcaacctgatattgtttgtaagtaaacactggtgattcagatggtaaagaatctatttggagacctgggttagatccccaggttgggaaaatcccctggagaacagaatggcaacccactccagtattcttgcctggagaattccatggacagaggagcctggtgggtccacggggtcgcaaagagtcggacatgactgagccacttacataacacaaaaggtaaacaaacattcactgtttatcaattttgaagttctttataaaaagttctgaggctgctttgaagctgctcatgtgtcccatgggaccacatggaagatccccgtctactttcccatggcaccatctcagaggaaagggcgccttatgctcacactggatgggggggtcacagagcagtggacaagatgctgtgttcccctcttcctgtgctttcccagagcacagtcctcagaactctgctctgtggcaggatgaaggctcacccctcgccaccccgtcctctctcagcccttccctacagactgtttgataacatcagtgagatacagtgctcttccctggctcttgcttttattaaaaataaactcatttgtagcttgaacgcaaacgaaattaatccacatattcttcctgttcctctgtagctagtttccactctccctccctcaacacttggtaagtaacttatttggtaagaaactttattcagtgaaaacatatgtaccctttgctttccaaggaaatgcaatgacttttaatcttgtttcagaaaacaagcatttacatggttattgcagactaagcccataatgcacttgatataagaggaaggtccttggttttgctaaatcctgcttacagttgaagtagaatgctgctcatacttggaacagagaaatattgtccctctgggttcctgcaccttgggtttaactgccaatcaggggctgtattttagtaaccacaaaaggaaaacacctgagatgttcagtacccctgtccccgtcttctatctttctcattcattttatgtgataagaagagaagagctctgtttcagtagcattgctcagttccacagctggtcttcactgcacagcaggaaccgttctgcaatccgggagaatatgcatcagagcacaaccaccacgcgcacccacatgcatgtgtgcactcgtgcttagaaaggcccattgaaagctgggctcccagtcttattttccctcaatcagttgggctgatttcacaaactggcactcaaaagcacatgtcaagagagtatgttctaattatagaggcctctatttggtggaagaaatacaaagttcccttttcttctccttgaaactttaaaagactttcctcattaaactcacatgcctggataaaaatggtttctaaaggctttaaagggcttaagaggcagcaacagacaaagcacaggctgtagaaactggatttgatactgggttctgacactttctaggggaaccaccttggacaacttatttaacctcttggaacatgagttttgacagataaagtaacaatattaacgggcaataggcagaaaggactagtacagtgccaagcatagaattacctcataaattatagctatcac

SEQ ID NO: 26401 - DNA, 2218 bp, Bovine  19866881047867
  misc_feature (1)..(1): n is a, c, g, or t
nagtcggacacgactgagcgacttcactttcacttttcactttaatgcattggaggaggaaatggcaacccgctccggtgttcttgcctggagaatcccagggacggggagcctggtgggctgccgtctatggggtcgcacagagtcgaacacgactgaagtgacttagtagcagcagtagcagcaaggtccttaagacataattcaacttttcggttatgtgttttcagtcaacaccataaactttgaaaaactaacttgctcaacacatatagctgttaagcagcagagccaggattttaaagcagccccaccaagtctttatccactgccgaggggccctcaagcttggggttgataactggaagcacctggaagggcttgctgggctgtactcagtcgctcagttgcattggactctttgcgaccccatggaatgtagcccaccaggttcctctgtccatggaattttccaggcaagaatactggaataggctgtcatttcctgcattaggggatcttcctaatctagggattttcaaacctgcgtctctttcatctcttgcattggcaggtggattcttcaccactggcctcacctaggaagccctatctctgccttacttacagttcacatctttaaaatccatatgaacagaccattgaacagtactgaaattgattcagaaattttaaaactcccaacaaacaaaaatgcaggactgctttaacacttgaaattctcttctcgcaagactagagaggaaaaatgctggttcctcaactctccccattctttgatgtcccctgaccaaaagcatagacatttttttattttaaggattatattactatttaccataagaaacagaagagaggtaaaacatctttaaaagttacagcgtccggggctctggagcctgtgtctattttgagatggcaacctcagaccctgtgggcatctgtctgtcctgattcctgaggacgcggttcacaaactcctccccttctttctaactcctaaacgtaaaggacaactttcctccttcctacatgaaagctcgttttcctggtaaagagaaggcggaggggcaattcaagcaaacagccagatactctgccttagagagcaatttgcattttgaggattcttgtcagacacacactttggagaggagggaccgagacctacttggacaaggcgagctttcgagggaattacaaccccattcctcactggccccagcttcctgtgccttgttctctcccaggcctggcaaacatgcctgatacaagggtggagagtccctggcccagagattaggcatcccaggcaccacaagttagaaagcttaaagactgttacccaaggtctcatatttttacagggcccacaattgggtatttcaggtgcaatctgaataattggtctgttctaggatccctgaaatctcatctagactggtttctatggaaatgctggatacaagctccaaacaggagacttgcaaacatctggagcatagtgtgtttataagacagggactctagttctaaaagagccagacagagcatttccaagtggaaaccagtgatcagaaagttcctaaatggtgcaccatgcaattcaagcggggctgccttttcaacggaagtatgagtccctttcagaaaaatgtaatagaacggtctggcaagcaaaagaggctgctgggaaaacaagttcatccaagacagactctgttgctattttggtgttagtttttagtcagctcagagtccataccagtgatgcctctcatcacattcttatttcaaacctcttggcccctgtaggttctatttcaaattttgacatctaggaacctgttagcattgcagttcccagaatttgggtagccctagctccagctagttccaaacactgatgggctttcccctccagctattttaaaaaaatatttcttgagaacttcagtttcgccctatttaaagtatgaggttgaattctttttaaaatctgataaggatcacatattggccatgcttcttgctgcttcttgatttaaggtagctgtcaaaaatgtggtgcagagatctttaaaaattattgcctaagtaagtggtctgcattcccaggtggcacagtggtaaagaacctgcctgccaatgcagaagatacaagagatgcaggtttaatccctgcatggggaagatc

SEQ ID NO: 26402 - DNA, 1523 bp, Bovine  19866881102433
  misc_feature (1)..(1): n is a, c, g, or t
nccagctgagccatcagggaagcacataagtttgagcaagctctgggagatggtgaaggacagggaaagcccggagtgctgaagtccacggggggttgcaaagagtcggacacgactgagtgactgaacaacaacaaaagctgtctgaatcttaccttggagagattggtccacacagcgcaacgcagcagtttgtaaagatgtttccgtagctgtaggggttgtaattttctttacctcttttatttgaccaagatcctttaatctgaaagaaaaggacagtcagtgacacagtctgcctcgcaccaatgccccaggttgggtcaatcagaccatgagaagtccataaaaaatgcgatggtctttactcatttcttcagcaggagaaaccgaggtacttttctcaaggacaactggcatttactctaaacttggaaatgtccccaaacagcaggtcagaccagggggagaagtagcattctctggggagaataatctcttatttccacaacctggtacttaaaggccagttcacataagccagtggagatcttttttcttttttttaaacaccatttttaaagtctttacaatagtgcttctgttttatgttttgctttttttggccatgaggcttgtgggatctcagctccctgagcagggtttgaacccgcatcccttgctttggaaggtgaagtcctagccactggaccaccagggatgtcccaccagtggaggctgttttcatgttacatttagtgtgataaatagtaatggaaataatgggggaacgtgcctcctccaattgctcattgatagcctggattcagctcctaaatactcctgcagagcatttctgatgttcttagttaccaaccacatgtaattgtcttaacagtctctgaactcatgcatctcatcagcactaatttttcaagtctttaaggcaatctgactaattctgagacatttagttcatgtactggcagaaacttctctcagaatccaaatattcagagcagaagggaccagggtcatgacaaaacattttccaacattagattttctggttttatatctcctctctgtcatcattaaatacaggcagataatcctagacaaaagtttaaattttgggtcagggcagtcgcctcccaaaatatgatggaatcattatctgcgagaagccagcctgcactgtctcttcagtggggcagggtggcaagttgctcccaaaacattacaaaggaacagagcagaagcccacctcaggcctcggaattagggggcagccagccgatctgagtagctaagtggtgtggtcaggacaatgtgatgatttgcgatagagaaattggagatgggtgtcagaaaatacttctcccgcaggctctttgcttccagaggctcacatctggaaagggaactcggaagacctggcggcccccacctcttctttctctatttcccaccaaagaacatgcccatgccccacccccacaggaacttacgtcttcattcgt

SEQ ID NO: 26403 - DNA, 697 bp, Bovine  19866881131642
  misc_feature (1)..(1): n is a, c, g, or t
ntgctttgtctttaataacatggcttttcagatcatagctattactttaaaacctaattggccaaaatccaaagggctaaattcttagttaacacaaatcactcagagcccttcaagcccaatatagctggggcctgacacacatacgtttcttccccttctctttgacacattaatgcactatctccattactatgtttccacatcagtggctccttgcccatcagcacaactgcgtcacactggcttcaaggaaataatagagaaaaagtgccttgctggcaaatagcaacagggaaaatgaattataaatacacctcactaaagaatagttgctggaaggtgtgtgcatgtgtgtgtgtgcacatgcacagaagacagacacaagtgcctatggaggcccacgaggacacaccaacccgcctaggtgtgtgtgtgccgtttccaagcagagaaaccactgctgagactctcacagaacagtcagctgtgccaacaccaatagttaggttgctactgatccagctaccaagacttaatgaaatttattcaccttgttaaagagtggctaagactgaaaaacagtattaattaaaatctctaatctcctactttactaaaagcaaaagcatttaaatttcagttatctgatcttttcagtatgacttaagaaagaattaaaatgcaggtcctccag

SEQ ID NO: 26404 - DNA, 1113 bp, Bovine  19866881327460
  misc_feature (1)..(1): n is a, c, g, or t
ncatttataataacggacacacaatccttccatattgctagactctcaacttctgtatagtttaaccaagcaagggcttacgattggcccagccttagtcatatgctctctcaacagtttctaagctctggtctcctctggattcagtagtgaaaaatacaatgttgctttttaccaagtctcatccttggaggactagccccccaaaaagtagccttcaaatacacactaaaacatacagcaaatattcagtaacagcagcaaacgtatcatgatgcccaaaggctttttgtatgtgtattagcaatgcactaatttgacattagtcaaagcactgatctcaagcaaggttttgggtataagattcctacagtgctggcagagttactgaatatacccatgtggctgactctttaattgatttttgcttgtcacttctattctatccaggtatgcctctgagttgcttttgtgctgacatctaatttttctacggtgcaatcagtttctagtaaacacagaaaaaaattaagttcatgagactgtatgcaagtaccactcaatctccaattcatactcacccaaaaacttcacatggtatttaatgtgagtgttggataccaggctcactttgggcaaaaaacacatggaaattcttgcctcatgacagatcctgtcttcagtgatcattacataatctggtaaataacttttgtccaaccaaatgaagtagatgtaaagcaatactactactcctagaatttatttttttatcattaggttcaactgcgacctatattcaggctgcaaaagttttgatactgaattcttttttggctgccacacaaaacgaataacgctgagttaatatacttcagaaagtatggtatctaaatagcagggactagagttgctagttcctggatcatctcagaagacaagtaccttaagctgagatcaagcttggtaggcactgactacctctacaaggtgccgcaggcaatgtcagacccatgagatgactagctcacaaacttcatcctatctgaaaacacaatatttctatcatacatattatttgagcacattcattgctttcctggtaactgcagg

SEQ ID NO: 26405 - DNA, 650 bp, Bovine  19866881395994
  misc_feature (1)..(1): n is a, c, g, or t
ntacaaaggtgtatgtgggtatggcctcagaatttacaggaaggagggagacactctgaagatctattgacttctttatccttatgtagtattactctcctctacgtttcgtgtacttcccagtataaaacttgatgtatactctcctgtttgcatactatgtggtgcttcttactaagtgaataaaaaaagttctttggtattaacttttttattactgatgtttgttctttttaaacgtcaaaacttcagcttagtattgccattggtttttatttaaactaaatctttcctctctagacctcatataacaacatgctctcaccccaaaagtcaaatactatgacttatatgaactaaggcattggaagaatagttaagataaccctaaaatactgaaatatattttacaagaaaactgtagccaacatgtttagattcgctatatccttatttcttaatcttgaacatatatatcttaaaatttgaaaagggcagtaagaaatggcttactagtagagtgtcctgttttctagcagggaatataggatagccatctgagtagataaataagtataattattattaacatcaaaatgatcacatttttaaccctctgtaaaatgttaagcttaatgaaactagcaaat

SEQ ID NO: 26406 - DNA, 1635 bp, Bovine  19866881422867
  misc_feature (1)..(1): n is a, c, g, or t
naataaaggctctgaatttttggaacattacttttggttttacattttaaaaaatgtgtgacatttcattctttaacactcaaaatgtactttacaattttaatcaagattgcttagtaagtctgctatgatgttttaaattttaaaatattagcaatttgttctaaactattttaatcccatttcattaatactgccaaagtttcgtgattagtaaacaacattgaaaagagagatccttagttacagaacaactgcttataggtagtggtgaaacattatttaatgtcctgtagtcctcctgtcagagaaggcagtggcaccccactccagtactcttgcctggaaaatcccatggacagaggagcctggtaggctacagtccatggggtcgctaagagtcgggcacaactgagcaacgtccctttcacttttcactttcatgcactggagaaggaaatggcaacccactctagtgttcttgcctggagaatcccagggacagaggagcctagtgggctgccgtctatggggtcgcacagagtcggacacgactgaagcgacttagcagcagcagcagcagtcctcctgtattgttgtacttctctctcattttctctctgttctcactgacatgatagaacaatttgggtaccttttgccttcagctgcctcagattttgctttggttccctgagtgtcatgaagtgtatttgtgtcttgctcaatactgcctgcctgtcagttgctgggcagttgctgggttctctctcggccttgtattgaccatcctgcctattcctgaatctctagtggagaaacataattttaccctagtttgtgtcaaagtgtggatggctgattttctctggggtgctgattttcctctcttgctactgatttccttagccagggaagctttgatgctaggcatacatataaacaacagactactgtgttcttattcatcctcgtgtgtcctaaaattcactgtagatgacattcctggaaatttatttctaattattaataagaataattatcatagagtgaaaacaaatttggggtggccttgggcttaggattcaaatagattgaattcagacattcttgattgcttttacttgcttgtgatcttaaaataattataacttctttgaaactgccatgtcttcagtaaaatgaatctcctatacttattgatagaagattatatgagctacctaatgcaaagagctaagagtccttcttactttaggactttattcccatgtcatttagcctcaagctccttatctttaaaatggggatagtaacatgtagcatcatgtaacagagttactgagcaaagtgtgtgtgtgtgtccagagacaacctctgagtcttctgctcaggacatcagttagggcccggggtatcatctaaggcatggggttctcctttaagctcctgggggttgttggcagaattgatcttccttacagctgtaaaacttaatggcagctagctttttcaaggacagctggaggaagtctatctgaccctgttaaaagggctcccctgattagatctggcccacccaagataaccctcccttttaattaactcaaagtcaattggaatagtaacctcaat

SEQ ID NO: 26407 - DNA, 1081 bp, Bovine  19866881600986
  misc_feature (1)..(1): n is a, c, g, or t
nacatttatttaatcacaaatacttactgaatgcttacttatatgtctggttcaaaggatatagtagggaaagaaacagagttcttagtactcacataatttatgttcaggtgagaataggacaaatgacacagagaagtaagataagaactatggggagtgttaagactgtgttgcctataagaaacagaacttaaacttgtgagtcctgactgccccaccatcttggtctatgaagtataccaggctgtaatatattcatgtcttgggacgtccactgtaagttatacaattactagatgtgtgctaattaaccaaaagtatacttatttgcctgtctctctcagttttgttataaactaaaatcctaatgttttgttctttcaaatgtttaattgatgattattttgatttagttcttaaaagctatttttaattagaaaaattccctcaaaacctcttctagtgttaaaattctaaggaaaatactaagctaaccaaatacaatagtgtgtgtgtgtgcagttgctcagtcatgtccaactctttgcaaccccctggactacagcccaccaacactcctcggtccatggaattttccagggcaagaaccctggattgggttgccatttccttctccagggtatcttcccaactcagggattgaacccaggtctcttggatctccttcactggcaggcggtttctttaccactgagccactagggaagccccaaactcacgattttatacacacacaaatactgaggtatagagtatatatgtacacattggtgtacatgatctcttcactgagagaggctagaagcagtaactcctcagaaataatgagtaggcccaatgcccagattttagtctcttaacccccttctccactaaaaagaaccagagctctgaggagaggtgacttgattatagaactggggtgaggaaaataaaagatgagcctggaattccttgtgacttctaaaaaataaagatttgaaggagcttctaatggtcaaagctggaacaacttgagcaacccaataatggcacaatgaattttaatccatgagtg

SEQ ID NO: 26408 - DNA, 718 bp, Bovine  19866881651394
  misc_feature (1)..(1): n is a, c, g, or t
naatggcagctactgggaacagaaggcctagattatagttttgcttgtgtcgatggctcagaatctagtagggtagacatatttatgtaaatatgctgcagtgtgtgaactgatcaaaactagcagtgtgaccttaggtgaatcataatttacctgaggctcggcttcctcatcttaaaatgtggatgaggttgctataagataactgaaatggcacatgaaaatgctctgtaatctgaaatgtgatacacaaaagtaagagatgatgatgataattttctggtttataaattgctacgagtatattttaacttctgaacactccacatattcaggagcagtttccaaccagcatgaagaagctagtttttatttcttcattttttaagtatgtgggatccacattactccaatacttgtgtaactgtctacaaattccaaaagattaaaaaaatatatactcctgtctcctaccatttagtctccctggccaaaggcaagtggttttttaatgtatcctttcagggatattttataatttgtttgtgttagactgtgcatttcctttatcatgagtaaagttgaacattttattttacagcagtttcaactcttttcctagaactacttatatcatttgtccatttttctgttggccactctatgtcatgactaggaagcatttcatcttgcagattcagctgttattaccaaatag

SEQ ID NO: 26409 - DNA, 1680 bp, Bovine  19866881702711
  misc_feature (1)..(1): n is a, c, g, or t
nagaacaaatgagaggcagttttgttttttttttaacgaggtaacatggaaaacaatattcagtgacacatgcacgtctccagggcaggtgcagggaccagaaggattaagaattcatttgaaaggctctctcatttgacacatgcaagacacataggtacttaataaaaaatgtaaacattgatttgatttaggctcagcttcaaaacagtggtaaggcattaatcagaaaagtatttttaacatttattccctttatcctctatttcttacctgtcaagaactaagtgggctaaccagtgtggataaatgaaaggcaactaactttggaaatattctgtatactattagccgaaacccctgatgcctttcagctaacttcaaaaactgtaagccaaggcagagaaacacagggttccaggtgaagagggtggtttgtgggcagagctctggaacggggcagtgatgttacagagaatcatttgtggggtgcagggctgggaggctctgagacccacagaggggctggtcactggctctgtacccccaaaaggctgctccagggaccccaagtagcttgagttccagtacttccctggagatgccgtcacacacctcggcatcaagggcaccactgccggtgttggcaatcccatctttcttggggttgaatcagggcatgaagagtgaaggggctttcaaagccacagaaagcgcttgacccactcaggcctcctgacatggggtttgcttctcgttttgaaccccagtcagcatcctaaacgcagcaggggaagatggcagtgcactcggaggagcggggaagagctccgggaacatccttccttggtggcattccggaccagaacaggtatctggcttttttgctggctcagggtgagaaggtgccgtccttctcataggctgaaatgattacatctgaaagctggaatgagcatttttgagcaagcacagcacaagcgctgggctgactctccccaggcgcagagcgacaggtcgccatgccctttcagtggcaggctgtcagctgctctggtattccatccacggccttcctgggaacctgggcgttcaagctaaatacagccttcacgtgcctgagaagcctgaagcacccgagccctcctggaaggatggaggcagatgaatttttaaacaacaaaatgagtgtgtacgtgagtgtgtttgagaacggtccaagctttaatagcatggtaaaatatttatcctatattttatagctagtatgcaatcaatccataacccactgacagaatgtagaaagatcaaggtctattcagccacaactagatggaactactcaatattaaatagatttatatgcaatcaggtgatgggaaatgcagacccataaccggggaaatcagtctgctaaagatcaacccttcacccacagggaagaaggcagctcctgggagcacaactggtcaacctacagacactgcattctttttcaagccacagagcgaaggactacggggatccctctggtttgggggttttaagaggttaattgtcttagcaaatcagcccactcaagttcatcttcctcttggaccctgaagatcctagctgggtgtcaccaatacccccaatcccctctttgataagtggtatcaagtgtatacaggggacgga

SEQ ID NO: 26410 - DNA, 1518 bp, Bovine  19866880187951
  misc_feature (1)..(1): n is a, c, g, or t
ntgaggttattgatatttctcctggcaatcttgattccgcttgtgcttcttccgtccagcgtttctcatgatgtactctacatataagttaaataagcagggtgacaatatacagccttgacgtactccttttcctatttggaaccagtctgttgttccatgtccggttctaactgttgcttcctgacctgcatacagatttctcaagaggcaggtcaagtgatctggtattcccatctctttcagaattttccacagtttattgtgatccacacagtcaaaggctttggcatagtcaataaagcagaaatagatgtttttctggaactttcttgctttttccatgatccagcggatgttggcaatttgatctctggttcctctgccttttctaaaaccagcttgaacatcaggaagttcacggttcacgtatagttactaacatattaaatcttttgacgtgttagctgaataactttctgagtgcttgcatcatgctaaaatggtagttgttgccatagcaatgaaaaggtttagtggaatacaagcaatattacctggtatccctgagcatttgagaagagttatgaaaggaggacttattttaggccagtttaagtttataaaatcgaagaatcatgagctgtgttaacttgacatgcttatagttatatttcttagtattctaagcctcatcacaatatagtttttccatgtgacttatgaaggaagcataaaaaattatttagaatgtacctatcacaatcataatctgtaaaacttttatcaatagcgaatagtcatctttggaattatttttcttcagtttttgtaaatagagctaattatttctggaaaatttaaatggtggtacaactaactaggcataatcctttacagaaaagatagaaactatgaacaaaagcaaactcaaaacgttttgagtgaatagtgattgcaaaaaaaaaaaaaagcaaaaaagagaaagacttgaaacctagtaacccatggttttttaaatagagaggtcattttaggattacattaattgctttagggttgtttgaaaatattttgatattggaatactaatgagattcacttttctagtatactcttcacaatattactatatgtgtcataaaaatttgaatactagtagctgtaagatctgggacagatgaacccacctgatttcaacttcttcagtttattcaagtatatggctgaaaattgaggcaaaaggactaccttgtgtcccctttctgctaggacatgctaagattatagaattaagagggtaaatatagccctctagtgggttctgttatatacttacactgttaactttggtgcatctatcatttttcttaaattgccgatttttaggaatttcactattgagtagaatcagatttttataatatatggcataaaaaattacaaagaaaaaatatggtagggatatcttattctaacaataaatggtcatattagattatcatccatttatgtaat

SEQ ID NO: 26411 - DNA, 2158 bp, Bovine  19866880344262
  misc_feature (1)..(1): n is a, c, g, or t
ncttctccaacaccacagttcaaaagcatcaattcttcggggctcagctttcttcacagtccaactctcccatccatacacgaccactggaaaaaccatagccttgactagatggacctttgttgacaaagtaatgtctctgcttttgaatatgctatctaggttggtcataacttttcttccaaggagtaagcatcttttaatttcatggctgcagtcaccatctgcagtgattttggagcccaaaaagataaagtctgacactgtttccactgtttccccatctatttcccatcctttatcatatccttcaatactggtaaatgtttcctgagttgtatgatccactctaggaaagtaaaaaacctccaggagagggttatgagaacccctgacttatcaacaacttggacagaagttctgggtaacttggggtccatctgaagggagggacagtcacatgggagtgagcccttaatctgtggaatgagatgctgtctccaagtaggcagtgtcagaattgagttaaattgtaagacaattggctggtgtcaatgaattgcctggttgggggaaaacagccatatctggtatcagaagtgctatgagtctggtagaagcatgagagtgaaggagacgcacagaagggggaaaaatgagtttttcccaatacatattttctatttcaaataacctttgaaaatgcaaaattcatctctagctcacaggttgtgcaaaaacaggcttcacactggctttagcttgcagacccctcctatcccagtgcatagtacccagatcagtgctttgtggaatatagactttaaccgagaaatatctgattaatttcatgagtgattacatgatgagtggtcgagggatgccgctgttctttgcctcttgcaaaggactccgttttgtgccctcacactctgcaccagaatctaagtccagaatctctccagtgtgtctgattctaggaacaagctgcatgaagtccccagagcgtagagccagaaatgaggtgcttcttccacacaactaggctttgatccaaactagcaggggagctgtgtgcagttaggttcaattattctggggagaaaagtggtgagagtattagaacaatattattattattgcatttggatggcaggtattcatgtttctccatgaatgtgtaaaatcctcccttccatgctgattttaattgaattctgacaaatccaactttcctgaggcaagagaaaatgagaatgttggtattagcatagctttcccccttgttaactgtatttacatatcaactcctgggacagcatacattattttctcctttgtgcctaggttttatcacagcagcaccaattagctctgttaagcatctttctacagatacacaggaatgtgagagatttttactaccaacaattcaggcattggctttgcttctcctataaagtcagttttaggaaataattaatatgacattaaatttgaagcacagactatatgtgtacctttacacatttcacatacttctctcttctctttaaatactcaaagattgtgaggttgattatcattgtttatttcaggtgaactctatacattcacacatttgctcactagagcaatgttgggatataaaatcatcagtagtatccatataaattgcattccttagccgatttcttactctaaaaggtaggagatgtttcttagctgaaaagtacaaaaatgtccagtaggggttgctgttgtacactgaattagccaggagagcttgctgctgctaagcacttcagtcgtgtccgactctgtgtgaccccaaagatggcagcccaccaggctcccccgtccctgggattctccaggcaagaacactggagtgggttgcccatttccttctccaatgcatggaagtgaaaagtcaaagtgaagtcactcagtcgtgtctgactcttagcaaccccatggactgcagcccaccaggctcctccgtccatgggattctccaggcaaaagcactagagtggggtgccattgccttctccgttagacttgtcaattctctccaaaatatattctttatttttccctatgcgtccacctgataatcttaaagaaatttccagaatccctaagtgtatctttt

SEQ ID NO: 26412 - DNA, 1308 bp, Bovine  19866880352077
  misc_feature (1)..(1): n is a, c, g, or t
ncactgctgagttttccaaatttgctggcatattgagtacagcactttcacagcatcatcttttaggattgaaatagctcaactggaattccatcacctccactagctttgttcatagtgatgcttcctaaggcccacttgattttgcattccaggatatctgactctaggtgagtgatcacaccatcgtggttatctgggtctttaagatcttttttgtacagttcttctgtgtattcttgccacctcttcttaatatcttctgcttctgttaggtccataccatttctgtcctttattatgcccatctttgctgaaatgtccccttggtatctctaattttcttgaagagatctctagtctttcccattctattgttttcctatatttatttgcactgatcactgaggaagactttcttatctctccttgctattcttcggagctctgcattcaaatgggtgtatctttccttttctcctttgcctttagcttttcctcttttctcagctatttgtaaggcctcctcacagccattttgtgacatgttgcaattcgttttcatttcatgcatccatttatctaatggatttttagaacagcctgacaaaaggaattgggcacatagagagcagaaacttatggcttatgtctcctccctttcttatgggtaaaacatgacctcacataattttagggctcaaatcctaaaagacattcctagtccccagttttgaggatgtggaaagctgagcatcatagttacttttctcttccctcctcactttctttattttttgtttcagtttttgggtcagaggagagaccatttatacaaataatgctatatatattcaagtactctcccaatgaaattttcattaatcatctctcaggtggaaaaaaaagtttgatttcttcttgcagttgcaaaccctagttaagactgtgcaatggaatcaatgggtcaatgctatttttcttggcactggagttaccattgcctagtaatttgggaatattccacaagagattaagagttttctcaaaggaacaaagctttctgtagaaacaagatatgtaaccacttttgtagttctgggtgagttttttgcttcaacattaatttctactatgcccacatttactttgaggttctttttagttcattcaagtctctttttttaattttctgccatacttaattagggtcactaatcgtaagactttatctcattgttcccatcttaaaagtccaggaatcggcacattgttctttccatatgttgggacagtcaataaacctta

SEQ ID NO: 26413 - DNA, 1783 bp, Bovine  19866880471689
  misc_feature (1)..(1): n is a, c, g, or t
ntatttggctagatgaaaagtcattttacattattgtgactatctaaatttcatttattgcagatctctgtagggctgtatgacttatatttcttttttttatacaactattccccctttggagttaacagttcattccttttctttttctttcttgtcttctgtccatctctctccccttctcttcttctctccctctctcctccctttccaccccctatctctctgtagctttgtttcctgactgttctgtgtgacaatgaagtgattttggaaagtggaagctttagtcactcagttgtgtccaactctttgtgaccccatggactgtagcccaccaggctcctccaggcaggaatactggagtcagtaactgtttccttctccagggtgatcttcccaactcagggatcgaacccaggtctcctgcattgcatgcagattctttactgtatgagccaccaggggagcctggcagtcctatgtacctgttcctaattcatctctaaatagacgcttcagtttcctcttagtattttcatatgcatcagagactaaattgacttcatccttttcttagttatcctcctgacacccccagatctcctgctccagattacactggctcttctttaagatgactacctagaaagtcagtatccccacatctcctttatcacaagctgagaatgctttggcctgtctcctggatcagatcacctgttttctggattgcatgtcttcctttttttttttttttttggttgattttctcacagttggtggaacacatcccctaacagagtcctgagaacattatagggaagtcaaatttttaagatttggtatgcctgaaaatgtcttaatgctcctattatatttgattgattgttcacttggcatagaattcaaagtagaaaactaattttcagagatttttgaaagcattactatatagtctctcagttttaggtgttgctgctgagaagactgacagtttcctggtggtctgtgttctctctggaagcttgtcactttctctgtgtctccagttttccctctgaaatgtgatgctgatgtgccttggtatagctctttattcacccacgtacctggtacggggcgagtgctttcaatgtcgagactcacatctccccttctgggagcttccttgtatcatttctctcgtgaatttcactgccctttttgttttctctattctctttttatttggatatttaatctcctggatttatcttttaattttcttaaatattctctcctacactgtctctctttggggttttgtttgtttgtcttggtttctactttctgagagatttcttcaaccatgtccaggactgagattggctgaggagatgctcaagcctgggttgtaaaatttaaacaagcactgaaaagctcagtaacccaaaaaagataaatccagctgtattctccgcagctcaccagcagaaaaagggcattctttacattcatgaaccagttcatccatttcacaagctccagttatcatagctggctttaggtgtattaacagagtacaatgaggggaaaatttcagtgtttcctctatgtcttcaacatcataaacttattcaagttccaatccagataatttttcatgcagttttagatatactagctattttgatattttagttattgggcttggtgaatactgatttcttttacagatgtctgtgataatgatactcatgtttctggtggcgtggtccccttattccatcgtgtgcttatg

SEQ ID NO: 26414 - DNA, 1413 bp, Bovine  19866880486422
  misc_feature (1)..(1): n is a, c, g, or t
ntgacccactggaaaaaccatagccttgactagacggaccctttgttgggaaagtaatgtctcttcttttcaatatgctatctaggttggtcataacattcctttcaaagagtaagcatcttttaatttcatggctgcaatcaccatctgcagtgattttggagccccccaaaaatgaagtctgcctctgtttccactgtttccccatctatttcccatgaagtgctgggaccagatgccatgatcttcgttttctgaatgttgagctttaagtcaactttttcactctcctctttcactttcatcaagaggctttttagttcctcttcactttctgccataaggacttaggggatggttttattcatgtggtattcataaaagatcattcctgtaatttctgagcagttagttttttttttttttgaaaaagcttttgcataactctagctgaaaaaataaaccagattttgatcatggaactactctggtttgcacgtaacagggaagctgaccaaaccctagccagtgctgaaatcagtgatttcactgtttactgctaaaggtgacctccccagatggctgactagtgctgaggtttggcctgcatttcttcgtcactctatttaccaggaaagtgaaagtgaaagtcaagtcactcagtcgtgtccgactctgcgaccccgtggactgtagcccaccaggctcctctgtccatgggattctccaggtaagaatactggagtgggttgctgtgccctcctccagggatcttcccgacccaggggtcaaacccaggtctcctgcactgcaggcggattctttaccattggggccaccagggaagctgtcccgagggggttctaatgtggcgaggaatcccacctgcagaggccgggagagccggcccgcagctactcctccaactggggtgtcctggtgcgttggctagggtgagctcggcaggtgccacccctgacttgattagacattccagggccaaacccaacctcagccacaccccgagccccctgcacacgcatgcaggaatcatggcaggatctcagcaagccagcctggccaggcaatggctcatgaacacactctgctcacactccagacagagcctggcaggcggaggaagccctgggcaggggtcagggtgggatgaacccaacacggagggaaagccagacacagggaccacaagatccacccgggccccccaagggccagcccaccatgctgcagggctccccacgcctttcctggcacctgccagaaatagccagtcttcaggggagggtaagtgctgcacagacctcaaccgcctgcccgcgtccgcgggccttcctgaatgcccctccctcccacccgccgcagaggaaaccagagaccaccctgacctttacc

SEQ ID NO: 26415 - DNA, 1218 bp, Bovine  19866880556391
  misc_feature (1)..(1): n is a, c, g, or t
nattatgaggttaatgcagaagtcaactggtgaagtttctgtcaactgttacacttaatgtcctcttcctgattaagagaaaatgaaaatattaaaaatatagaaaagtgaactttaaacaacactattagccagaattcaagtttaaaatcagcattagttctcgtaaagttcaacaaacatactttaccaaatttaactatcatttatattaccacctttttgcttttcaaattaataatacagcaaagtaaagcagaagcaggtgaaaaaattcaaaggtaaacgtgatataaaatgaaactgtatattcagctaaaaaaaggaataccatggtgttctacatacttgctggcaaaaagaaataaaagttagtagacaataccatttctagaaattcagttacttcaagttttttttttcccactcacctctgaaaccaccaccccctcttcctcctctgaaacctccacctcctcttccacctctaaaaccacctaaaaataaaggaaatattaattaaataactgtaacctatcatattttgataagcctataaacatcaatatatttcttacaattataaagaacagtattaggttgttacaaaagttactgcagtttcagaccctgaattttaaattataactaggctcaagcacttccttattaatcaaaataggaaccattacaaccaacacacttttgccaacgagaaataagtttgtttattcctgtaacataaaaacccatgctatgggattcaatgaactcttggagagcattttctgtatcctgctggttgtggaagcttcttccctgcaaaaagttgtcaagatgcttgaagaagttgtagtcatttgccaagaggtcagatgaataaggctagaggtctggtgaattcagcaaatgaggcaaaacttcacagcccaatttgttcaagttttgaagtgctggctgttcgacattaggtcaagtgttgtcacggaaaagaatagggcccattctacggctgatccggctgcaagcattgcaagttttcggcgcatctcatcaatttgctggggatacttctcagatgtaatggtttcaccaggattcagaaagctgtagtggatcagaagactggcagcagaccaccaaatggtgaccattaccctttttttggtgcaagtctggcttagggaagtattttagagcctcttctcaatccaacca

SEQ ID NO: 26416 - DNA, 1483 bp, Bovine  19866880557158
  misc_feature (1)..(1): n is a, c, g, or t
naatggactggttgtatctccttgcagtccaaccagttacttcatcttaataaggatgtcacatcacctgatgtactctaggatcatgccagttaggggcttttatgaaaagttaggtctgaagagtcttttgaggattcaattttttgttcaatatcatatattttttaaaccctactaaacaaggattcttgaagaatttgtgaagtaatactgcaaatttataagcaaagtaatccttaactcagctttaactcaaaataatccttaacaaatggttcagaattataacacttatatcctaaatgactgtgaaatctcttcaagaacgctcatgttatttctcacacaagtttcagaaaagctgttattctagctacttacatactaattccttttggtaaaaggatttaaaatgccctgtgtgtcaccgttttacattgttccagcacctataatacaaacatattactgaagtcctattttcatccagactcaaatatattaattggattacacaaaattaaaattatgaggaaagaatctcaagcttaacattattgagagggcatgccccaaaatattaatagcaaatatatgtggatttctgaaaggaaaggttttgtgttcatgcttttccgcagttaccagttttacgaacagcaaattctcatttttatgattataaaaaaatcatttaataaaacaagattactggatcccatttccagctgtaaagaagcaaaggttggcaggcagactgtagttttgggagcaggaggccactgctgcctggactcattaacctgcagctcccttcatgtacacagtggggccagtctaggtcctctcataacttacgtttacaacaaactgtacacttatctcctatttggaccagatcacgacactatgagctgatttttctcttaatctggagcagcagagtgacctgcaggtccatgccatccccaaggaagaggccagggctctgctcagcgcccagattccacctgcaaagcagggtttgctctcttggccttcctcagaaagcgcctcttacagcagctctgaatcctcctctgtaatggacatcttaatttttttttaaagcaaaatattaagcattcagttaatcagtctaattactatttttcctaggaatactttgacattttgaaaatccacattgttcccagagtcaagggaaaagcacaaaaaataccctatttccttctttggaaagaagacttttcataaagggcaaggagacttactaacaactatttacaaatctcttttcatttccttttttcattttgaaaagctatttttttcaatgcctagacggacactagagacacagcaaaaatatcagacaaaatccttcccctacagaccttctagaatgagcaagattagcaatacacatagtggctggaaggtgatccctgtcaaggagaaaaggaaatcaagacaatga

SEQ ID NO: 26417 - DNA, 1600 bp, Bovine  19866880605142
  misc_feature (1)..(1): n is a, c, g, or t
nggggaatttacccattttcattagaagaaaaaattctgtggggaaaatgatagtaatgccagaaccagagaaatctcttgggtaatggtttaaaagttttccttcaaagattttaaaatagaaaaaataagccatgtaattttgaagaaataaggttctaagttagtagatttttcattaatttatcaaaatttattctgcaaaattaccatcatggaccacaccgatgatgttaaatgcctagaatgtattataacaacaattttaatattctaaccacttcataagattgagctaaatgttctgtccaaataaaaggaattataactgaccaaacccgtatgattgattgctttaaccccagatttcttctgggcaggaaaataattcatatttattattgaacacttgaacacaatttataaagcactattccccccattttggtatctaatgagataccaaataattctccagtttactttacttgaaagtctgcagtaagactacttgaaggaagaagcaaaaacacaatatatatttgccttcaacgctgagtaggtgatttgttgtagagattatagatggaaaatctgtatttttcctctactttaaagatgaagtattaaccatccatcaatacggtttattcctcatgatcttacttttaattcaagttttcagagtcagctccatttggtgtggagatctttgttgccacaaagggtgagctgatgggagaggacaggatgtcccaagcccctcagcaatgggccatgccccttcggagaggagatgaaagctacacttcacccctggtcaccagagcctctatcgttggatgacgcaatacagcctccgtgttctgcgcccgtatacatctggggctccgctctccatgatgactgttccaaggacgctatacaacagaaaaaaggcatttcagtattcccatcacttacagtgtccagccaacgagaccctaacagtggttggagagtagacctgaaatatgagatacaaatggacctattctcaagccattctgaacccaatttttaaaaaattaaaatagttttggttagttaagatgattcaaaggactgtgctacctgacattgctatttagctttctctgtgaactctctctctttccatttggcccataaatgacttgaaaacagagcccaggttttaaatgcagttgcattcctattccctgacatggtattctacccttaacctgctccagttgatgttggttttggtcaatgaataagtaactttggaggcactactagtaaggcttgtggtttaatgggttttccaggaatagacaaagaattggttcagagccaatcctgagcttttatctcattttccactctacctccccacctccaatctctacatgctctttcataacaggtattaaacatttatgagctggctagacatgattggggatgtgatgactcatattgggagacaggtatatgagtggctcatacagaatgggccaaactgtttgcaacagaatgagcaaaaagagagagactctaatttatttctgaaaatagtcagctaactgagtcctca

SEQ ID NO: 26418 - DNA, 1913 bp, Bovine  19866880680358
  misc_feature (1)..(1): n is a, c, g, or t
nttaaagaagaaaggagggataaattaggagtttgggattaataaacacagacacacacacacacctcccaacacacaatggataactaacaaagatctactgtatagcacaggaaaatatattcaatatattgtaatgacctctaagggcaaagaatctggaagagaacatatatatatatatggatatcactatgaagtgaagtgaagtgtttgtccctcagtcatgtccaactctttgcaaccccacagattatagcccgccaggctcctctgtccatggaattctccaggccagaatactggagtgggtagctgttcccttgcccgcagattttcccaacccagggatcaagcattgcagtttcaattctttatcactggagctaccagagaagcccacacctaaaactaacacaatattgtaagttgattatacttcagtaaaaactttagaaaaagaaattgccattttacaggccctattgacaaattggatctaggcaataattacaaagtctgctaaaacccctgggtcaaataataataataaaacataaccacaaaactttaaattaccttcacaaccaacttcatcttctcccgtgatacagtccagctcaccattgcacttatactgctttggaatacaaacacccgatttacagagaaaaccttcacctcggcagtctgtgcaaacacaaatagaagaggggattttttttcattcttaagatgcaataagatgggatcttaagtcaatgggaaagctgcttctgttttcttagaagaaagcacttgggagtttaaaggctgggttcatctctacctttacagcacagctcatcactcttgtctacacagtcattgacaccatcacaggccttcttctgaggaatgcgtttcccattcacacattgaaaggagtccttttttggaggagctgtaaagtagaattgtctgtgtgaaatttatttagcaagttgtggatgacatctttatcacatgtttggaataatggcatgaagataaattcaggcacagataaaaagtgatataaaatgcacgagtggtagcattaccataatatattaatagggaaaataaatgccaaagctggcttatggaggccctttgctaatctctgaaagccagcatttattgtggaggcttcttctgagactgggaaaggggatccgggaatctggagcccttgcaaacactggtgctcacgcactcctttcatgctgacccagccccaccccgaggcttacttgggcggttccatttacattttgatggctcttttttttagcaccaaaaaggatatgatctttaacactatatatatagctaaaatattccaatgtcaggatgaaggagaaaagcagcagtgattgtctcaagcatagatgcgatcacttaaccattttaaaggaatatgtaatcagctggactcctcaaaggagatgctgagtttcttctaatatttacctgtgtttgctacatcaattttaatccatatgttcaaagaatcaaaggggaatcaaacaactttacttcccatgtaggaagtaaaggatagaaggatatttgaatggaaaaaaagtacaataggggaaaagcgccgatttgggctctaaaacccaaaatgtgattttgtcattgtgtgtgactggcaacaggagatccgtaatttgtttgtttagtacagacttggtgtgaaacaaacagtctctaaggaagggaaaatattgggcaagtactccactaacctgcactctctgtgtaacacaccacaccagccaacccctccgaattgtgtactcccttagtgaaagtacattcagccaaactggtctctaatcctcgacaacgcacatgcagacattcagcagaatttggatcaggat

SEQ ID NO: 26419 - DNA, 847 bp, Bovine  19866880746169
  misc_feature (1)..(1): n is a, c, g, or t
nctttattaatgtgaaaactgagggcagagaggctaagtagttgtgcacgtgtgtgtgtgcagtcacgtccaactctttgcggcctcatagactgtagcctgccagcttcctgtccatggaactttccagacaagaatactgggctggattgccatttccttctccagaggaacttcttgacccaaggattgaacctgtgccttctgtgtctcctgcattaccactaagtcaccggagcagctccttttaaggtatatcttatactaaaatatcctgtataatgacttgaaatattactccaggaaggaaaaatgagcctgagcacgagagttttcatagttaaataggcaatgtggggtttggaaaaactggtgatggagtcaccccatgacctgcattcctatatcattgatttgatgatgtcctaactcacatatattccctttatgcttttgcagtataaattccaaaacctcatgagaaatgtgaaaatgtgttctggggagttttttttaagtcagttgtctataaaatgtattatatattgaccataatgtatatatcaatatcatatatattggttttttctttttcttttttttcaacttagctacacattaaattccccatcttctttaaggatcaaaacactgctgagttttcaggattgagaaacaactgtctttatttcctgccctccaaaataaatcatttgggttgtttttccaagataaattgtatttaacttccttttaatttttttgtttttttttttttttttttttaccaccagacttttttaagttagtataaaatctatacctagcaaacacatttctttaaaaa

SEQ ID NO: 26420 - DNA, 852 bp, Bovine  19866880792569
  misc_feature (1)..(1): n is a, c, g, or t
ngcagacactttaacctctgagccaggaaagttcatataaataatgcaggcagagacatgaaacaggaaaagttccttttcaattgctatttctcctccaaggaaaatttttattttatttttattttaataaaataaaattttattctccaaggaaaataggcttgaaagttcaaaagccacttgacagcactttttcttattgctctccttttgtagtgtagcccaaacagaagttaacagaatactcagtgattagaaaaaacaaaaagaagcaatagcagcaggaggcatgggggaggggagaaatgaaaagaaaacccacgtctctgttaccacttggtttatcaggctcatagtcacattcaagacaacatggcataaagttacatgaatcagaaccaggaaggattcttcctcctgggtcaggctggccacacatggtctgtctcaatgccaagggtgaggaataaggcaagtaaaatttaattagaggaaaaatagatgatggcaccatatctatttagaaaggagaaataatatcctctgaaatgcatgggcatagggtgcgacctgggcagttattggctaacgtaagacatggagtgtcaagtagaggctttaagcctttgacttgcaaggaatgaaggagcaaagagtcagagtcacaaagtggcatccagacattcctccctccatggggtctgggccatgtcactgcagtgctcaaatgatttgatcaaagagatttagccaagatatggagccaagagaatatttattaagcacaatctgccagcctctgtggtaagtgcatttcccatattatcccatgggatccccacaacaatt

SEQ ID NO: 26421 - DNA, 2137 bp, Bovine  19866880827806
  misc_feature (1)..(1): n is a, c, g, or t
nttggtgatggacagggaggcctggcgtgctgcaattcatggggtcacaaagagtcggacacaactgagcgactgaactgaactgaactgaactgaagagtatttggcttatagttttcacatgctggttagtttttttttaattgttatgtcctgtggtttgtgaaaaatctatgtttcatttgatttcctatcttgccagcaagtaatctagctgcctttagcaagagcagaaatttggcatgtgaaagtgatgaaaccagcaatccactcttttcctgtgtctgttttcttctgtattttattttcaccacaattacatgctgaatagcaaaaaaaaaaaaaaaaaaaaatgagataatggatctgaagctaaaaatatatcttattaattcagattatggctacacaaatacaaatttaaacttaatgtttgtttctaaccataaatgagaaatgattaaaaatgtaggtgattaaaattcagaccataagttgaagtgaaactttaataaatccaggaggaaatattctgccattctttatgcttttctcctgttgttttaggcacaatctgcttgcagagtccttctttggagattgtatcttctattcaacatggaaaaagaagacaatttggatagctaacaagcacacagggaaggatatggttaaaatcaccctcaactcgtcattcgtgccacccagtggaattaaagtggttcgtccactcgtatagcccaaggcagagggtgatgcttgggcatctggtgagtcatctttgacctcaaacaaggtccggcacgtactccccacttctccacttactcaagacagacatttaggaatcatccctgatttctcctactacctcaccccaattttcagcctactgccaaatcctttccattttacattctaatttatctcaaatgtccacttctctcttccactgccaccaccatagtccaaacagctggcttgtcttatccggcctgttggagcagccacttaatcttttcattttctcctcttgcttataaatggtaaatctgaggggttaactcctctacttaaattccttcaaaagctctcctttgcagttagattgtaatttaacgtgtaaccaggcctatcactatttggccaatttgatttagcattctttccctctcccctcactggactctaacacaaagcttcatgtagttgctcagacacgccaagcaaaggggcacagtggatgtacatattcaggctcagctcccctttgcctctcaaggcccacatttatctgccttctgagcatttctacttggatttcttgcaagtgcttcaggcacagaaggaatgactgactcacttactttcccttcccttttgccaagctcttttccctccagtatctggttgaagacctccaggtgtaggccttgatgagtggcatttaatctccatatccctaggcatagatccatccctgtgagatcactctccaacgcctagcaattccaccacctaccggcttgtgcccctttcggcagctctccatccctgggggccacttcattagtgtccctgactccttctgccatgctgcagggggcatcacccttcaaaaaggagaacccaatcttgtcattcctgggttaaaacactcagttgccagtaataaaacccagtctcttttttattgaactggttcacagggcccccgtttctcagtttcatttatcgtcagggctgcagacatcttcaaagttttgatttttctcttaccctaggaggcatgcttgctctctcctccagcctttcagcatgattgggaacatggtttctccttttttttgactgcacggcttgcaggatctccatttcttgaccagagattgaacccaggctgagacagtgaaagccatgaatcctaatcactattccttggtggttcagacggtaaagaatccgcctgcagtgtgggagacctaggttcaatccctgggtcaggaagatcccctgaagtaggaaatggcaacccattcctgtgttcttgcctggggaatcccatggagagagagcctggaaggctataatccatggggtcacaaagaattgcacatgactgaacaatgaacaattt

SEQ ID NO: 26422 - DNA, 1304 bp, Bovine  19866880849306
  misc_feature (1)..(1): n is a, c, g, or t
ntttttgttataaatttcctatttaattgtattgtggagagagaatttctccacatgaggacaattgtttaaacattttttgagacttcctttgtactgagtatatttcaaatgcttcatatgcaggggtctacataatagatgtgttagaataaaaatttttattccattagaataaaaaatcatgtcaattgctttattcaaatattttcccatttatttatttataagttttcaaggtctttatcttttgagtgtgtcccttataaacagcatatatctcattttttaaaaaaatacaatatgatgatagctgaagagtttagtccatttacattattgtgattatttacgttgttgattttcctgtcttatttggggcttattatttgcccttttcatatcctcttgtttcttccttttaaaaattctgttgggttaataaagctgttgttgttttcttaatcttccttttcttcctctacttggtttgaaaatcatatatatcctatttctattccattaatggttatcttcacgtttataccatgaatccttaaattatgaagttcttgccctcttcagaaataatacaaagaatgttgtttccatatcaacttttcagtattttgttccaccttatttgtatatattcctgaagttaattgctatcattatgtaataaacaattaccaaggaatgatgctaaagctgaaactccagtactttggccacctcatgcgaagagttgactcattggaaaagactctgatgctgggaggaattgggggcaggagaaggggacgacagaggatgagatggctggatggcatcactgactcgatggacgtgagtctgggtgaactccgggagttggtgatggacagggaggcctggcatgctgcgattcatggggtggcaaagcgtcggacacgactgagcgactgatctgatctgatctgagtactgttgttcagtcagtggttattcagatggacttcatatttgccaacttcttggtttgttgttgcttcttgcatctcacttcttcatttttcattcaattttcttttttctaaaccacatctgctagtagttcattagtgagagtctcttatcattaaattgagtcattagatagttctcatttttgacagtttgtgacctacaacctatgattcaacctaatggcaaactctctcactctttgatctcccagtattttgttcttatcatactttgtataagctcatgaacagacttctcgatttagccagtgggatttccctaattccttaagagct

SEQ ID NO: 26423 - DNA, 1742 bp, Bovine  19866880926276
  misc_feature (1)..(1): n is a, c, g, or t
nctgaaatgtttcaggacagcagagtgaagatggaatcatcctgtataacttcaagccgaagtctaagaaagaaaaagagcaaatctgttcttgtttttgtttaacttgtgacttctgcatcccagatgactaataataaccctgctggatactgaaactgatgaattattgcatgacccctgttaagagataccttattatatacaaaatgtgaagaccctttttaatgtcagctcaggactcttttggtcactgtcttgagccttcacaattacctatctacagaaaggaaataagattatttcgtattgtcctttttaaaggtaggacagagttcagacggaaaattattatcaaagtttaaatgtttttaatgatttaatttttactataaacataacttaaacattagaacttttgtttgattatagaagcagcagaaatgttgactgctgatatggatgcaggtaagttaacattattctcttttactagtgcttcactggtcaaatttgcattttaatgtcatgtgtgtgtatgtgagtatatatgcatatatgcaatataattgattcaagaactaatttccttttgatttcaatttaaacaacaacaaaaaaaaccattactacttttcttaccatttttaagaaaaacaagcttaaatacttcttgagaactacctttaaaatgggttaatatatatggcttattttgaaatggaaaaaaatagtctagttttacatatacagtttttctatttgctatgagctttgtcagatcagttttgtcaaagccaaccagatttgtgatccaggacatacattttaagtgcaaaaataatagattcttttgcaatattttaaaccatgataacaggaaatctgtgaagatctgttttttggccaagtctacactgagagccaagtttaaacaaagtattaagttcctgggaagacagtaactgataggaatttttgagtcaaacttacatattaattcctgacttagttatttgttagctgtgtgaccttaggttagtaacaagctcaaatacaaattgggagtgaaatatctccctattttaggaggattgaaaactgaagcccatgtaagactcccttctgattgccaggccccagagttcatcagcaattttttaaaaatcaggcaatgagtggaagatttagatctcaaagctgcagatatcagtcagagggatttccaacaaaggccctttattttctactcagggtaataaattaattttcaggttcaatccaagctgatttgacagtcctcaatagatgggggtctccttcttaaaggtacaagcagaaatttaaaatttatcatcacactcttcccctaacccagttcttaggctggatgggactcctccaaaatcttttatccataatcgttcacaacttctctcccttgaggacctacctgtttcttatgtgctcaaagtaattgacagtgatattaattttcctttctcatttgggactaagaagcaagtttataaaaattttcatgacatgataaaatagagcgagataataagaagagcatcttatacttttacttttttctttgtcatgaattcccttgcaaattcgtgtcttaagcctgactctagatgcctcccagtgacatgtgctatgtctgagtgtgctcactgaggaaggaaacacccgtcacatgttaagggctaaaaacacagccccctcccagc

SEQ ID NO: 26424 - DNA, 783 bp, Bovine  19866881165083
  misc_feature (1)..(1): n is a, c, g, or t
ntatccttcatgattccaagttctggaaagaaagagattgtcttgttttgtttaggccacaggccaagctactgactggccacctgcgggtctgttgtccggctccaacccagccagctgtggtttggagggtggatcggtttaggaatatgcaggatactggccctcaaagatgcttcttggcaaggagtatgggaagtctaggatggcagcaacagggtgaacctttgatcttgttcagaaatctcagtcacgtctgcaggccaaatacaattaaaatctcatttttaattattcaaatttcagaaaataacaacctaataaactacggctggaaattccagggcttgagtcctaatcccagtctttgtattaacacactatgtgaaagtctgaggatctctttgtgtcttactttctccatctgtaaaaatagggagcacatatctattgcctctcgaggttgcagagaggaacaataaaattgatttgcaaagtgttttattgccataaagtgctatgttgaaaatgccctgtatttaaatagcctgatttgttgcagtgggtgataaagagagctatttttaaaatacattttaaataaatacatgcttaatctcagtttctttctgttggttacttttctgaaagtcattaaaatcaaggaagaatggttttagatgctaattaaaagctttaatcacactatttttttttcctacccaaaagataaaattccagccctatagctttattttcttctctcgagattttattcaccaa

SEQ ID NO: 26425 - DNA, 1104 bp, Bovine  19866881298257
  misc_feature (1)..(1): n is a, c, g, or t
ntggacgatttgcagcaggaggcattctagtcgacgaggctcctgacacaacagtggacactactgggctggacttgggaggctgaacattttgcattacagaacaggacaaggaatctgcaactgaagacaagaaactgtttcacccacggcaataagcttgaaatacattaaaatatcaacaaaacacagtttatctgaagttcttgtagaaacttcagcagcatcacatttatctggtatgtctctatctaggaaataacaggtccaaagaaacgatttcccaaaaaacgaaaaacttaactcactaaatgttttaataacgtttaacggcaattttcctgaaacatgccacaagcttccaaaccttcttaaacaaaatgaaccccaacgatctttactaaagatcactattattaatacggactatcgcactgtgcagcagtgtacctcagatgatagaggtggtttgcgtcaacagtgatgtaatttgtgaatcatacagatgtttccagtactagctctgatcccattttgtactgtaaactgccacgtctcatttgctgtctctagtcagatgccctgtctcacaggtagctacgtaaggttctgagattaacattaggttggacttctggagcaaagcgcatgtgattcatagtcggtctctgacagctccaattgcccgacctgcaagatcatcttcagccaaccaagagataatggacaaacctaaaatgacaacctaggtgttcactggcgggtgaatggactttaaaaatgtggtggatctggatatatacacatggagatatgtgtgtgcatatatacgtgtatgtgtatatacacacacatacagtgcatgaatggatacagaacatgtggaaataaagaaaatacacacacatacactggactatcattcaatcagaaattgcaggaaatgctgccatgtgacaacgggaatggaccctgaggccattatgctaattgaggttaagtcagaaaaatagtgtatggtctaatttatatatgaaatctaaaaaagccaaactcacagaaagtttggttaccagaagcagggaggtaaggaaaatagggaga

SEQ ID NO: 26426 - DNA, 1034 bp, Bovine  19866881310187
  misc_feature (1)..(1): n is a, c, g, or t
naaactattaggaatctacctatctagtaccagcattttggattaatttctagaagatgaattacatttctctaaggcctatttcttcaattgatgaaaattaaacaacatcagaagctaacccttaatattttgtgaatgagaacatgaggctacccaaacaaaaggctgaatgtcctagtctgtatccaaactccagagctgaacatacacttcctgtgagactgggaaatagctgtgaggctaactgtccccaatattctaatattagctcagctgttaaaggcctcagagaaggggctagatagatgttcttagcccctggaactgtgctttcagtgaggtttggatccatgcacgttctatataaactttttggctcttgatacacacaaggtacaattatttaaaaggagggaagagaacaaacataatggaagttagttaagaatgcaaattcacttattgtaattttcctgcaaccagtaaaataggaccttcaagttatttctttgttgatttttcaataaatattacgggtgtgtaactacaaaggggtgagggtgggggaggaaatggaaagagagaagacactcacctagttcgggtgctttgcttagcacaaatgcataagcccagaatttgctgacaggtccattgtaaaaaccctggtcacaaactgaatgcttcaggcctttggtcatcacagtgtacaccatataagcaccagttcgaagagcaccgaatatacttcataatgaaaaaagagaagaaacaatattcaggaaaataatttcatgtctaacattaaccattagtagaagactgccgttggcagaaataggcagaactgcaccacaatcatttgcatttacccagaagcatttaaaaatgttttgttaacaagagcaagaaaactactcagagttttattctgaaggccatgccacttcactcttcacccatgttccaaaaagaggtcaggaaaaggggactagatccagggcaggatctcaagaactccaattatctta

SEQ ID NO: 26427 - DNA, 940 bp, Bovine  19866881321793
  misc_feature (1)..(1): n is a, c, g, or t
ntatgtctgagtgtacagttttgtgagggctggggtccttggtgcagcccacctctccccgcacaatggaaacccctgtggtcaccagtgcttctcagcaagacctccctgtttagtctcaggacaggtgtttggcaataaatgaaaccttgccccagatcaacgaggcctggagattcatcagcaacagaccaaccagtggggagcccttttaattattttgtgttgaccatgcatttaatgataccttattatggatccaattaatttcattcatgttgcagaaacaaccaagagtagtcatgttgctgaaatactgtattctgaccctattcttatttttccatccctaggaagcctgctatagcatattcttggtcttgaagtatcataagtacagcatttttgctagatagtgatataaaatgctcatgttttcatgtgtgccatattcatttctgaagcttgtatactattatacgagactgtgtttctaccagaagctacctgatggcacaatcattggggttctgagactgctatgaaaaagagaaacacttctaaggtttgcttctgcttttcctttatacacactattttttgttgttgttgtgaagttaataaaaatgactttctgtgcagtataggtctccccctccccattcacccattttgacctgagttaagaacatacattaaatgagttacaaatgggaagttttgtcttattctgagatgatgtgaaaagtgaggcgtgtttatagcaatctagctatacagaaccttcacaagtaacaggttcttagttttaaatataaatgctatagggacattgctattgtacacattgtagagaaaaacacgaacgtgtagcctgaaacatatacaacagatcatacaaaaatgttaggagttgaagggcaagttgtaggagcaggga

SEQ ID NO: 26428 - DNA, 1271 bp, Bovine  19866881425965
  misc_feature (1)..(1): n is a, c, g, or t
ngtgcttttataaatgttagtgattattctcataggaaatctatgccaactacctagacataaaaaaaaaaaaaaaaaaatccatagtttgatagggggacagacaatattctcttcctgattgtaacagacagaaatatatgataattcaagattttctagctcttactttatgacctgttgacttaggttgtacaacatcttggccctgcaactgatttttataagaaactcgctttagattgctcagggcagcagactgccgtggatctgttccttttaagttcccagtattctgatctcgcttctctaggtaaggacataacattgtatttatctgtttttacataaacatttttagcatataattaaatgtaaattctttactaagagttctcagttgtttggggaggaagacctgtgaattagataatgtctatgaaaattaccactaaactttaaaaaaaaaaaaaccctaaccctatacaaatgtaaaatgtcaatctggggttggttgtttttatttaaatacaattcttttaccattctgctcaacagtaaacttaatatatattatgttttataaatatatctttctcaggtttatatattatccccatttttgaccactgtatgttttttttcattataacttagacttcttcataatacagaatctgtactgctgttggacaagtaaaatgttatcgtttcagtagctaatacttttcctttttctctctaaagcttgcatgtccaagtattctgcagggtgcatctattattacccatctttccactatactcacaatccctcgcaagcagaaaagttacaaaaagatctaaaacggtatctcacaagaaaaattggatttgaagctgttatgagaataaggtgtactaaaggtatgaaattgcaaaaattatgctttatattatatacttttttcaaaattaataagcattcacatattgacaacctgtgaccacctttcattatcataaaaaagattttctgcttgatccaactagctgtactgttttaaatattattattaaataatcattgttcaattttttaagtaatttgaataagcaggtagaggaaatgctttgccttattaggaggaagtcaagagaaagcccatattggaggtgatttcagatgaatttgaggaatagggaggatcttaagtgagaattgtcaaattaatgaatgacctttgccttcctcatcaaacagccttcagtttaggttatctctgttttat

SEQ ID NO: 26429 - DNA, 2134 bp, Bovine  19866881460760
  misc_feature (1)..(1): n is a, c, g, or t
nacatctttctatcatgctttgtaaggattttgtttactgccattgagaaaaagataataatatagctcatacttagtaaatatattagtggatatcagaatcacaaaactattctccagaagaatttcgctggtcatcataacactcattaaacacctggcaaacggacagacatggttgtttccttctgagagtttgacctctaaaacttgaccacaatgaagaaacttgtagccatacatcaagaacttgatttgaattccaagagagtagtgcagagccagtttatctaggagcagactgtcatgtatgcacataagcatgaacacacagatgcacatgcatatttaaagaagtcaagaagctgggatacaccccttgagcaaggttttgaacaataaaaccctaggtatccaactttacaaatgtgcaaattgctaaagtgaaataagattctgctaaaagtaaaaggatatcaggcttggcagggctgcatgggaagggaggtgaaggagtcctaaggaaagagaattcgatgaatgttgaatttgtaagtatttccttgggataaggaaactactccatttgtccagaagaaagagaatcagttgctgtgtttggaccctaacatatggcaaagatcatattaaaacaaataccaaaaatgcctgcctaaagcagtcattataataatatatatgcaccactgaattctatctgaagattcacctaaattgcactaatatcagagtcaattttcactgctgctgctgctgctaagtcacttcagtcgtgtccgactctgtgtgacccccatagacagcagcccaccagactcctccgtccacaggattctctaagcaagaacactggagtgggttgggaatatacactaccatatgtgaaatagagagccaggaaatttgctgtgtgactcagggaacttaaactgggcctctgtgataacctagaggggtgggagggaggttcaagagggaggggacataggtatacctctggctgattcatgttgatatatggcagaaaccaacataatattgcaaagtaatctttcaattaaaaataaataaatttttaaaaatactgttggaaagttcaccagaaaactgtcctaaccatgagggtcctgcagtgccttcttcagctaagtagctttagtcgtgtcagactctttgcaaccctatggaccgtagcccactaggctcctctgtccatagaattctccaggcaaaaacactggagtgggttgccatgccctcctccaggggatcttcccaactcggggaattgaacctgcgtctcttatgtctcctgcattggaaggcgggttctttaccactgacgccacttgggatgtcaacttgctcaaatccagcaacgaagtgtacctggtctacagagacagtcactgccaggcagggtttctgttgtccttggactgttattccttgtgggaatgtttctgatgctctgaagttcagacagatgctctgagacagtgagaggattggagtggctcataacagaggcccataggattaagatgatgtcctgtttcaggtttggcctaaaccagcttccaccactggttgcacctttcaattgaattgagagagttccttttaatccaggtcagagatttggaaaaatgacggctggttactgtgggtgggtggatttgacccttagatgtttggccacccagcacggttgacttggatgaagggtgtggagaggctggggccacctgtgttgaaatcaggcacaattgactatggatctccgctcctccggaatctactgtgtgacatcaggcatgtcactcaacctctctgagcctctgatttttgtatctataaaacggaacagtcacagttaacttattgaatcattatgaggttcaggtgaattaatgggaataaagtgccttgctcataatgaagactaatatgtatcaaagagggttctatttatcgggatattccttctgaacttacgacagtattgcatagtaaagccaaagtaaccatacttcttaaatattctctaatggacccaccacttagagaaggagctgacactcaaacccacccccaacacccaactccaggc

SEQ ID NO: 26430 - DNA, 666 bp, Bovine  19866881602070
  misc_feature (1)..(1): n is a, c, g, or t
naacaaatgggagatatcaagaccaaaacccatagtttcctcactctgattttcttagtgggaatgtgtctcttgtctttttttttttttttttagcgatctgtaatttatctttggctgtagctgcagaggtttgtcctcttcccataggaggtaattttgaaggcttacagtcttaatatgccctataatttttctttttgtatcactgtcattttttatttaaatttcaaataaacatcattagtttgtctgagtttatctcatctaggtagttaataagtataattttcatgtagatattataagaagaaacattgatctgattcctatcttctattagattatacacagatataaagcatacagcaaagaggatttcttctttcctaatagcaactaatttattccttttagtgctagataatgtaaaatggaagctcgcatttgaattaaagttttaataaatagtccttattattgcctaattagaataatttattcatttataggctttgagtttttggattccatagcaaggcacaagcctatgtgctatttttttccttcacaaatttaatctatgctaatagctattaaaactctttcagactgatgaatatttgtcttcagtacttttcttgatcaagatagtaattgttatgg

SEQ ID NO: 26431 - DNA, 682 bp, Bovine  19866881907080
  misc_feature (1)..(1): n is a, c, g, or t
ntctgatgccccctcagacgatacattctttggatggcacgacttgcatcttgttcagtttcctaccttctctgtggttttctatagagctttaaatagagcaacactcagtcagtgctggcttgacaagtgtttgttaatgcaagcgcgaagctagtccagggaaataaaaagctctacgtggggcccatttgctgaaacataatttgccaaaaaacaagtatctgaaagccattttgggatttccactttcagtgatacttgatgataattcattccaaatttttttgtaaaataaatatagaaaacatcttattaagaacatcatggggcttcccctagagctcagcggtaaagaatctgcctgccaatgcaggagacatggatttgattcctctgtcaggaagatcccatggaggaggaaagggcaactcactccagtattcttgcctggagaatctcatggacaaagcagcctagcaggctacggtccatagggtcacaaagagtcagacatgactgagcagctacgcatgtaagaacatcaaaagctgaacaaaataatggggaattgctctgagaacacagagggagtttaagagtgcacactggtgaacagatacatcttttattcttcacgggggccttcagactgagtagaaggagacagagggaaggagga

SEQ ID NO: 26432 - DNA, 789 bp, Bovine  19866882052574
  misc_feature (1)..(1): n is a, c, g, or t
ncccacggtggctcgtgggggtcggcccagcacagccgtgcatgccctcttcctcctcctcctcctgactgccactttcaggtgccaggagcaggcccagactgccgactgaagggtcaccctgaaggccatctggaagggcattcaacttcctgggaggcaaggacaggctctgccagtgtaagtgcaatgatggatctaagctttttccatgttatgcatataaaccctcccctctgcctcccgctgtttggtgctcatgttaacctcagcatcccgtccttgaaaaagtgctgcggccaacctggtgggtgctgtgaggcctgcggtaaacacaaaaacgactgtgatgagtttcagtgttgcccctccaagatttgcagagacgtgcagaaaacactagggccagctcagcaggtgcaggcatgtgaaaccaccgcggagctcttgctcgacaatgtaagcttacatttgggctgtaagctgtactggacagccagtgagccgcatgtaggtgttgctaggaagaaaaaaatgatctttaaagaagatgctgacaggtggtcacagcagatgaagacagaagaacataacctttgacaaatagctcacatttttacagcgtaaagctgccttattcttgtgaaaggattattttaagaccttatcttgacattagaacttcaaacgaaagaaacaaatgcaggttatcttcttggatgttgatgccttagtgtttgattttgtcttgagcaaggggtgcatgttaaagggagaaatttttaaaac

SEQ ID NO: 26433 - DNA, 1355 bp, Bovine  19866881097190
  misc_feature (1)..(1): n is a, c, g, or t
ntttataaatatagattaaaaaacttaaatattaaaagttccaaccaataagtattgttatagtttcctttctcatagttgtttaagttcctttaaggaaagatcatgctgtatacatctgttcaacttttgtgtctactagagtttctttcattgtgcaataaatagcacattacccaagttccctttatactttactaattttgaaagaataccaagggtgtggcaacatttgataacataaatacttattcatttcacaaatatttgggtacctactttatgtaagatattgtataatcatggggaataaaacaatttaggaaaatgtaacaattgctttttaatttatttataactacagaatgaatctgtaaatacaaacaattttaagctcttcctgctttaagtcaatttaaatagcatatgttagagttaacatagttcattgattccaaatatgggttttgtagttagatgttggatttgagtagtgtaacccgagcaaggatgtctcagtctttctagcctattttaccatgtgtaatttggaaaaacataatatctgtttggtaggattaaatgagataatgtacataaactgcttaccttggggtctgacacatagtaagcccttaaattgcaactctaacataaattactttttaagttggttactttaagtgaaattaaagtaaattctgcctcatccgagattatcttctgttaaccttgcttttactttcatgtaatagttttcaaagaagcattaaaggatatggggaagacataggatttacaacaaaaagttctgggatccaacaaaatgaaatttacttaacttttctttttctaaggagataaaattttacagcctcttatatgcctatagagagttgaagccaaaggtagtatgatctaggtcagaaaaattacatgtttcttaagtgttattgctataataattctgtgttaaaatatttttcctttggaatatagaatgatatatcaactttcttcctcctctacttgtttttaattgttatttcattaggctattcattcaattgattggcatcatgagggcaaacaattcatgtgcagccattcagatggtagcttgactttatggaacctgaaaagcccaagtcgtcctttccagaccacagttccacatggtaagatatatgctttcaaaagaaagaaactctggagatgcagtgccactacttgaactaggaaagttggtatcagtatcactaaaaagaggtaatagaacatagcttctgattctaaatacccctttatacctccttcagatccccaccttagacccaaagtttctaaccttacct

SEQ ID NO: 26434 - DNA, 1461 bp, Bovine  19866880577153
  misc_feature (1)..(1): n is a, c, g, or t
nacccacccaaaagaatgtatttattacttaccccattttattctgtagcctgtaagatttttaccttttagttttttagggtagacaaaaacccatgcaaagtctaaacttctaggatcagctgtatgccacaaaaataagaatttctattaaatattcatttcatttccatacatcacattccagttccttcaagtaaatacacaaaaagctgagtttaccttttttcctattaaactctaaatctcactaaatctaatactcatctagtcatctcactttcacttctttcaaaaaccaatgataaaacctttacttactagaaacctcttaagtatttacaattcacttgctaaatttactggacatccataacttactgcaaaagaccacaggaaaaattaatatgatttcctacctttcacaaacctaaacctgtgtttttcacatgtataaaatactagaaatcacacgaagctttaagcacagcaaaccactaggaattacatgagagcattccccatttttacaaccgcttcaaatttattgcactaaagcaagtgtggaagtgcactgcctacctgcatcagctctggaccgctggccaggtgtctttccgaatggggtcttcattcatctgtatttaggtgagcagcacagctgctggactagggtgaaaatccaacacgctccaatttgaaacttcacagacttgcaatgttcttgttaatccatcatcccaagcgctttttttttttaaacaagttcagcaaaaatacgtgaaatcttacgtactctgtaaaacagtgaaataacagttcattactagagcatcacacaagagcaaacttctccaagtaagccatcaaacatgacattattttaaatgtaacatcagtgaaaatgcattttgcccagaagcaattaactttaatttctcagtccttggtgccaaggactgcacagagaagcaagagaaaagaaagtactagacccttcaacaaagaaaagggtagtttcttggcggtcaattgaacataatacagccttgggcttccctgtatcccaatccattttgcgggcagaagtcagaaaagggtagacactggtatgtcaaagaagatttagactggcacagcccatcttcttgacgggacacaaaaagacccagcaagaccaggagtaagaaacaggtgcagcaggtacacagtggaacaactcctggaggatgaggcaacactggaatccgcttcaagcctgagccactgctgggtggaaggtcggtgaaccaagataagggattacagtcagtaagactttagcagttccctttctgctcccaagattccagaaccagagggaaagatccagtaactctggaggagccttaaagcaattttcattcattcccaggcaaaaagttaaatcatcttataaaaatggtttatcctttaaaccaa

SEQ ID NO: 26435 - DNA, 1762 bp, Bovine  19866880888345
  misc_feature (1)..(1): n is a, c, g, or t
nacacacacacacacgccaacagttcaatctctggttggggaactaagatcccacacgctgtgtggcatggcaacacacacacacacacacacacacacacgccaacagcaaaacaaaacacacaaccaaaacaaaaagcattaaatgaaatgggtggaaagtgcttggtgaggtacttattaagcacttttgctagtgctttattagtgtcaaatgcttttattatcacagagctgacagtaccaaatgaagaaacaatggaaagtaagcccacccctgcaattctcctacagtggtgactgctttagatgcagttcttcagtttacaagtagcagtcagcaaccacccacctttagactaagcctgccttgttattttggggaaaaaatatttccagagctgtaccttcagttattgcaatgagtgattacttccaggaagaagactgtaagatctcgctcagggtgaaccctatgcttccaggtccatctccttcctgtatctgtctgtggctcctcccaccagagcctgagaggtgaccctgcctccccctggccatggccttggcagtggccattgtggctgccacaccaagcctcccctgccactctgccagcaggaagacctgtcccgtcacctttaaccacagatccttgggccaaacagggtaacattaaaaaaaaaaaaaaaatctaatttaagtgtaggaataccataaattctactttttactctgataaaattatcccggaagataaaacagagtacatacagtttcagtacttatatgccttggtgcttaaaatgaagatttttcactacagaatctaattggtacttaagtattaataaaaacaatatgcaattacagcaagaaaagatatgaaagtataaaacacattatttaatcctatttaaaaattctttttaaatttaaaattttatgataaattgaaatttcttaattgctaatcacaaagtttaatactttggactatataatatattggggctactgattattgccccttttctttttaggtagtattaattaccattcaaataaaaattctacttctttttgttcctatatgtatacctgacatttacattggtgaaaagaggggaaaaggttacttaaaatcttcaagtaaaacttcaaaaaatcttttcacagaagcaggtttaacacatcacagtctgctcataagcacaaaatttgcagtcaaaagttgcacataaagggtttattttaaatgttttaaggataggatagagttacatcataattataaaaattacttacagaattaacagctttatattgtttatacttctaaatgcagagaacagggaactgtctacacattgtataaaataaaattaaaattaaaaatgaattcaagcttgaaagatgaggtcatttacctaattttaaaatgcgaacacgaagacctctgaactatacacattcgttcaactgcactaatgatggaaaatacaaaaagcgcagcatttccaaggaaccacagacatttcaaccataattgttttctgttataataattattcctgttttgtctttggagaactttcttttttttttaagacaatcagcttaataatgttttcaggcactacaatttgtgacaatcaaaacagtcttctaatgggtccacggcgttcagagactcaagcccaatgcacttgggggtttggcacgtaaaacaatagcagaaatgaaatctggtttagaagca

SEQ ID NO: 26436 - DNA, 1605 bp, Bovine  19866881209642
  misc_feature (1)..(1): n is a, c, g, or t
ntagatgatggaaagcctgtgttattataggggtgtgtgctaagaccttcccctccactcatctttagaaccatcctcagtctcaaacatctgctcccttgctttgccaattgtgtcggctaggtatgcatcaccgatttgaaatgttacaaaggtcctccctatcaggcaggacttcgagtgtagaaactcatctttattaagttctagtacctaaacacagtcaaatccatcgcattttataagatacaaagaaagacttacaggcacctggcccagaatggctcctttccgctgggtgacgaggccattccctctgtccgcctgtgctgaatcccgcagcatacactgttccactggggctgggaaacaggtgggctcacaccatgcagttgtttttcgtggaatgtccgtttcttcacgatacttgctgataaacccgcatggcctgcatcagctctggactgttgaccaggggtcttcccaaacggggtcttcattcagctgcatttaagtgagctcagagctgctggattagggtgaaaattcaatgtgctgcagtttgaaactttccacagaatttcaatattcttcttaatccatcatcccaagcactcgatttctgttgttgtgtttttgcaagttaagcaaaaatatgggattacgataaacaaaatttccacacagcacgctgtatgcacctgtgctccaagtcctcctctccccataatgcctccaaactatgtgggtatttaactcatttgagttcatttttgtgtgtggtgtaagaaaatgttctaattatttacctgtatctgtcctgttttcttgcaccacttattgaagagatttttttcccccattttatattcttgcctcttttgtaataaacaaattgaccataactacacgggtttatggagaaggaaatggcaacccactccagtgttcttgcctggagaatcccagggatgggggagcctggtgggctgccgtctatggggtcgcacagagtcggacacgactgaagcgacttcgccacagcagcacacgggtttatttctgttcacttgatccatgcttctatttttgtgccagtaccatattgttttaattaatgtagctgtataatatagtttgaagtcagggagtataatatctccagctttgttcttttttctcaagattgcttttactattcagagagttttgtggttctctataaactgtaggattccagctaggtgaaaaatttgatggatattttgatagggatttcattaaatctgtacattattttgtgtagtacgaactagatcaacaatatcaagttcaacaatattggttcttccaatttgtgaacatgagatatctacatttctttgtatcatctttgatttccttcatcactctttgatatttagagtttaagagtgtaaggttttgaactccctgaatgaatatattcttaagtatttccttgtttttaatgcaatttcaatgggatggttttcttaatttccatttctgataattcattatcagtgtataggaaagcaacagatttctatattaatcttgtatcagcaaattacgaattcattt

SEQ ID NO: 26437 - DNA, 1180 bp, Bovine  19866881290392
  misc_feature (1)..(1): n is a, c, g, or t
ncatttgaaaattttatgaagaagtgagtgtgcctggcagagtgctagctaggtcctcgatgaacaggggcaagaaggcacaccgttactcagtgtgcagcgaggctccatgtgaggctggctgcgcagagggttcaagagagggtctcacagagatgacctcacagcccatgtaaccaaaggccacagtgtgctatctaaaaaggcaagtttctgcaaaacagataaccagtgcaagttcaatgcatgaagcagggcactcaaagccggtgctctaggacaacccagagacggggtgggaagaaacgagggagtgggattcaggatgggggacacatgtgcacccgtggccaattcatgtcaatgtatggcaaaaactatcacaatgtttaacgtatttatcctctaataaaaattaattaatgaaaaataaataaataaaaaggcaagtttcagaaccgcttacttgtgggatgtccttttcttcatcatgcttgcagatacaccagcatggcctaaaagagaagtgagtatacgtcaatgaaaactggattaaaaaatagctcaaactcaggaaaaagttaacttacgaaaaactgccatataaagtatgaaattaaaccacaagggaattccctgatggcctagggttaggactctgtactactctgctttcaatgccaaaggtaccaggttccattcctggttagggaacactgcagaacctcacaagccacaagatgtggccaaaaaacaacaacaaaaaaaacccacaacagccaaaatgtaagaaaaccatttgcttacttatcttttaaacagaagataaggggttctgggaagataaaatgacagtaagagcagtttatctgcctaaaatggccatagaacacacaaaaagcaaaatcacatggataaaaactacagccaaaaaagtgacaatcctagtcataaagtactaaaaggtatagaactcatcttcctgccacaaacaactagaaaatgggacaagagatatgaaacatctggacccagacatcaggacaagaggcagcacgggactatggaaccagggagcagaaaacccacccaagggcccctacaccaaccaagtgcatcccaagaaccatttgaggacaatggtgcatgaagggtaaccaagaacaccgaggttgtgcta

SEQ ID NO: 26438 - DNA, 1139 bp, Bovine  19866880358164
  misc_feature (1)..(1): n is a, c, g, or t
naagtgatgggaccgatgcctgatcttcgttttctgaatgttgagctttaagtcaactttttcactctccactttcactttcatcaagaggcttttgagttcctcttcactttctgccataagggttgtgtcatctgcatatctgaggttattggtatttctcccagcaagtcattaagtcagtctatttaatgagtatttacataacacacattaaaggtattaaaaatgtgagtcagtggtaatgttcattttacttattagcatttttttttcacggcaatcctcagtttgaaacctctttcttgctatcacttcaatcttcttagaaattatttgaccatatataaattgaaggtcactatacattccatatttgttgtactgatctttggtcttgcattatttggagatttgattctttatggctattgctgttagatacattctgaaatgctctcaagagtaaaatgagacactcttgttttctgatgaattgccttacctagaatgcaattaagcattttacaagatagtaattcgtgtagcatgtacaacacatgtttacttatgggaattacgtggatttgcagtaattattagattctattggtttctttccattatgttaatgtttccaaagtaagcatatcaagcaattttataccatgagtattacagaagcctagggatgtttcttcaacatatttggaatgccacagagacattttatcattaaatttatacttttcattttattcttgttttgatatcaaaaaactgtgaatatacaaatatagactttttaaaataaagaaataggtattgaaatataatattacattatcatcatatatgccttataccagtgaccaacactggaaaattaactcagtctttcttcctttttttttttctttcttttttttagtgttcagtgctgaactagattctcttttgactgtactgacatactttgaaaaattttaaactacagctctaataaattataaacagccaatgtattacccaacaatttcctttacatttctggggagaaaaagcaaaacgaagcttcttgtcacgtaaagatcatcagcaaaagagacttttgcattagtgatgccctttctattaaa

SEQ ID NO: 26439 - DNA, 2213 bp, Bovine  19866880431637
  misc_feature (1)..(1): n is a, c, g, or t
nataagataaataatagtgtgattaacaaagccctgaaacgtacatgatgaacctgaaaagaaaaatattatatatttttttcatggatgatgctcttagctgtcagtgataactatactatcatgaatgagtagccagactctatggaaatacagatttggctgttgtcatcttgtaatgaggtaactgagttctagttatcgtttgtgtacttacacaatattaaaaaggatttaggtctatctgaaaggctgtgtaaatatacaggctccacttgcatgcttttctcagaaccagtctaattcagacatcctttaagggcattattctttctgcgattccctccttcaatttcccttcttactgacttacagcattcaaatttaatactatgatatacaaatggctgaaacgctgtcaccatgacaatatttggaacacttgtgcccaaatgacaactgtgtgctctggacttgaaccaaggctatttgagagcattcctgaaatcacagggtgattaagacaaatagtgatctactgagtcagcctttcttctcaggaacttattctcttttcatttattaatggtgattttctttaacacggaagcaccactgtatagcaaattgctcagaaactgacatctcaatatatgcctttacacaaaagatcagaaaaactgcattatttggtcttcctgaacacactgtaagaaaaatccctaaataaatgctgcagtttatgactgtgaccctttgaagccatgagaggaagttcactctattgtctttaagtcctcaatcttttctccacttatagttctggcagtcagtaatgaagcaggaaggtcagctctacagtaactctgcacttgctgatctttaacattttcaagaatgacagattcgcttcccatttgctgtacctgtggagactattttgaaagaacctgacgatttatgcagctccacaaacaatatagcataactttaaaaaacaaatgacacctgtctagtggttcaccatgtcagatgattaatgtcacactttttgcaaacaagggactgattcatccttttccatcttcctaagggctcctgggcaaagaagggtggaactttcatctgttctgtgtcttataagtaagagggtttataatgatggtattgaatgtaccttcagacttgtctactgggcattaaccttgagctctactgtgtgaccaaatacaaatgccaagacacaaagctatgagcaatgaacagaatgtatttcagagaagctgcagcataagctgctgacgcttcttggcaaagctttcgtttgtatctcttccagctattaaataattactctaagttaacttaaatacaaatcaataaatagctatatataacttttactgatacagttgaccttgcctaaatcatataagaaaatagtgtccaaactaaaagaaaaaaaatgtgacagagaacatcataaacacataatcgattaagatacttttctctcactattttatttttgttttctttgtacgcattacattcaaatgctaaattttgttgaaagaagaaatttagtaaataattaaacaatgtagtttaagcaaacatgtatgccaggtatttttactttaagtatttgaaaatcaaatagtccatttttttttatatgacttattagggcactgtctcttcagggagtataatttgtaacttactatacagatacagtctagactccctataaggatttcagcaaaaagcctgccaattcctggtaggattcagctaggaaaattatttaactgtgactgtcttctcctcatttactaaataaagatgatactactatataagataaactatttttgaagattagaggttaaaaaaaatcacatacaatgtttggcaaataataggacacaataaataaaaactactgattactattattactcctcaaaaatgtagtatctcaaaggatttaaaaacatgaggatttcatgggaatacatcaagagatgagagttaaaaacttgtctttcagatcagatcagatcagatcagtcactcagtcgtgcccaactctttgcaaccccatgaatcacagcacgccaggcctccctgtccatcaccagctcccggagttcactcagacccaggtccattgagtcagtgatgccatccagccatctaatcctctg

SEQ ID NO: 26440 - DNA, 1931 bp, Bovine  19866880437625
  misc_feature (1)..(1): n is a, c, g, or t
nataccaatacatgtatacataaaaaacatatgtattcaaaggtattagtttgatggccatgtagtttctaagactttttatggtaataaaatagtgatgcgatttctttgtcttaagagatcacatgagatttctcacaaggagctaggacttaataggtcaatgacccacatgtttggggttcattttcagcattcatttacatcttcttaatccttggagtaatgcctactaattaggtacaaattattttcaaattagccctggtataggcagtagtaattatttacgaagtattactgaagaacactagaagttacttcacaaaatgaagtagctatctcttaaattgttcttagaacaggcaacaatgtaggtgattaacagatgtaattcttaatggaactgtgagttttatgaaaatgatttgagctaaaaataaacatttaagtctagaataggttttcttgagttctagtctctttgtttccaaagttaagtgggcctgggcaaattttaaaacatggtgctaatagaaaaaccacatagctagcaatgctgtctggtcataatgttgcctacctggaaaaaccggctaaaacctagctggagattaatcatctcctttggaggctgaaagaaaattaggttgtatttcatagagaaataaaatgggccagtttttcaattctgttcttaagtggaataagaaagccccactttacttaagaacagccccaatacttatatatcaaggagaataaatcagtggggtgaaatcttctgttaccatttagacccagaaaagaagttagaaaagttggagcctgggtacctgtcttcaggatatttagccacgtctgatgcattcagacttcatgtatccatgatatatatgtgtatatgcatgagctatgtattatctctgatgtaagctgcacacatatgcatgtgcacgtatgtgtgatacatgcatgcatgtctgatgtatatgtactgtgtatgcatcatgtatgttatggttaataagatttcagtcttcttttccattgtctgaggacaggaatttccttgcagaacttctctctgcaattgtgcaagataaagaccctagatgatagacaatatacaaaataatctaagttgttgttgcagttcttagagcaaagaggcaccagctttgagacaaatgttccacttaaaacggtctgttttcatgttattaggttccatgtttcttccagcatgtttcagtctccttaattcacttctccagaccccagttaaaataaaatgactttgctttgctttctccgacatcaatccttcttcatccacctcagttcttcttgtattgcttttctttttacatcctagattcctgagagatttccacttagctcatgagacatcttccctttcctaagaacatttctaattttcagtactaagatgaatccattatatttgttaacatttggaaacctgtgatagtaataaaaaggtaaataaaaccatggtaaaacatcatgctctgtaattatttactgtcaatatcatttgcaaatgtataaaaatgtgactaaacactgaaatttgtaatattctccttaggaaatcacattaaggctactgaaataaattggagatacattgctatagttctagaaaagttgttttcctgtcggtctaaatcattagtatactgtaattacactttcagttagcaggtatcagattttacaagtttcttttttactggtgatttattactgaattatgactatgttagcaataaaactatttttccttttttcccctaaactctttttcttttaaaactagagcagcggtgaattttaaacaatcagtggctatagattttaagcagtattagaaactaagaattttaaggttattaaaaagctgt

SEQ ID NO: 26441 - DNA, 1801 bp, Bovine  19866880577370
  misc_feature (1)..(1): n is a, c, g, or t
nttgtacctgggctatttcagtgtttttcttgaactaatctgcttccactatgctaccatagcgtgtgtatggtagcactcaccaatcagtgattctgatgacatttgagttaggaattgatacacatctagttaaaaaaaaaaaaaaaaggccttgaatggcttcccatttcactaacaacaaaaattaaaattagtagaatgagcagctattatggtgcttatctaatttatcatccccaaatgaagaccttcttcatactgaaaaggagcactttgaacaatcagtcccagacaacatgcgtaaacagacacaatcccagacaaagcagaagtgttttcctcctactctcccacctggaagccccttcacaatctacccctgccccctgcaatgaacttgacttcatcacctgcctcctcccttgcaaatatctctcactacatacgtcttttcttgcacatcctaaaagctgtcagatttcctcctgcatcaaggttctttgcccaggcagatgtttttgcatgtaatacctacccttccttctcctatcctcagaaatcactccgtacttttcctttgtttctgcttgagtgtcgcctgaccagagaggccttcatggagatttcagcaaagagcacctttatctcacacctgttatgttcctgttcttctgtcatccttcatgtttttccccatactgtttatcagcatctgatactttcagtggatatgttcactattccttgtccactagaatacaagttaggaaagtacagaagctttttcttctctcccggtataatgatagtagaatatgttccgaaacaaaggagttgctcaattaaaattgattaattaatgaataaaaatatttgctttacactaaattgtttctgatctcctagcttgtctggcattgattagacactaaaaagtcaacttatatgcactaatccacataattctttcatgcacagaaagccaatataattttataatgtagaagattttcttgttcccttttttgactgatatgtatctatgcacaaatcttatgtgtgtatctatagatatcttaatgtgtgtatacagatttgcacacttattttttgaaatatgttctttatattagtaattttcaaagtattaggtttgtattttacatttataattatattgcacactttgcaaaacaccaaactagcatgctgtctgttgctctgagatgtcaagtaattctagatccaaatatactcattgattaattgatagaacaaacacatactacacattcacatcccagttaagatcggttttagtttagaaagattgtttcatgaatattaattagagtaagaaaacagaagtctctattgattgaaggaaacaaaaggtctaatttcaaacttatatagaacctttttaacttcatttctctactcatggcctcaaaacactatttctgtcagcccattaaggaaacctattttcatcatcatgtattctggaagatactttatcttgggtgaaatcaagaaatcgtttgtggtttctattgtttcatcatatggctacatattaacttaaacttcatctttctaaagtgttttattggtttcctcttcagccttatttacatgattgattttcaatttatggcatgtccaattttgtccaattaagtccaatttggattagctctttacaaatcaattcatttctataaacccattaatatttcacattatcaaaagcatattcttcatgaatatatatcttaatcccctacttcaataa

SEQ ID NO: 26442 - DNA, 2343 bp, Bovine  19866880736038
  misc_feature (1)..(1): n is a, c, g, or t
ncacacacacacacacgcacgcacttttaagctctgactactaagtgggcctggtaacaatatctcaaaaacaatgagcatacctaaaaaccatcctccacaaagaatccagggtttcttggaatactgtttgtgaaagacagtccaatactggaagaaatttggaggatttgagaggcttgatatttaagtaatataaatttaaggaggagaagagataataaatggaatgaataaaagctataatgaatacttaatgttttgacctgaataaatactcattgacatagctcacttagttccaggcaggactgacaaaggcaaggcatctaccagattacaagaactgatcaatcaatacaaagaacaacaaccaaaaaggaataaagtgaaatgcaagctttctgtcagtaaaaagtagctggcaaaagaaaagtaatccagctaattatgaactttacaccattggaagctgataaatgttagaatgtcatctaaaaattaaggaaaaatgtatatatatatacacacactatcatttcatctataatacttgtaacaattttgtttccatatgattgatttatttggggacatttggagcataatataaattttgagtgagcttatgtgctatttcctcactaatgccactagatgagagcagaagtcccaagagtcaatcccagaaatacacaagatgcccacaagcccacactgcgaacgttaccagctactttatagttcaatgcatgtgctattctatagggttgtatcttgttctatttttcttgtctgtgaacttctctatatatatttaaaaaacttcttccacatctcaaatgtatttcaacatcctgcttcaaaatgccaagaagtgcatgagacaagggtactgctctctatgcgtttagcctgaaagggacacagccaaagcctgcagaagcggctactattggcacttagagtggctgcttcagtggtttcaaacatccctacaatttccaaagccaaaaactacacagcaaagctgcaggtttgaggaaaatggacctaaaagcatgtccacagtaatacaggcaataaagaagacagctgtaacattggatcaaatattcaattttgataaaacgttaataagataaaatatctactataagcacatgcgtcacaggacctatgaatcaaaggtaaacatctgcaccaagatttaaagccatatgggatgacttaactgccatgtttggtgcccagaacaatgacccatactcatgcacaccaggtgttatgaccttcctttcaatttcaaatcaccctcattccacaattttataataactgaaaagcaacagcttttctaatgctcacttccacagaagtcctcaaaacttttttttttaaggtacagtgtgtcttacttactgtagtaattatgtatttataatctatttatcatgggtaaaacaatactactgtttttacagggtactgtctgtctgtattagtttgtcactgatgaagatggtaaagccctgtggtttttattgcccaattatgcatagcatagtgatttgcaggaatgcatgtcacattatagcagaactgattctgtatacatatgtgcctaccacactcatctctttacacataaaattgcaagtgcttttataagcacagaaaattttggccatgaaatagctacaggtgcttcaattaggttaattacattttgttaatttgatttcagttttataatttcagagtttaagcagttacataaaccaaaacaaatgaagctcttttcattatgaaaaccaaagtaaagaaacagggaaattctggcttgttctagcagcaatttcttatctcctaggaaaggagaaaataccgttacgggagcaacttagcatagtttaaaagcacaagtggatgatatttaagagcaaaagcacccagcttgggacagcagtggaatcccacagcactagacacacacagattctgaaatgtaatgatgaccgagccttattactatactgcattatcctacttagcatggagatttcatgaaaaagttataagggtatgtgggaaagatgtgctgaggactgtcagaataatttattggtacgtgtgctattttatttctagctgaattttatcttcctgcacccacactgtcacaagccatctttgagcacctctccttagaagaggtctgtcttattaaacccccgaagtaaaagttgttttggaaggctcttctcagcctggcttggttttctgcggtcagctatttgaaggctattctaagtgtcttcagaagcagcaaggggaatgaag

SEQ ID NO: 26443 - DNA, 1329 bp, Bovine  19866880741731
  misc_feature (1)..(1): n is a, c, g, or t
ntttatcatgctaattttttttagtatttaacatgaaatctttcatgttactatatttaacaatttcataagcattgatgtgtatggatatgactaaccatcaggctaaaaccaaagatgtgataaagttactatctataggtgataaagtcactgactgataaaataaagttcaaagatcaaatgattaaattaacctgtaaggtaattccttgtttcccatgcaaaatgtttcacttataaaatatgataatttatctaattatataaatacaatgaatttactaatattaacataatgtattgtgcatttatgttaggtctatccttttggtaattttattttcatttttttctcataatagcaaaatacttttcatgtttaagaaccaactgaagtattttaaaacaacttaagcattataattaatttataaaggaaacaatgtaaaaacactgagcaaaaatagagaacaaatagaaaattcactttgcaattcatttattttctatccataattatgtgttcaatgaacacatctttatgttactgtgatataaaataactgaaaattctgaatctgcttccttccatcagttttaaaaaaaatgatgtatcttatgggtgagattacactgaactttaaataccacttattactatttagaatttggtttttattcaaatgtgatgactgaatgcttacttatactctattctgttattaaggcgttttataacaacatttttcttagacttatttaaactatacatatactcacatttttataaactaaagaaaatttataatcagcaacccccaatacagtccagaagactggtcctaatgttaacagctatatttgatttaaaagtttcaatctatataattatcactttactggcatatcttcaactaatttttcaaaagctcaattatggaaggcaacattacacaatcagttcagttcagttcagttcagtcgctcagtcgtgtccgactctttgcgatggtaaactctaattattttcttacattagataatacctgttcttgaataaaaagccaacatactcaaaaaataaacaaatgagaaatatcctggagcctttttctttgctattcctagaaatttcttaatgataagggtaggctgtgcttttgatatttcttctctggacttgctaacacacacttcaaggctgcaataactagattaaagtaataacacaccaagtgtagctccaggctacagttttagctgacacaaatcatctttcactggacacagtatataggtctgtaacacaagatgactttgctggaa

SEQ ID NO: 26444 - DNA, 1843 bp, Bovine  19866880788027
  misc_feature (1)..(1): n is a, c, g, or t
ncaagttgggtaaattaagttaaaaacacctgcatcctcccctcccacccacacatcctccattgcctctcccatccccaacactctctgatctaggctttgagcggagatgcacaggggtggttaatgcaatatcagaccaaagaaaccctcttctctccctctccaagggcagaggtggacagaggaatcaatagagcaaactaatgtagctccccatgcccgctgaggtcacttgaacgtccagtcaaggctctggtaattataggtgaggagatggaatttatattgaagctgagactgaatctttagactggttttaataattaaaagtaacagaaaagttgtggaatctgcctaagagtgatgttaaaaaccaaattgagaatccccaacctgttaaattttcactccttaatcaaaatggaaatttgatataaaatttaaaggtcttctggaaaaatggtgtctattaatggaacagaattatcacctatttgatctggaaagaacttcaaacatcaccaatcctagcactcaattttgcaaatgaggaatttgagaaaagttgaacaaatggcccaggtttgcaagatgaagtcagagctggttctagaggccagtgatctaaattctcagttcaggtctgtttgtccttctggcacctctgtaatagggcttgaaaaggattggcaagacaaatctggaaagataaaagtaagaaagcagtaaagataaaattgacttcacagcttgacctcacatgtaaacctctcctataatggttctaaccttataggtcagatgcgttctaaaatgatcaaagatgaatttaaactgagtcttactttgcaacatttctccgtaatgctcttcaataaaagagccctaattcttgatattttagtatgaatgactatattaatcacatgaatacagttcagaatatctaaatcaatattcataagccaagaagaatatttgagtaatatagtgttctctgtttttaataattaaaacaaattataatcttaaccagttatgtgccaggtgctactaagttctttaaatagttgtgaactacttatgagggagttaatgtcaacacccctaatatacagatgaggaaatgaagacttgaaaaaagttaaatgctttgctcaaggtcccaaatagatgagcaggattcaaacccgagctgtcttattctggatacctcaggcttgcctagtacactgccactttggatgaaggtttccttgaatgttttaagtgatatgcatgctaaaatgggatattttcaaagaaattttagcagtaaataaccttttaaaacgtatattttctgtatttaatgtttatcatctgctatgcccatttcacatttcttttcttgatcatatgaagagaaaatatgcttaataccagactgttttgaaatggtgggagactataaggaaatcagtacagagttcagagatgttgggttcaatgtaagaaagaactatatgcaatgaaagtactaagagatattgtagaaattaacaaaaggagggattatgtgcttgagaagatttggaagctgtcttcccaggtggtgagaaggtggtcagccatcttcacagcccagtttggaccactttctgcctctcacatggcttgttcttaatgaattattgcagggtatttattactaggaacacaagcagtattttgacttggagccataatgcaaacccaaatttggcacaacatcactttaaactcgggaaattacgactttaattaaagattcagcataaagccaacaagataataaatctgaaattgattcttcggtatg

SEQ ID NO: 26445 - DNA, 1574 bp, Bovine  19866880846104
  misc_feature (1)..(1): n is a, c, g, or t
ntaaaatagtgattcaaagttaggtttcatatatatgccactaatcaaatcaccagtgaaaatatgtcacaagttgaaaggtataaaaaacacagaggtagattcagaaattaaagaagtgccaagggcttccctgatagcccagttggtaaagaatccacatgcagctgttggagaccccagttctattcctgggtcgggaagatccactgcagaagggataggctacccactccagtattcttgggcttcccttgtagctcagcaggttaagattccgcccgcaatgtaggagacctgggttcaaaccctgggttgggaagatcccctggagaagggaaaggctacccactccagtattctggcctggagaattccatgcactgtatagtcctttgggtctcaaagagtcggacacggctgagcgactttcactttcactttcataatccaagaagacttactacagtgtttttcagacatcttaatggttattaaaaatgactgggagtactgatcaaaaataaaagagagacccaccaaccagggtgagaaaaccaattgtataccaacacaatgttcgtgttaagagagggcattctaactgtgaagaaaacgatttttcagtcttctaggaaaaaaatgaatgataaaattgaaattctttcagaaaggttaactttagttttgagtgtttctcatatagttgcaatccctcataatatacagacaggtcctacctcacttgcaacctatttgagataaactgaatgcatggatggataatcatttcaagaataatcctctcatgatcatttaacctatctgaacttatcaaaattaacatagatttttttttcttaattaatcaagaagcagataaagcatccattcagccagctggggaaaattcatgttatgacagatatggttggtaagctttggctcaaatacagcaaaccattatattcaagcagatgaaagaactgagatgaaaaaaaaggtattcaagcactggaagccagcagtgacttttcagcaataacagaaaataaatccacataaaattttgagataaaaacaaatatcaataatttaagtctttattgctaatgcagttggaatgacattaaaattttctctggggaatccactctttttttttttttcttgccagaatctattaacttgtgcccaacaaaatgtagcaagcagggcctattttgtcaaaaagcttagcaatgtcatatacatattccattatttaagcagagagctctattttaaaaatgaatttcttatttatcatttgtattctcattttaggctttgcgctatatacatatatatttatttatttatttattttttcccccaaaatcaagggccctgtcaacactgagtttatcctggcaagtagcctggtgaaagtctgacttattgaagagctcagtcacattaccacatgcagtacattttgtctgattttctttttccctcctatttccatacatatgaataaatctgtagaagaaaaatagcacataaattgcttttacgtgctagaataatgt

SEQ ID NO: 26446 - DNA, 1408 bp, Bovine  19866881015743
  misc_feature (1)..(1): n is a, c, g, or t
ntttctcatctataaggtcagatgcctttcaaacacagttctcaaccctggatgtacaggagaggagactggggagctttcataaaacaaatataacactagcaaatacccccaagatcttggctctattggtctgctctagaacctggacatgagtattttcttcaaaactcttgaggtgattataatgggcagctaaggttgaaagccattggcaagcagaaactttgactagaatactttacacagtcatgcagctgttaatgaaatgcaagatttttgccctattaatgatctgccagccattcaggaaaaaaaaaaaaagtctctgcttcaatacttgtcatctgtatagaccaaccttgaaaaacattatctcttaattagattctaaccttctgtactcccccttctacatgcaaaagacaaggaatgaaaggcagtggagaaggaggtcattctggtgactcaagattcaagggttaaaaccgcataaatctttcttggtggatcaatattttgataaatggtcaactgtattaatgaagggtttacaaataaggattctttgaagtagttttttatcctgtctcttccagaatgtgctataagtgtattttaagacattttaagcccgatatgcagtgcctcagatgtatttttcatgattcgtgagtgaaatacattttaaattcaaatacatacagaatggaaaactcttagtttctcttatcatcaataggttgtaagcaatttggaaaatccaatggacaaagcaatcataacaagcctcgaaggatttcatgaaggagccctagtttaaataacttaaaaatcttgtgcgagcacacgtgtgtgtgtgtgtgtgtgtgcatgtgcgtgcacacatgcgtgcatgggagcaaacttgatctatgtaagtcccatcactttttttcctatttttattgcaaacatattggtttattgtttattatcaggttgcttatttttactattctaatgagaataattatttttggtctaaagagaataatatggatgcaaagtactcaactctcaaagtgtcagcggtgttcgcatgacaggtaatgaggcaatttggcagaacatcacaaactaattgagctcagctcacatcaatgaggcttgttcagctgaggctgcgcctcctaaaaagaacagtggaattaaatgagacaatgtgacatgtacaattttaattggaagctctaatttaaaatatttaaaagcatgtttaaaataatttgtgaatccatacagatgcttccttctccagctaattaagaatattcagtgggtcatataaagtctgagtgtcaaaactatgaattattgaagtccctgcccatataagtgtacttgtacctttaggcaagatcaaatt

SEQ ID NO: 26447 - DNA, 679 bp, Bovine  19866881023229
  misc_feature (1)..(1): n is a, c, g, or t
naaggttatgcttactttattctgaagttacattgaatcgaaaatccaatcgccaaatgctgggtctgctttatatacagatatctagtttgatcctctgtcagtcaaaacagaagtttgaacaattcaccccctagggttaatccatactcttttaccaagctttccatgaaccatacttcaccaagattggtttgcaaaagtctgtgaatatgccagactattcaagagttaactgctggaatcctgcatcatcattgttgttcagttgctaagtcatgtctgactctgagaccccgtggactgtagcctgccaggctcctctgtcattacgggctcctccataattactacttgcaaaagccacaaaatcagatacacaaatccaggagcctatttctattctcgcaaaaagggacccattatctaactaggcaagagcacaatgacagttctttaacaatttgttcttggtatttaaaaagacttgcttatcaagctgagtgattttaatgaataaaaattgcagcaattcaaaatagagctcattcttacttttcacttactgaattgccaattccatttttgttctcatttaggctttcctttgtctattaaggaatattgacaagtaatctatctattccttgcttatgctacaaattaaaaataaattttc

SEQ ID NO: 26448 - DNA, 1325 bp, Bovine  19866881126001
  misc_feature (1)..(1): n is a, c, g, or t
ntcaactatggacaatcagtgtccctaaccctccggcattgtttaagcagtaactgcatatgaatatctaaaaattctctcagcattataaagacaccggaggtaccacgggtaatggtgatctacaatataacttaagggtaaaaactgaggaaaaagtcctaagtatacttcttgtctaaattttaagatataaagatagccttttaaccatttcaactttggatttttgcccaacttttccattagaaatagttttctctattcaggatgtttcctgaacatgtatcagagatgggcatcagctgaaaagaaatcagagccattgctgaagttgcattcttccctagcagtctgatgaggtcagaattacaaagtttctcttatttatgaacatcaatctatgtcgcctctagctactacctaatgaaactccttgcccctggttacgcatttcaagctgccagaatatgcgactgaaagagaaataaaatgtttttttaatgcacatagtaagcactggttatcactactctaaacaaaatatgtttcccctcccccacgctcaggagaaacaactcaatatcagtgtattactgagaattccaattttcggtaaaaccttaagtcagtttttctgttaaacatacggttgaacactatgcttgttaacataggattttatgttctgatagttgagaaacttcattcatgttttttgtctacaatgtctctattcatgtaattttgttttctatgtcacatatgtcttcagaagttttaaaataatgcttaaaagatgcacaatcaaaacagattcacttctgaatatcagagtaaccctcctttgacttagttaccatcttgttgattgcttttcaatgaattttgcatgagtggtttgttcactaaagtgatcaacctaagtagtaacatcaatggaggaagcaatggcaccccactccagtactcttgcctggaaaatcccatggacagaggagcctggtaggctgcagtccatggggttgctaagagttgggcatgactgagcgacttcactttcacttttcattttcatgctttggagaaggaaatggcaacccactccagtgttcttgcctggagaatcccagggacagggaagcctggtgggctgccgtctatggggtcgcacagagttggacaggactgaagcgacttagcagcagcagcagtaatatcaaaggagtctttttcaaaaacagagcttagctacattgactcttttctgagtgaatccacataaacaaacctaagttactatatgaaaatatttttggtgataa

SEQ ID NO: 26449 - DNA, 1309 bp, Bovine  19866881136492
  misc_feature (1)..(1): n is a, c, g, or t
nacagtctccttgtttaaaagtaaatgagatgcacacacatataaatatatacatgcgcaaataattttcattagtgctcaaaatgctattggtgttcattataaagagctcacccataacccataatacaatgtttctaatgagaactaactacttcagactaatctttttcctctgacatttcttcatctagttattcatataccaacttctaaatgaaataggagactggactacattaatgaaaaacattaaaaacattagaaaaatgaaaatgtaaatattcatcattttcccatctattcagtaacttgttttgctttgattttttttttctcttgaaatggatgatgtaaggcatacttctgactctaggttactagccaaacttgatttcctgagcattttaaactcatatcccagtgattcaacttgtctcactgatgaactactaaaggaaaatattagaatattagaaaatattaggaaaatattagaataggaaaaaggagtacaaaatggtggtgactaaaagacagagaagggaaaagcctgggaaaatagaacaaaggaagctctgaagatcagagtgaggacctcaggttaaaaaacagccctcctggctatcccaatctacataggacaggctcaggggaggaggaaaaaaacatataaaaagaggagctaaaattgagctgggggtttctcttctctttgcatcttttgggtcagcctgccctcacatctcgaggatgtattttcctttgcttgccaataaaactgagctatacgactggtctgtcctctcttcaaatttttgctgcagtgagagagaacagaggaaattacacactctcctgacaatagtaaatctttacacttaaactcttgaaagaaatagtgattttaatgcattcatttgtatctttgatgatcaacaaactctagggtcagcatgatttacttaatttcatgtcattatctcttattttactcacattaatctaagtaattcttctaccacctcaagccagttttacaagtattcttatttcaattaagacttttaagtgtttttaaactgtcatttagccatattacaccttaattgtttgtgttactcttccatgaaatgtttccaaatggtttttactttgcctaagggggatggaaaaggccttgtataatggcatcaagctatgtagaattatttgatgaattatagtgaccagcagggtttctttcaaagtcttaattatcgttacactggatccaactaaccaaaactatttcccctgttaccctgaa

SEQ ID NO: 26450 - DNA, 1942 bp, Bovine  19866881237388
  misc_feature (1)..(1): n is a, c, g, or t
ntagtaaagaaaggagatatccaaattcatgatcttgaggtgtttcatcaaaatctacattgaatacaagtagattataatgtgacctatgattcagaaatgcagtaaataaggtagcaaggaaaaatgcaattgaagagagagtgatctagcactaaatattcagatgggtatcatataaaggcaaatagttacttcagttaactatttgcatcacccaaacaggaacttttttttgacctcttcactaacaaaacaatgaaagacctgacatttcctatcagcttccatacatttgttttttcaaattatatgcatcgttttcctcttatgtacaatgtgaaatgattcattacaaagttaagtgtgagaactgactcaacataagtaggctgatgtgacaccataagttaaaagtcaattttttgtttaattattcccaaacattgacacttttagccaataaataattatttaaattttcaaagttaagcaattatgactccaaaacaaatcgtatcttgaataggaaaaataaagcctgaaatgtgctgcattataaaataatttaactacaaaatttaaaatttataaacataaaaatgttttgcttgctttatgacatacaaaggccagtaaacttgagttaacatatgaataattcagtgtacaagttttaaaaattgggtgaatgctacattaaatataggaacttattttgaaaacatttataaccaaaatatgtgtacagagaacataacaaagtttgttattatacacatactatttccagtttgtagattctgatgttctcgaaataatttgaacatctaaaggaaaaatacaacaggcaaagttgttttgattttattagtgtgtattttttccctcatttttaaaataagtatttaattccttttctcaccacctgtgaagcacgtattattattttcataattcagatgacaaatagagaggtccagaggttatgactgaggctactgaaataatcagcagtagattcacagtacagatagttattcataagcaactttattcaaaagccacagggcaaaagtatgtgatactctatctcttttcttactcatgtattttcctactccttcctgctctttccaaagctttaagggagagttgtataattatatctcaaaattgctttttaaaattagcaatgtaaaaataaataaaatttggaaaaatgaaaactacagaatataatatactttattaagtggctggagcatctgcacttgagtatatttttagttgaaatctcagtgaaataaaataactcaaacataatgctttagaatgacaatttttaataggaaaaatacagtaaaaattcaatttatttagactagatatactaaaattgataagtaaatgctcacacacacgtgaagaagataatggaatatgtgaaaaaaattctgaaatctgcataataactaaagatgtggaaaaattcatagtggttttggatgtctaatatttttaagtagcctaagaaattgagacaggataattttctatttgaaaaaaaataaatcacattattttcctttttgacaaatgattatttttcatataatgttaacaatataaattacattatgacagacattacatcagttattcaaagctcaatttttaattaaaattctcatgagctacagccaaaatgaaaattagtgccttgaaaaattgagctgagaaattctcccagaaatgtttaagaaagctacaaataaaatataagaaaaaaaatcaatatgaagaatagaattagaagaactgatttctctctgaggaaactttaaagaaatggatactgagaagaaaagaacatatatttatagtaataatatcaactgtctattccagagatatagaaaagcatagtttaatatattta

SEQ ID NO: 26451 - DNA, 1201 bp, Bovine  19866881363295
  misc_feature (1)..(1): n is a, c, g, or t
nctgtcccccatccatgaaacctgtggccataagggcatctttgcaattcatatgcttaagagttttagtttagtattcattttaaaaatgagattctgcttagatttgggccagttttatacttggttacacaaaggccaacttttgtactgtagcaaaaaaagagatcaggtgggatttgcactaagaaaatccaggaggacctagttttcaaccttttcttttacccatacacatctcaccattccattaatttaaattctccattctggttgaagtaaaggtgaaaatataagtttagctaacggggaactgtatttcgtttggtacagattcacttacaaggtatgttaaatatgaaaataaaatgaatacaatgataataatcactttgttattgtaaattttatatgcaactcagggacaagcttcaaagagaaggattctcaaggcaatttctattgaaaacctgcaacaataatctttatcctatagttgcaggttaaaaaatgagtttcaacaaaaatatgccccacataggcattttcccttagtttgaaaaatgtacttaattatctttaggatatttcctttcaaatttgccccctgaggttcacccacttattctaaacttgtcccaaaaaggccaggtctccctagtgtttgtggttccacttaaagagtttagaaatcaaagaagagacagaagatggaaatattatgtctttcttataagatggctcttttctttgtatcctttaaaaaataaatttgtctcaaagtacagatgattctcgcttattgaatgctcaagattggaataaatatttccaaatcacagaagtgaaagtatgtgttattatgaaacaattaacaagattaacctattgactgagaaaaagcaatttaggatcaatccccctaaaaatcactaagttaaaaaaaacacaatatcaactaataagatctatttttactcatgtcatccaatcacaactccatgtccaattcttaaggaaaataccatgtaaattatcaaatcaccagatatttattcacatgaaaagtgaaaatctattaaaagtatcaaattatgagcaaaagttgttgaaatctaggaaacatttctcaacacttgcctcagtcagcattattggttgctggctgcagacattagaaacgcagtgcagccacacagga

SEQ ID NO: 26452 - DNA, 1194 bp, Bovine  19866881432893
  misc_feature (1)..(1): n is a, c, g, or t
nttcctcttacctacgaagtatatgatgtcacatacctcagtttccccaattataacccacatcccttcatacaaaacagaatctctttctcctgtctatacatctgtctgtctaataccaacagggggaggctatttgaagcccattttgagatataaaagtaagaaaattattttcaggaattttcaggcactgtgtaatttatgccttagaggaaaactcccatgatgagtgtgtaggaaaagcagaaattacatgaaacaggtccctcagaaacttttgttatggtttaactacaccacacgaagctagccagagacccttcactatatcctccccacttgtctggaacacactctcatctaatcgccctctttgaaaagaaaccttctttcttctgatagagcagatttgagcactacctgtattactctctaactttccacaaagctaaaccatctatgatgcattttcactcctaaaactaatactagaaataatgccataattaatgaatttgatgtttcttaaaagatcccattttatatagggaaaagcatattcattttctgtctataatactgagggccagaaaggctggtgtggttcagcccctcttcactaggcagttgtccaggtgtgagcgtctttccccaaatcgtcttttaaactcaattttaatgaacacactgctagagatgtgccaggaaaattgttccttaacatttgcctgcaggatcgtgacccctaatatctttaccaggctgataactctgggcagcggagtcagcctgcattcatgaaatctctcagcagatgtgctgctggaggggagggacactgatgtcgcttggaaactgtcaccagtgaatgctattagcttgtgtattattccaaatacattaagagaaactaatgacacctttgttagctaatgtgtttcacctgcaaaggggtccattgcattctgaataggtttgggcagacaggggggaaaaaaacaaaactgctattctccctgatttcatacacaccatttacacaatttggtgagttttgtctctgggaaatccatcttatccatgcaagttaccatagatcagtcgtttgcttcttgtttcccctctttaagctgtagagatgtcatactctggctccctttgtgtttcttcttataaaggagactcttgata

SEQ ID NO: 26453 - DNA, 1115 bp, Bovine  19866881554523
  misc_feature (1)..(1): n is a, c, g, or t
ncattatcaggaatcacttcaattggacagtaaatgcttgcaattgcaggctctgcttcatgatcactgaatctcattttgactgaatgaaatgtgattattaggcaatttctgagttatagtccacctctcacctaccttgtatggctgcaaattgatttaccaataccgtttaccctcatgatcttgtatttcttataatatccattagctttatctcccggttttataataagttaactttacttccatagaagaggttaggtagttaatacgagttgaccttattctgtttggatttactcctatttatggcgcttgcattctagaacttgtttctctgattttcatggcaaaatggctgtacccaaattcaacaaaagtataagctaaggattttatatctaatgtaaatataaatgtatatgaacaggtaaatcaaatgtatcaaacttgcaaaaaaaaaatctaatggggaagtctttatttgcaacatgaaggaaataccatgctttcccctgcttgatagatgatttctggggattgaattaagtttgttaagcaactgtaattaaagatcagtgatctgaaagagctaattacccaagatcaatgttgatggtattctaagtttgttccatatcaggctcagagtgtttatgtcatgaaacattttctttatcagcactcaaaaaaatatgtgcactttcactaatgtttagaaactgaaaatatcatccacttatttcattgttggcaaatgcaatataaagctgaaatttatttcaattacaattcttttcccacacgttaaagctattttaacctttagcagcatacaattattacagaatagatcatttttaatgattcattatgtatgaggtcatttgacaatgcaattagctttgtgatgaaatttctattcttttgatcattctgtacctataatgaatgaggagagttttatatctaatttcctgaaattagaagattaaagatagaaacaggctcttgtatttaaacgagacttgaaatgactagcttgcattagtccttcagatgtgcaccctagacgggcagaactttgactatggtgttacggtttttttttt

SEQ ID NO: 26454 - DNA, 3140 bp, Bovine  19866880156517
  misc_feature (1)..(1): n is a, c, g, or t
nccatttgtttatttttgcttttatttccatattcttggaggtgggtcacagaggatcctgctgtgatgtatgtcacagagtgttttacctatgttctcctctaggagttttatagtttctggtcttacgttgagatctttacttcattttgagtttatttttgtgtatggtgttagaaagtgttctagtttcattcttttacaagtggttgaccacttttcccagcaccacttgttaaagagattgtcttttctccattgtatattcttgcctcctttgtcaaagataaggtatccataggtgtgtggatttatctctgggctttctattttgttccattgatctatatttctctctttgtgccagtaccatactgtcttgatgactggctttgtagtagagcctgaagtcaggcaggttgattcctccagttccattcttctttctcaagattgctttggctattggagattttttgtatttctgtacaaattgtgaaattatttgttctagctctgtgaaaaataccattggtagcttgatagggattgcattgaaaaagtatccacgtgaaaattccagatgtaaaggaaggaagaatctaggacttagaggtggggaggagattcctttaattagaacccaatccaggaagatccactcaagaatcttttcctttggagtatctcagtcctgctaggtgggcatggcccctccacaagaggagagggagaaagtccttagtagccaattccacatccatgtaccacaggggaagtgtaacccctaacccctcatctcctggctgagttaagttgtcaaaagtcaagtggagaataagagggtataggaggcagagatttctagattgtagcaagcgtagctttaaagctcttaagatttaagccttggctataggtcacgctcacctctggaaatcttttagctgtcccagctcaccagttcctgggtctacatttcaaaggcatatattttaggaagaactatggaatcttctatatgtaatacaaagcatttagtcaaagtaggacctacttttgaaaatatcttcatctaaacatgccttgtttcattgtgttgcccaacaaaggcaattggttgcaagtataaatccaataaaagcaatactaagaagtgtgggaaattcagcccagtaaattcctgagggaataagatttaggatttaaaacaaatttctgttggctaagccaagaaaaagtagatttatcaagcttctagataacgccatatatcaggcattttaggcacaaatatagaaggattaaaaaaaaaatctcaatccataaatatagtcaactcatctctgacaaagcagcaaaagcaatatgctggagcaaggatagtctcttcaacaaatggtgctggaacaactgaatatccaagtgcagaaaaattctaaacatagactttacacccttcacaaaaattaactcagcctccaacaaacaagatgccctttcataggtgaatggatgagcaaaatttgtttacatttagacaatggggcattattcagtgctaaaaagaaatgagctatcaagtcatgaaaacacatggaagaaacttaaatgcatattactaagtgaaggaagccaatctgaaaaggctacgtactatgcgattctaactacatatgtcatattctggaaaaggcaaaactatggagacaataaaaaggtcagtgttgccagtagttagatgggagaaagagatgaaaagggaaggcttttaaggcagtgaaaatactgtgcataatatggtaatgatgaatagatgccattatactttcattcaaacccatagaatgcacaccaccatgagtgaaccataatgtaaactatggactttgagtgataatgatgtgtcaaagtaggttcatccttggttaaaaaaataatgtacctttctagtgagtgatttgataatgggagaggctttgcatctgtgggggcagggagtctataagaaatttctgtgacttcctctcaatttgtggtaaatttaaaactgctctaaaataagtaatctttttaaaaagaaaaactgcctaatacatgaagaataaaatagtaactcccagaaatactgacacattggagtatttttctctgagtttgttaccaattttcttttttttttagtctttatataaatgcgtcttagcatttcagtagtgatgaatcatgctcaaatgactgatttttttcctaaactcatgcttttttttacataccctctcaacttcaaaattaaatcttattgagcaggaaattgtatttcttttcaacacagtctctttctgtgtgtttcctgttttacattagaatatctgttaactactccatcctcttttaagcttgctgtctagaattggtcatgtaaaagctactggctttacaacagtctgaaaattgcaaaatttaagtaatagataattaagagaaatacgttattaataagaatagggaaacctatgccctcatggctacacaccattgcacaagacatttaaactttgtgggacttaaattttttcacccataaactatatgtgtggacagtgttaggcagtgatgagtgaaagaaggagggatattaaaaattctccgatagccttccaagttttgtgatgacaatgaaccttgaaccaaaatcatgcctaaaattgcaggtgtaaaaccgtatatatttttcttggcagaaagttaattttcaacatgttccacaaatcacttgatcgtgaaacatggaaatgagtatctgtgcaggacttgtagaataagacagctgtcctggtcttgaaagtatctgcgtggcttttacttggttgatgtgctatatggttcctgaggcctattcccaaactataactgtgaatcagtgaaattgaaaatcttatcctaagcttaccaaaaaggaggtagtaaattgcccacttttttaaagtaatactgactatttttaggttactcagagtccatttataaaattactacttttcatgcataaatatcaggcttttagattaaaaaactttctgtaatatcgcatggttgatttgcctgccagatactcaccaatatgtctctccatcttg

SEQ ID NO: 26455 - DNA, 1717 bp, Bovine  19866880361194
  misc_feature (1)..(1): n is a, c, g, or t
ncatgagaagttgtaagattgggttctcaattttctctggaaattatttaactatcagaaggcctgttgtgtcatttttcccagagcacagagtgcctcgttcctgatctcaaccctgaactcctatcagggcatgttggaggtcagggactgcagtgggtagagacttcattctgcagaacctgatgtggaaagatgttttcattgtcattctgaaggagaaacgtcagaactcatatggcgagagagtgttacctgctttttctttgttcttaagctcacaagaaaggtcaagaggtttaaatacatagaaagtagggctcacctctcatagggttaataaaatcattttactatatttcataggaaaaaaccactcataaaagcttagactttagattaaagctagatgactttaatctaatgcaaaatgtaggaagcagttagttgtagatctgtttctcaccctgccacttcttcactctataattgaagaagtacattcagtattcagcaaacatttgttgattgccgtcaaagtgctggagactgtgctgggtaccagtggtccaaaataagccagacatatttctgtcttcaagaagtaatcatacagcggagagttctaaagcacaacacaatggcatacacagcacaatagtgaagtgaaaagcgcaacagtagcaaagaaaaagagccaccgccctttgtacagaaaaggagggtaccattatttcacaaaagatatgacttgtgagcagggttgaagtaagtttctgaagaagtagacagacaccctagggagagaaaaaaataaatatccctcaatgctcagagagaatgaaaatttctggtgggtggggcctaccatgcataggtagaaatctaggggcttgagaagggccctatgaattagagtaagcagactcttttagtctacaggtgatgagaaatactgaaagattttaaggaaaatgatatgaccaggtgaaggtctgcagctgcttatgtattacaaggcaaatcatctcttaaaaagaagattgtaccttaatatctccactgcaccaaaacagcaaaatagcattggttattatgaatgaatgtacaatgtaaaataatcagctttgatttttatagtggaattgattggattactttcatccagggcacgtaaaaacaaagattctagtgatcttgctatgggcaatgttgcaaaggacaaaatctctgtatttttatataaagtttaaaaagcagttattaagttttgtaaacatctgaaatgaaatggtgttatttttttaattcccctctttcctattggaactttctgtttgtgtatagaattcttaaatgtggttcatttaagtacttgtgacaaccacaagtactgtcacaaaccagagtgccctatctctatatatgtcctttatcagctcagatagttcttattcaatcttcagggatgaaggagaaatgaaaaaaagtctcaggacaagccaaggagattcacttactatttatagaataaccttacgttggagagaatcagcttttcaaagagagggaactaaagctttcagtatatgtttaataggaatgacatcattgtgaaatataaagaaacaactgcaaaatgaaaggaatcatttgtaattctaaaagaagaatgtaaagaataaatataaaattatcaatgagcttaaaaaaaaaa

SEQ ID NO: 26456 - DNA, 1972 bp, Bovine  19866880477829
  misc_feature (1)..(1): n is a, c, g, or t
ncaattatagaattgcacatgatataatggagaccttaatagactccagattcagataatgttataacttaatgaccaagcaatacagttaaatgtcatttccaaataaataatactattgatcccatgtcagcagtgtatatacttatagcttctcttcctgatatccagatcatttacattaatcagtatcccctctgtctctctcactctctctgtctctcacatacagacacacacacagtcttcacagtcttagcatttaagaggtacgaaagattctgaaattaactgatgttataaaggaaccaaagtcttattagcatactgctcttatcaactagttagttcatcacttataccctaagatctttccaacaatgatttaaaagcctaaataattaagtttcagtcagaatgtttcatattctaagtatcatccatattttatatggatactaagtagtttatgtattttaaagtaaatggtaaatatattttcatagtaaccttcagtttaaatgtaccatgttgcatttaaaatgtcatgcagaaaaagagtttctgtatcatttgttagagactatatcagcctacaagtgttgtcaatttaggtttacttcagaatattgtgggttttcttaaaatgacatatttgcacacaggtacagactataacttggtcattactttcattaataagaagattttaaataattaatgattgcttcttagatgtagtatataatagtttgaaaccaagaaaaatcaagagtggttattttcatgctttagtcattccttatccggagaaaacagagtggctggaaaacacagggctgaagatgcagacaaataagagtctgaatccagatttgtggatatatgtatgtatgtgtgcaggaatatattagcattagcatgctgctgataagctgataagtcacttcaagtcatgtccaattctgtgcgacccccatagacagcagcccaccagggctcccccattcctgggattctccaggcaagaacactggagtgggttgccatttccttctccaatgcatcaaagtgaaaagtgaaagtgaagtcgctcagtcatgtctgactcttcacgaccccgtggactgcaagcccaccaggctcctccatccatgggattttccaggcaagagtactggagtgggttgccattgccttctcccagcattaacataaacatcgtaatattttacttttaaaaaaaatattgtttttttgtgttttttttttaagtttttaattatttttggctgtgctgggtcttagttggtttgtgggcttttctctaattgtggcaagggggttgctactctctggttgctgtgtgaggccttctcattgcggtggattttcttgttgcagcacaggctctggagtgttcgggttaccatagttgtggttcccaggctctaaagcacaagctcaaaagttgtggctcacgggcttagttgctccatagcatgtgggatcgtcccagaccagggatcaaacaatgtctcctgcattggcaggcagattctctatcactgagccaccagggaaaccctaattcccatttcaaatttaatttttatcccgttaatgaaaatttgttttgtcaaataataatgttatgtcgtttactattgattagaggtttggatcagcacacttatcaaaaagacatagaaatcatttcaagagtatcatagcattcttagaaaaatggatagtttctttctgaaaagagaaattagaacctagaggcataattaataaatttgttctcagtacagtagccagtggaagaattttgtaccatgttggagtagtcttttccaaagctttgctatacccgcagacccagttaattcatcagatgcccagtttctaggcagtgctttcccacagcactttctgcagtgatggaaatgtcctttatctgtaccat

SEQ ID NO: 26457 - DNA, 3320 bp, Bovine  19866880525520
  misc_feature (1)..(1): n is a, c, g, or t
ntaaagaggtgttcagggacaggagtttcaatatgtgcctctgtcctaatggggctgagttagccaagcaattaccaaaggagtagccatagtgagtaaattcattacatagcatatataaactgaaaaaactctaaatgttgacagaccatatatgagattagttagcagaattaagaggcttggttaagactcatcatgttgaaacggatacgaggttattattttttgtctcaattggaataaaagatatgtggatgttgtcagatattttatttgtctagtctgttttgttttctttactagtttccagattgctctatcgtattatggcacaatctaacaatgccaccaaacacctacaagcctagtgaccagaccagatgtcttattaggaataaggaggggaaagcaagcagattagtatttagtttggagtcttagaatttttggaaagtcatcagggagagttcagcttagaattcttagaaagattattttatagaaatattgggaagaaatctctaataaataaagctctctaccagcagaatgaagtgacattgctaaacaatgagctcttgtcaccagaagtattccacctgaggctaaaagaaccaaaaaaagattatattacaggatctgcatggatccttccaagccacagattccaagataatgatactttttgttcgtaaattaatgaattatttttggagcctgaagtcactttgataatttactaaataagtttaagaaacagagtcccactgtgagctgttcatctaagatgaagtctcccatggtagagggtgagagtagaaagtcagggaatgtgagctgggaagtcaggacacctgggttctgacccaggcttggatgatacctgtgtaagctgcacttaactactgatgatttgaagatccctggctataaaatgctgcactgtttatcactgcggtgtccttagttttaaattttatgatttccatgaatgtgcagctgtcagctctcgtattcctcatcttaccatctgccttagttgattcactatcatcctcttggaaccaattaatcagtgaagccatgtgaaattatgccctgagttaatttcaattgatacatacatttttaaatgcatccttactgtgatttttaatcaagcaaaagaagtatcacatctacatgtgtcttcaagaagactaatggtgtgtcttaaagtatagattggcctgatacaccagtattaatgtaatagatttttaaattatagttatttaatacttatggaatttgccagccatggaaatttaataatcaaggagaaatgtatacccaaacacaaaaatgtgcatagaaacaaaaatcagaaaatggatgtttatttctgactccctaattctgaataagatcttaatgttttagggtaaaattaacacttcctaaagatataatgttcacagttattaaaaaacagaactatatgcatcttcaacactgcctttttggtcatatttctttgaagataaaactgaatatctaattttgttaagaaaggacatgaattgtgtgtgtgttaattgctcagtagtgtccagctctttatgaccccatggactggagcctgccaggctcctctttccttggaattctccaggcaaaaatactggagtgggttgccatttccttctccaggggatcttcctgacccaggaattgaacccaggtctcctgcactgcaggcagattctttaccaactaagccatctgggaagctcagattttcacatacacatgagtaaaatatataaacatatatatataatgaagactaaagaaaaatagatatgtcatgggtaatacgttattataatatggttttataataacattagatagacactggtcttaaatttcatgttttaaactaataatgtaaactttagttctatggcatcaccgcagagaagacaatggcaccccactccagtactcttgcctggaaaatcccatggatggaggaccctggtaggctgcagtccatggggtcactaagagttggacacgactgagcaacttcgctttcatgctttggagaaggaaatgacaacccactccagtgttcttggctggagaatcccagggacagggggagcctggtgggctgccatctatgggatcgcacagagtcggacgcgactgaaacgacttatcagcagcatggcaacaccgactcaatggacacgagcttgagcaagctccgggagatggtgaaggacaaggaagcctggtgtgcctgcagtccatgaggtcacaaagagttggacacaactgagcgactgaacaacaacagcaagatgttatttctgggttaactggtggttctgctctatatgctctactgcccagtgtagccactggccacatgagacaatcaagcacttgacacatggcttaattgagatatcctgtaagtgttaaatacacaccagattccaaagacttggtataaaaggtgcaaaaatctcattagtaatttactgatttcaagctgaaatcacacttttttatattgagtcaaatatattattacaattaattttacctgttttttaaatgtggctactagaaaaacattgtattgcactagtcactaacatatttctgatatatagtaacactatggcatcatccatatacaaaatatttgatctataaaaattacataaactcagagctttagtttccttatcttctaaacacaggggaaaaaatttaacttcagttggttggtgtgaggcaaagctgataaatttcgtggcacatgataaaaactcaaagagtgttagttcctttctcccccattcccttctttgaaaggtaagcagctatggaaaaagaaaaacactgaagcaaaccagtatgtcagcactttcagggttcagtgctactaacagtattgtctttctatttgtctggatgctttttcttgaattagttgagagagatgatgataaatagaagattgataatggatggatggataaaccggccagtagaaacatagatcttcagttagtccacctcatctattgacattttcatcagaaaatgggaaaaaacttcctagctttccttcccttctcaaccttgagctagaatcataaaagcagtgcacagagcctagaacagtaggagcacccactaattgcttgttggatgaataaatggacttattggaataggtagggggatggtagaagggcttctcaggtggtgctaattgtaaagatgcaggagacgtaagatcaggacgtaag

SEQ ID NO: 26458 - DNA, 1034 bp, Bovine  19866880554423
  misc_feature (1)..(1): n is a, c, g, or t
natctgctgcttgaatctagtacctgatgactaatggaaaattacagagcctcacttctaaccttgacattgttataggatgtgtttcacaagagatcaggcatgtatatgcaataagtagaacacccaaaaataagctctgttaaagacagcatctatgagaacattctacttattttgcttttcctatcctggcactagaacttgactagaataattatgtagaggtcatttttacaaatacggctgcaataattcctttattaggactctaaattattatgtgcttgtctagaatgactgaactcactatgggatgataactatatgaactttactattcagtcaactgggaacataattatgtgtaatagacagtggatttccatattcctttttcactgagaaattgccataaaatttatcctgatgtatgaaaagacatcaccttcttttaaatcaagctttggttcatttcttttattctctaattatggtgggtatgctgttaagtctctgtgcttatgtttcctgtttgttttgtaaatttttctaattcttactccaagtcttcaaagtttaattgtctttaatagttatattttttaaaggttgacatctttcttatctttttcataaactacataatgccagttttatatttccaggtacaatgtgtttttctttttagagagaatgtgagcatgtgttgcacctcttttttttttatttttagggatatccatgttctttgggtagttaagtggtttcttcaaaagagaggagtggggtgggatacagaattctgattttgaagagaagaatccaggttggaaagagcagaaatatacatatgtttttgtgtaatgccaaagaatagcttcttaaatattcactgtaaactcttttatactgataatgtagattttatatgagtaattttaagcatagtaatacagatggttgaacctcaacatttttgtctacagtgtctgaaaacagggggcttaacagggtcttaagcacatatatac

SEQ ID NO: 26459 - DNA, 2020 bp, Bovine  19866880577431
  misc_feature (1)..(1): n is a, c, g, or t
nctgaagtcacgtagtttccagaaaaatatcctggttaaaaggaaacctggatcatctggcctgtagacttaccatttttcctttcagttctgtgtattgaaaggaaatacacagaacaagatgcctactgaatcatcttcccaagctagagctcacttctactttttcacgcccctctgtggccttgaggtagagcagtaataaagagcaataactagttaaatcatgcctttgaggcctgaactgtgcagcttcttgtgtaacagggattaactgaaaccctgagattacttaggtaaatacgtgttatctgatgatgatccattctggttgctttgtgtcacttgaagtcatgactttggcttatgatgcaaagactgctgatgatctgacatagacttgctgtcaaatcgcccttgtgtctttccagtataaaatgaccttggagcacttgatggactttcccccctaccccgcctctaaagctgggagcacagcagtgtccacttgaatggcaaattgtgataaagtagcaggagcgaaattgcatagcataatcactgcaattttttattgaattgagccctttgctctttttcttgacagaacagtttattgaatgtgcgtgcggaaaacaaagaaaggcagtaaagaaacgtatcatttttttctgcctgagaatagaacagagagaaaatgtgtctgctttcagagtgcacttcttaagtggaagagcattttcaggtgcaaacagactctttagaaatattataaaactgtgctgctcaagggcaattcagtgactgatgaggtttctgtctggcagccctatcaacttgaacaatggaagtttcttgtgtcctttattcctgggaaatagagaaattctactgactaataaaaatttttcattaaaaggtagaaagaaaattttaacagatggctaatgttttattttgtacattcaataatagaaggtctgtcagctgcaggttgaagttttataatgaacatgatttaatggaaaatcgtttcttcagaatttcaggtagaaattcacaatggaaattactagtttgactcatagggtgagcgtgggtccatttgacatatttcagaagcttcctagcactcttgaacttaataacctttgaaaataaaatattgaaattgtttaatttcacagattcttcagcactcttgaacttaataacctttgaaaataaaatattgaaattgtttaattttacagattcttcagtttaaaatggaaacaatggtgttgtcacaaaatgttttggtgaaatttattaataaacttaaagcctcaaattcagatactggattttattatttagttactgcacataccaatgggcttcccagatgcctcagtggtcaaggatacacctgccagtataagagatgccggagatgagggttctatccctgggtcaggaagctctcttggaggaggaaatggcaacctgctcccatattctcgcctgaaaaattccatggacagcaagttacagtccatgggactgcaaagagttatttagatatgcctgagtacacacacacacacagcaagagatgactttgatagaatattttcattgatgctgtaatctcagcacattctagttatgaagcgtaggcttttgtcatatattttaaatattcttgaaaaaagtaaaaaattgaagtgaatatcaaggatcttgggactttcatccttttgttaagttttatttgctcttaataggattttttgttaagaaaattagaagcatattttgcagttaaaaaaaacctctcatttaatactaaatgggagtttccctggcggcctatatgataaagaatccgttgcaatgcaggagacctgggttcaatccctgaatcgagaagatcccctggagaagaaaatggcagcccactccagtattcttgcctggagaatcccatggaaagaggagcctggtgggctacagtccatggggtcacagagtcaga

SEQ ID NO: 26460 - DNA, 1915 bp, Bovine  19866880607507
  misc_feature (1)..(1): n is a, c, g, or t
ntttcccaggcaagaatgctagaatggattggcatttccttctccagggaatcttcccgaccttgggattgaatctgtgtctcctgcattggcaggcagattctttatcactgaacccaccagggaagcccataacacacaatactgtatgccagatacagtgtctagtgaatcagaattggattatgggccactagttcacagtctttgtttgaccatcatgtcaagtctttaaacaggatggaaaagatatttaaaaaatttttgttttgagtttgagaatgactaagatgagaatatatgaaactccaaaatcaaagtatctgaacagtcctgtttccagtgaacatcaacatttccctccacttaacatactgtgcttcattcattcttactaatgaacatgcctcatggaatgaaagagactagcaggagcagggcattggctgccttgagctggtgtgtgtaatcacgaaaatgcagtggagatcacagagttcaatctcgctataaaacagcttctctgacagcttgcagtggtgactgtacacctctaattggtgcgccatcagaatggatttggatttatggaatcacataattcataaggaaaggtttgagtgctgctaagatacatctctctccctgtcttgtactacaagatttagtataacttcttcagttctgttggcttgttttgtacaagtactggctttggactgcttgagctgtgaaaattccactggaagagaataaatattaaacagcagataatatggtctttccggagaaggcaatggcaccccactccagtactcttgcctggaaaatcccattgatggaggaccctggtaggctgcagtccatggggtcactaagagtcggacacgactgagcgatttcactttaacttttcactttcatgcattggagaaggaaatggcaacccactccagtgttcttgcctggagaatcccagggacggagaagcctggtgggctgccgtctatggggtcgcacagagtccgacacgactgaagcgacttagcagcagaagcagcagcaatatggtctttcaaacgtggttgatcaagcgctccacgctgtgggcatcatgatgtcccaaatcatgacgaaagttctcagagctctcaggatcattcttctcaaagtaattttgtctcttaatagaatcatctacaagctgaatcaatttgatgatttagtgaaaaacgtgaatattagaggaaagagtgatccttgtactcctgtcactgcagataagatgaatcgcttttcttggccatgtgctgagtatttagagttgctatcacagagccatttttaatagctttattggacataattcacatgccatacagtccaccatttaatgtgtgaaattcaatagcttttggtatattcacagaattgtgtatccttcaccacaaatagctatagaatattttcattactcccaaaagaaatcctgtacccctcagcccttgctcccagactcccattctattctgtcacacccagccccaggcaagtactaatataacttccatctctttatgtttacctattctggacattttatataaatagtcacacttgatgtgatcttttgtgactggattctctcacttaacatattttcaaggttcatccatgttgtagtatgtagtagtacttcctttttttatgccaaataatattccatttgtatggatataccacatttttagaatccattcatcagttgacggatatttgagttgcgaccacttttggtctataatgctgctatgagcattcatgtacaggttttggtgtggcatgcatttctgtttctcttgaatatatactcaggagtgaaattgttgggttttatgataaatatatttaatca

SEQ ID NO: 26461 - DNA, 787 bp, Bovine  19866880626037
  misc_feature (1)..(1): n is a, c, g, or t
ntgttttcttgcctctatagtacacacgctatcaataaagtgctacagtcagaccaggtggtccactttaatgagtcctcctgagtagctattaattagcatgttactatataatgtcttattatcattctatagtttataattggttccttggttccttcatttttttcagagtatctttcaagtcttaagaagaagttcaaatgcttacaagagctcagggcagtaaaacgttttgtgggaggcaaagaactgatactggtggggacagagtacacaatatgggagccaacacgaatgggggtaactagtaataatgaaaggctaaataataatgatgagtgcagctggctcgttttctctatctcaggctttagcaccatctaactggataaaatatatatggttcaaattatagtaaagtatttttcctcccttgatgttcctttatgcactcaacaattatttacatgctgcgattcatggggttgcaaagagtcggacatgattcagcgactgatctgatctgtgatatttctggcaatggtgtctgagataaaattatttttttaaacgtcgtgataaaaattaattttaggtcccttgccttttggacttatacaagataactaccttctgacttcaacttgtgaaaaaaacttttaaaaggtgaataaaacactgtgccaatgacaaatgctgctacagcagctgaccttcaactccctaagaagagagttcacggtgagtatcaagaaggaggcatgccatgctctgggaaaactgg

SEQ ID NO: 26462 - DNA, 764 bp, Bovine  19866880651434
  misc_feature (1)..(1): n is a, c, g, or t
ncatattttggtgactgaatcattaattggaatttaagacagagcagcaagtaggaatgtccttggagaaacaccttcaaactatatcatatagaccaatctgtattttttgtgtccaggagattgatcctacttgttaagaatgtattgcttatcttcaaattctgtctcactatataattaaaaacatttttgaaatataacaaatttgaaatttgtgctattactagggactttttaataccccttaaagtttaataagtaatgtcttacttaactgactgtttatcggagtaacaaaatatgaattttaacaatttatgttaaaaataatgactttatagattattttgatcatttgcaaggtaaatcactacatatttccattacatctaagcttttattactaaaccacaaaaattagcaggctgtttgactacaaaattgaattttatttcttatagtcataaaatgatatgaaaattaactgcatgagagggccttattttatctttaattaggcatcaaaatatgtttaaattaggaagacaaagcctttgtaggtcattaaagagcaatgaattttcagggctttatactaatttatctattagttaaaggatttttttaaaaagaaaaaaccaaatggccaaatgtaacctatcctgtaaatatatattttactgaggatgctgtcagtggaaggatggttaaaacacacctgtcttttctttcattccctgttgatacagctaacatttcat

SEQ ID NO: 26463 - DNA, 1853 bp, Bovine  19866880702904
  misc_feature (1)..(1): n is a, c, g, or t
ngggagttcatctttcagtgtcatatctttttgccttttcatactttgcatggggttcttaaggcaaaagtactaaagtggtttaccattcccttctccagtgggccacgttttgtcagaactctctaccatgaccgttctgtcttgggtggccctccagggcatggctcataattttattgagttagacaaggctgtggtccatgtgatcagtttgattcattttctgtgattgtggtttttcattttgtctgtcctctgagtgataaggataagaggcttatggaagcataatgggagagactgactgtgggggaaacttgttctttttctgatgggcggggccatgctcagtaaatttttaatccaattttctgttgatggatggggctgtgttctctccctgttgttcatttcagcagctcagtcctgtctgactctttgaagcctgcagtacgctaggcttccctgtccatcacctgctcctggagcttactcaaactcatgcccattgagtctgtgatgccatccaaccatctcatcctctgttgttgttgacctgataccaaactacattggaggtaatgaagataatggcgacctccttcaaaaggccccatgctcgcactgctgcactcagtgcccctgaccgtacagcaggccactgcccacccatgtctccgccagagactcctagagactcacaggcaagtctgggtcagtctcttgtggggtcactgcttctttctcctgaatcctgcattgcaggcagattctttaccaaccgagttatcagggaagctcacctaacttctagatcacacacacacacacacacacacacacacacacaaatataaaggattcttatagggaaattgttgccttgttttcccctggggaaaaattgagaaaacatgagttgtttggggagtggcatgaatttgccttcagggagctaatatctccccaaagggcactcagggtggatcagcctatctatcatggagcaggaacctcagaaaaacaaatttgtcccaaactcccatcttctgaaatactggggaaacttccttaaataatagagctgaagggaaaacacaaacaccagcctcagcacaaatttcctgatcggagatcactctaagaatttcaggaggatatggaatgctgtttgttttctccattcttagaagaatatgtggtaatattgacaatttaggttcatatttggtatttaatatgaattctttgtttgctagaagctaaacaagtctcataatattctccttgaaataaaatgaaatgtgtaattgccagtattttattaacagctgaagctttaaatttattgtaggcaggtagaaaactccagagcccagcttggcagcaatgctcagtggtctttgtccaaagctatacttttttcttattcattccaaatgggtgagagctttcttagttggagtaggttccatacatgaaaagctatctttactccatttgctactgatttataaaggtttgacctcttatattttttgaaattgtgggttaaccttcttgccttaaggagaatggcagctgggaatgacatttccattttctaaaggaatattaccatagaagcaggactaaaatggctcatgacattaacctgtgactcttaaggggatagcatcatttacctggtttgttaaaagaaaaaagaaagctatgatttcatgttcaattgaccaaaagaaagaaatgagcatagacactgcttttcaaaaagagcctcacaaggttttctcagtaggatgtgtcaaggccaaggttacagaagtcatgtctactctctgcactgtcag

SEQ ID NO: 26464 - DNA, 2962 bp, Bovine  19866880728043
  misc_feature (1)..(1): n is a, c, g, or t
nacctgaacttctgtgcttgacttttggacatatcttctggaagatccctccagtgaaatgagaagatattctttgatttttgtcagaaaagttaatattctcatgacttaaattgacttcattacagtcaagtttatttcacactctcaattactcactactgcaaatcaacacagcacagaaattaatgcattttgtgccttaaatagtaaacactgctgtttgtgaacttttttggccaatgaataaaaagtatttcatttctaaatctcaccagaaggatttaaattaaacagtaacagatgcactgggcaggcatgggatactaaataagaactggcaaatgaaataacccagctctttgcttttacaatgaaaatgagaattggtttttcattgagagaagaaaaaggattaagtgttttaaaaaagcgttttccaccaaaagagcaaaatagcactcagtggtatagtattgttaacaaaatttctttatcagaaactataatttaatatttaagtacctaatttacatgtgacaaggtatcatattcaaaaaattaaactgcaactagaaaactattaaccactaaaaacaataccaaacacaacccaaacatttataggaaagcaatagctagaatttgaattgaaaaaaaatttcatcatatttggctcattaaacaaagcatccattacagcctgtaagcatctcttctaagtcatcaagtttatcctttgtagcatgaataacacgtaaagatagatttattgactgcatatgcacacgtgtgtatacatattgtgagacgtacactcatgtgttgacttaaagatattgtatctactgataactggctgaactttggaaggtgctgaaacccatatttctacatgacctgtgacccatttaaaaatgtctttttataaacagaagttacataaaatactctggttttattaactgactcttttcttaagcatcataatagacaatgaaggaattgcacttattttaaaggtacagtaaagtgttagattgcagcttggccatcaaagatcagggactgtagtactgagaagttgtgcattatatgcaaagatgacggtggccactgaaattaaaatgagagcaattaattacagaacaaatagggggataacagaagaaaacatgcactactcctactttaatgcaaaactaatttctccccggaaaccaaccctttgacttttcttacacaaagaaacaggttctgcacccttggcaacacagtagacatggacttctgtattcaaattctagttcattgtctctgagtgtgctgttccagtgtcatctccttaagctgcccttgaaattctggagcatctacaatattacagtctcttcgttaggttccattgagcctcaatatccccttcagctctatataaatagggtcttttattcatcttcttctggttcctgtggcaacactattatttcttcctttaaacaatcactgaagaatctgagaattgtgctgtagagatgatacttgctcttctcagatacgttatggccttcatctgggtagacctaagatattgaatggaaaggagatttaaagttgtcaaagaaagccttctctctcagaattcattacttcagctccatggcaagggaacttcggaaaacaatatttaaccaaaatctcatggtattcaattctgagtctttcatgctaaatatttcatttttattttaattagatcaaaataagacacttgagacaaaatgcaattttgtgcctgtgaattaggatttgttagaaattccctggtgttccagtggttaggattctgcccttttgctgcctgggggctggagtttaatccctggttggggaactaagatcctgcaagccaaaaaataaacaaataaagtaaataaattaggattggttatccaaaaagttagagccttctatgttcacactgaacaagatgacattaatatcaacttagctacattttgggctgtttcatcctgactataggcccctgacctccctttagagtatttaatgtagaaaactggcaactgtaagttcattctctgcccctttgaaatttatataaatcttctttcagacttttgtcagttttacaatccaggaaatatctttctcaaggacttgggaaccatctctctctctcttttttctttttttttttttttacttttagttattttggggggcagggggactgcaccatacaacatgtggttacttagttcccagaccaagaatgaaacctgcaccccctgcattggaagcactgagtcttaaccactgcaccaccagggaagtcctggaaatcatcactttaaaatgtaaacactgaaggagagagcatccccatttcccagtctccaagttatctcttaccataagggtacaagaaagtttacttttcctttcctttcctcacttttacttactttacttttccttggcctgttaccaaacaccaggaccaatgaatccctcatggggactctcaaaaactccccagcccattgtttcaaaagagttgagtttagtcttcctcccttattgcagtagtcccaagtaaaattttccttgtttgtttactttggcacgatgaaaattttactttgacagtgtccttttcaatataaacaacatgagtgatttttttaaaaacataagtgaacatattgtcacagcaattcctgggtataaagtttttagctagtgccacatttccctctgagtaaagcctcacagtctatggtcagtgccatgaccctccatttgtttattgctacaccttcatttttcatcattctaactgtggtacctatacttttgataagctgaaccacttttagttcttccaaatgcttaggaatgaaagtaactttatttccctttcataactactccacca

SEQ ID NO: 26465 - DNA, 2082 bp, Bovine  19866880731407
  misc_feature (1)..(1): n is a, c, g, or t
ncccagttaagatgtacatctaattttttaaacataacaaaagtattattataacactaaacaaaattaagtgtaattcataccatgtctaatattcataccacatttaactgtcccccattgtctcaaaattgtctgtttacaatcactttgttccaatttgggttcatgaatgtctccacattgcatttggttagactgtcttcagtcacctttaatataacaatttgagctcctttcttcagagcatttacttgttgaagaaactggcgttcttacttacctttccaacatttcctcagtattgttgggctgagcttgccttgcttaatttacaagtaacccccaaggtagtcacatggatatcttctaggctttcagcctcctagaagctgcccatccatgacacttaaataacttctgtgcttcatataaataagctaacattataaatcagattgatataatcagcataaagaaggaattttgctttaaaataattgtttttatatatgctgacttcactaagaagctttcatgctcattttcatggtaatttatccatagggcaacatgggtttgggccatcttcctaacaaggcctcagcccaaaggaaaacttgggtaattattatacgcaagatccgcacccggcacctgtaaatacaattgtctgtgtatatgtagctttctcatgtgctaggaaaccatgcttaggatgacacatcttttctgcagtgaaaaccaccctattttcagtgtcttaaagatgatttctaagatttataaagttgagaactcagatggtttcctttccaaacatttatattttcttcaccctaatagcaggaagttcatttcagattacattcctatttgaattgttgtatttcctccaagtcagaatagaaacaagttgagatgtatgataagtttcaatatattgtacaaatggtactgttgctgcttgtttggataacattgcataagtaattcattcaaaatacactgcctaaactgtcagataaagggagtggagtgctgagtgggctcctgagaacaaatatgggaattttacatattttttttcttttgagctacttgaaatactttttgagattttgcatgctacaggaatataggctttaggtttacataaatggtatagatttgcacagaagaaattagtttctagaatcatgttgatagtagttttactttattttggtttttcatgtcccttaatgtgatgatggttggaacaattatgaaataaaatttataagaaagaaccttagaaaaccttaatggagaacccaaggcaattgcatttagtttaaaagatttatagtcaagtctctatttcagagagccaaattggatgcttagataaattcatcttttttctaagaatataaatttagttttgtagattttttttcttttagttataaacagtgtgactctattcacagcttagaactcttatggttaaatttcttattttccaaaataatcattttttgaggttcctacatatcctgatgagtaaagatctaatattttcctctttatcaatccttcctcttaagcatccttggagcaactttggccacaaactgtcagagcttcctttgtataaagtgttcaagcaggtgtagagagaattgcaaaatcacatgagcttattaatatacttcattttgtggattgctcctatgcgaatccacaggtaacagtcttcctgcctacctggatgctcgttttggtatactccttgtactccaagtttaagttccccttagctcgttcccacgtgctcagccttggcatagtgccaagctttgggaacttgggcaccagaggaccctcagttttagtcacaagtctcagacaaacatatcctagtgacttgaatactcaggcctgtaggacttaagcttgaatggacatgaggaccatctgagcaacttgaaaataaatgcatattccttgaccccacacacagagctctcatccaggagctttggaatgaatacagaaatcttcaactcgagtagcattccaggagtatctgatgcc

SEQ ID NO: 26466 - DNA, 1590 bp, Bovine  19866880732062
  misc_feature (1)..(1): n is a, c, g, or t
ntgaagaagggaaatggcttagtatttttttctgggaaatcctaaagttttttttttctgggaaatactaaatggctttagtattttttcctgggaaatcccgtggacagaggagcctggtgggctaccgtccgtggggtcacaaagaatggaacaggactgagcaactaaacaacaacatagcaagcctagagtttaacccccaaagattaaacagataaattagataaatgtaaatataccacaatttcaaacacagggaccattcaaatagctttgttctgaaactgtctaatataagaaaaaaaaaatcggataatgttttgtgacctcagtcaaatgttttgatttgattcgaggggttatccaaacgacaaagacaaacaagcacaaagaggaggcgagttaggtcaaacaggatgggctggggatgaaaatcgtgcctatcagttcataagctgcatagaagcagtgataggtccatcagatactgaaaatattaatcatggtgtagaaaatgaactcaagacgtgtgcttcgtaaataaagtatatgtcttgtgttaatttaagaaatgattaatccgaaacagtagctctataatgaattaatcatagccagaaaggactggcagtgagcttcaaagtacattaaatactgagagataattctcaaccatcattttaaatatggttgcaaaattgattaaagtgtaagtacattatcttacaaacaatgccttctattattaaaaagaaaataggtttcatgtcctcattaactatagcagcctatgaaagataaaagaaattttctgtgataaagtttagtacaagaacatcttcaaaaagctttaagcagttgctgatacaagtagaatttgattaattttcagaataaagcaaagactttatttgcttgacataagttctttattgtgcctctagctgacatgtaagtggatgtggagtagaccatcagtagaagcttcatggaattaaaagtactttggttacgtagaccctaaattactaacacatacttataataagaaaaacaaatcatcgttgccactgccattgaccgtctagcacccttgggcaaaaggttcccaatacaatggcagggctttgcacagagttggcatctaatacatattttaacacattgaacaaaataagaacaaaggaaagggaagccatttgtaactgattttatttatagatctttggaatctctttcattatcaggcacctttgtatttaataatggtgtttggtcagttcctacacagaaaccaagacttaaacccaagagaatttccctgtatttgtgaatttgcaatcaaataagcttgtttgaagaaacaatgctattttaagaaaaagataagattttcagggaagacaatggataatgaatactgtatcaggagactttatgtaaaatgcgtagccattttgctaaatggatgaatgaattattaaacctattgcatttttctcaacctttgaaccttaatatatcttttgaatgactcagaggaggcatatcattgaacatacagattttttttatgaacatacagat

SEQ ID NO: 26467 - DNA, 2731 bp, Bovine  19866880738087
  misc_feature (1)..(1): n is a, c, g, or t
ntctgtttctgttttgtaaataagcttgtttataacattttttagattccacatataagtgatatcatatatttttctttctctgactttcacttagtttgataatctctaggtccatccatgtagctgaagatggaattatttaattacttttatgcagtctcactctttaaaacatattttttttatttttttgcttttgtgcattactttatttttttataatttatttattttaattggaggctagttactttccaatattgtattggttttgccatacatcaacatgaatccgccacgggtgtacacatgttccccatcctgaacccccctccacctctctccctgtaccatccctctgggtcatcccagtgcaccagctccaagcttcctgtatcctgcattgaacctggactggcaattagtttcttatatggtattatacatatttcagtgccattctcccaaatcatcccaccctctccctctcccacagagtccaaaagactgttctatacatctgtaaaacacttttttttaatgtccttttgccatagagaagatgaagtacatgaatatactttgagtaaaattaaacccatactgtagtaatactgctctacttagatgatccttttaatgtcttttccctgggaaagagaaaagagaaatcccactagaaatgtcttcctagtaaaaagtactaatgtaaactttgtatatttcagatgtctagctaattattatcactggtctttaattttcttatcagtttggaaattctctgattttatgactacagttactgagttcagcacacttaaattatgcataaaaataatatatgaattataagtaaattaggcacagtgcaaaaagaattctttaaatttgagcaagtgtgttaccttcaaagttagttatggtgataaagtattttaaataaataaatgtttcacataacattttaaaaattctcctttaaactcacaatttccgaacaagctagttttgctgcttgatgacagcacttcgccacctgtgtaacttaagtgtgacagtctcatttaaatgatttcttggatctcacataaacaaagtgtgttataaaagtgattataatttgtattgacggaaacgtcaaaaaaggccactgaaaatgtacaccctgacagttactttgtcccagtacatctctggtggctctaaacaaaatcttaaaccgaatatgctcactcacttagaagctgaattagaacagtgtgtaagaagaatattcttagaagtatgtggaaatagtatttatttgctgaaaattttataaggttctatttattttgctgtgctgtacttactcgctcagttgtgtctgacatttgtgaccccatggactatagcccaccaggctcctctgtccacgggattctccaagcaagaaaactggagtgggttgccattcccttctccgggtgatcttcctgacccgggaatcgaacctgcatctttggaggcacctgcactggcaggtggattcttcaccaggagagccatactgggaagtccatattttttaaaattataattatagaaggttcactattttaataattattttctgaaaagcacaaggaatacaatgtgctaaaagatgtgaactcttttacagaacttctcctgattgtagatcatgttaaatggatagtacttgctggatcaatttctggcagacttttcaactcatgggataattaaagggatactgattcaataatgtggtctccttttctacaacagtagtgcaaaacatagtgaagggcactcatttcaaacacaaaccaaccatatgttattggaaattccttacaacttttggaaggtagttgggttttatgtaattctatttttctcaactgaaaaaacaaatccacttaaaaaaaagcaagtctaacacagattactaatgcaaattaatagtacatatattggcttcagcagaaaaaaaatcaacagttcaatgtataaccaagtggcaagaaattcacatataaagcctctactaaaaatcatcttattgctaaaactgtagttggagtgttttcatgttttgcctgtttacatgtggttctttctgaaagcaggtgagagactaaattatctctcacaaacatttctaagaaatgtaataatttactttgatcttaatggcaatctcctgttgagactgttgcgccctggatttcatgcctgtttgctctcactaccctatctacctaataaagtatttctgtattcatgattgcttcataacccagggaaaaagaacagatttcatctacaagtaattccagcttcacactggaaaaaaaaatggcaacattaaaacaactctatgtaaatttatgggcttccctgatagttcagttggtaaagattctgcctgcaatgcaggagaccctggttcgatttctgggtcgggaagatccgctggagaatgataggctacccactccatatgcctaggatgtttgcactgtcctctctagtgatgcagtctttagtttgattattaattttattctacaagaacacaaaaaacaacatagctttcagtatagtgatatttaaaaattgttttgtaattcttactacttaaaaaaagggcatgcatgatttaaaatagtgatgcttgctttaaaattgaacattcaataaaatattttaggactcc

SEQ ID NO: 26468 - DNA, 1813 bp, Bovine  19866880825086
  misc_feature (1)..(1): n is a, c, g, or t
nctttgtaaatatacacattttactgtgaatctgtttttctgataaactcacagaatcttgggttctactcacacaagacgaaaaagctaatttaaaatctggaaggatccaatatataattataagatattacctttagctatatcctactaagcatgaaataaaactatttttgtaaaaattatatgattatggatagccatactacaaaggatatttaaagataatttttgtatgacttgtgatattcaacaaatgttttatatatatatatgtgtgtgtgtgtgtgtgtgtgtgtgtgtgatagctaatgtcattgactattttggtcttcaaatccgtgatttctgtgaggaattactttatcacagatttccactgaaaaatattttagtgacctaccatttcttaattattttgtctttgtttcctaataagacactgcattcaacataaagctagacataaaaaaggtactatatttatatattgtatcgctaaatgtcaggggttaatgtcttcagcaacctgtccatagagacaaagtctgggtattaggtcagaacactgtgggatttttctgtataatacagataaatcaaagaaagcaaattaaaataaatctgcaattaaaaattaaaatatgaaagtaagggttgtgttagaaaattgtgaggaaactgttactaaagggatgtcataattagaatcatataaagtttatatcttagcaggaggaaaggaaggggtagtaaagaactgaaagaaatggaagcattaaagtgaatcaaaactagttttaattgaatttgtcatgatttggatgaggcagtattgaatgaaacccataatagatcgtgtcatgtaatgttaattttgacaactgtaaatcaggctaagaaacactgtgaaatcatcatgaatgatgcatatgctctgttgtggcattcagttttagacttgcaaatttgatttctgaaactgtttgcatttgaacaaccaaagcagagtgttgtgaaataaatccgtttgaaaagaaaacattccttaatgtgatttgcagagtttcttggtaagagtgcattgctgacatatttttacatagcttcattctcttactttcattatgaagctgacagcctggagcccaggggagccagaggaacaggagaagctgagaatgagtagggagtagggtcagggtttgggagtaggtcctattttgttgcgagggtcagggctgtataatccacagtgagcatttattgcttgtcagggacatttgcggagaatggaaaggttgtatgaacagtaatgatgaaaaaggtctggttctctcttctcaagcctaaatgaagtgcctcagttgtgctgtacattaatttgcctttgataataagaacgtgttctgtatcattcacgtgctgtgttttgtcagctataatgtggactacttgagagtgtcactctgattgttgtcccctatccctctactgtgagaggactttgaggaggtgcttagtacttgatgcttccaaaagatgaggggctataatcattaacctagtaaatgcagcccctgaaactgcgtccattgttctgcctggatcctctctattagaaatgaccatgttggcaaggtcagttttaaaagttgaaatttaagatatgtcttatgcctgtaatccctttatatgcattatatttatttcattagtatgcaaatgcatgacaatacttctatatgtaaattaaatacattaatctaggacagtaaccttaataccaaaggtatatcatgtatttaaaaaa

SEQ ID NO: 26469 - DNA, 1893 bp, Bovine  19866880832807
  misc_feature (1)..(1): n is a, c, g, or t
naaccaaagaacccaatcaacccagtcactgctatagacagtttgtcctctcctagtctgtcttgttctgagggggaatttcagctctctctgtggctgtgacagtgacatgcatgtgaccgtgtcatacaatctcccataaccagtaattcaaatggaaggatttgaaagcaaaacatctcagacatgagcttacattagagagcagagtgggaagaatgcattatgagatttgtgttacataagcttgaacttttagcataacttatcacaccttcctcattagggatgacttggaagatcttaaagaccagtgtgtccctcaatctctgaaaacaaagcaaagagaagagtaagtggaaggatgaggagcaggagaaagagaaaaaagaggaggaagagaaagataacaatgtggagactgtttattattgtctttttttcctaacttgtgctttgagccctggagggataaatgtggactgcaatatagattgctttggcaatcataaatttggcccagtattattaacatgattgagttgtaaaatgatgtaaacatgcaatataattaattatatgagtgcactccagtgacttcctgaagggaaaaaaggactggttagtatttgaaatataataatgaaatggatttagcatattaccttgatcaacagttgtcagttttaatgagattttgcactcctgatcaagctcactgaatccagtaggacaaacaataggaactgtgctctctatcctcaactggtattcattcccatcttcagatatagtgctcaggttgtaactggtgtaagaaaacatgtaaagcaatcatgttaaaatataatttatttctaagatataataattttgaaagggcattcccctctatagctcctgttttgctgagtgagctgatgatagcaataaacactagaattttttaactaaacaagatcaattaaaaccaaacccttaaatacatcagcaatgcacagaagagttcatggagttgctgtaatgtttagagtttaggcacagtttggttccacaacacattttaggcagtctggttgaagcctgccttcatgattctggttcaaggcagacagaatttttttctgaaagaaaaaaaaaaagcaagtatattccaactgtagttcagtaacaggccctcagagctcactggcactagaattatttgagctatttctcaaaaaatacaaactcctgggtctcagcatggagtctgtgatgtggttctggaaccagcagccacagatcacaatgtggaaaacacagttccagaggaataatctttcaaatctacacccactgctacataccttaatgccggcaaaaaattctcggctttcgatggctaaactttgtacatgtgggttctccaagaaaaagacagaagcactacaaaatatctatgaatacagttaacaaatagtcatttaccaacacaattctggaagacatatggataaattattaaaatacttaactctaacttttggtagattgtgcataagatataatagaaaaaagtaatttaaaagcttgcttgaaaattgataaaaagtccattataaaatattaattatataaacctcaacataaatcagtgttttgtagactttgtacttaagatgtttttaaaggtggataataaatgatattatcattgaaaaaatagaaacttttttccagaataaaattatattttaaaacaagaaagggacataaattcataagggttccttgataataatcagtgaattactaaagcagatactcatataaagtcactaagattactgattaatccagttatcaccggagttggcacaacttccaagaaaaaaattaaaagaaaaacat

SEQ ID NO: 26470 - DNA, 1281 bp, Bovine  19866880840189
  misc_feature (1)..(1): n is a, c, g, or t
ncatgaaagtgagaagtgaaagtgaagtccctcagttgtgtcagactcttagcgaccccatggactgcagcccaccaggctcctccgtccatggggttttccaggcaagagtactggagtggggtgtcattgccttctcctgcctctgtttactcatttgtaaaatgaaaatgagttactatatatagctattatgaggatcagatgaaataatgtattaaaaatatttgcttagtgtcagtacatcatacagttagactaaatcttagttactataaaaaagtaaatggagacaaactcaccatttgcaaaaatatgttttaccagcaaaattaagacaagaataaaccatagaagagtgtaaatagcgttaaataaggcaactgggtgcatgaataactttaaaattaggatacatttcctatattgcaataatcaacaataccttgcaaaatgaacaaatgcaatatcttggaagataaacagctgacatcatagtatgcaaaggcataaagaaaagtaattagaaacatgcaagaataatagtgttactgaataaaacaagagttataaagaaagcactgtgaagaagaaaaggtcttttgaaacagtgagtttcacatttgagtagggtttgagtagatgatgaatgaccaggaatttatagaatataagtttggaatgatcacttccaaccctaagtttctctaaaatcaccttaaataattatgcaatttgttcctaacacaacatgactcatttatctagaatataaaccagaaaattcaaaagattagcaagaaaaaggataatctgtaaaatgcattatataatcttcgaactttttgaaaataaaaattcctgaggggtaaatatgggaatcttctgaaaaacaaatgagagataatacttgtcattagagtttaactaaaataattacctaataaaggcatttccattcgttggcttaacattcctccgtctctggcatatataccatccttttccttagttacactgttgtcagaccttgtgagaaccacagtatgtgcaataaattcatttaaaaagcgtgtttcaactataaatgtatacacgaaaaacagatcagagttaaacttatgaaaccaaagcactgtgaataagaacatataaaaatgtcatgtgcattgaactccttgcaaattagatcagagaactagcttacacatcacctcttcagcagatgcttctctaagggactgaattgtgttccccagaattcattagggaagccctaaa

SEQ ID NO: 26471 - DNA, 3339 bp, Bovine  19866880888115
  misc_feature (1)..(1): n is a, c, g, or t
naatttaagatgaaattgatggcaaatttgtcatcttaatttatctgtatttaattcttagatgacagacaatataattgtatggttacatgatggacattaactattagcccaaacttatttatttgagggatttgtttttgtgaagtatattataaattacaccttctgagttacccctacgatgctaatcaaaagagcattatacagaaggctcatggcttgaatgcagttgtacaatttgattataaaataaatatacctttttaaaatgaaacacatcccttctgatactatctgctacatttgctggcaatcctaatcattaaaaaggctaaatatggcacttgcctggtgttccagtggttaaggatctgcttccactgcacggggtcacgggtttgatccgtggttgagaaactaagatcccacattcttcatgatgtaacttaaaaagaaatttttaaaataatttgacattttaaaatgctaaatactatcagtaaagttcattctttaaggaattgactgtgatggacccttgtctccactgccatagaaagtacttttatatttagtgctgctttttaaaattccttgatgaagatttaaattgaatttgaataggaccaaagcattgtcaaattcctttctgtagtggtcaaagtcatggctccttggcattgtatcactgtgatttctctggcatgtttgcttcttctctattcggcttctgttctttccatgtaggtggaagactcacaaatggcgcaggtgccagcttgtcccttggagcgtgcaacaggacagccctggagcgcaggagggctgtgggcccggacggcaggcaagaggtgggaggccccattccacacttgatttgcttcacatttctccagcatcactaatttaaccactagctagcctgtagagtttgttattctgatgccacactaggcaagcagagcagagcacataaaaatctgctactatccattctaccacacaccagaacacggagacctgtcttttaagttgtgtcccttgttctttgacattagtagttcacttgtcattgttgttttagttgctcagctgtgtccgactctttgcgaccccatggactgtagcctcccaggctcctctgtccatgggattcttcaagcaggaatactggagtgggttgccattcccttctccaggggatcctcccaacccagggatcgaacatagctcctctaattgcgcttccattcatgcttatctgaaagatgatcagcatgtacagtgcagctcgttcttgttgttgttcttgtaattcgtttttggctcatggtattccataacacttcgcttgtcaccttaacaatcaataagattcttacatctttgcccatatgcattatgtatgtgcatgcatgtaatgtaatataattggttaactttcccagaaattctcagaaatgctacccccaattcggttcatatttagtactgatttttaaatggcaaatttatgtactcaaaacctgccatatgtggactgcaatctgtcgacactgctagataacatggtatcttgcagaaatgaaatatggaaatatttccagctttccatgattatttactagatattatggataatactttcactccaagctttgaacagtgttctttatacatgtagcaaattcattctgtaaagagtacatgattctttttactcatgctgcttatacatttaattccagatacatatttaaaatgtattttgaatatgtaattgaatacacagccacctttctttaattcataaaagcatattttacaccctcatttgtagttacatatttgatgatattgcgaaagtgtgaacatacagaactggattccagtttttgctgatttcatctgggaccccttttctttacagagtaaaggttgctttttttaaatttgaaaaaaaaaatagcatcatttttggtaagaattttctattttgaaagtcattttagaaatctttcatttgaaacatttagtttacaattaacattaactagttagtgattttcaggattttgttttaatacttatttttcattctgtatcctctaccatcagtatcggctaaaaaataactctctcccttcacagtttcagagacttaggtatttagagtggaaagtctttctccccatttcaaaccattcatgagaaattgagtgatataaggatttcttgtcatgccctactaattcctccttgaatcaagtatacatttgcatacagtctggaccctgcatagagttaataatgaaagcaggcatgcgtttaggaatcaagaaacctaaattttagtcccagttctttcgctcacacaatgtgagttttattcatccctttgcctttctaggtctcagtttatttagatggggaaaaaaagaaaagaggactggaccaaatgatctgttaacaattttttttgtatcctacaatctatgcacagataatatcctgccatcaaagtgtgacatgaatttaggtaaaacaggtgaaaactatacttttgcaggcactgagggaattctaagatgtgaaaactgcacagggtgaaaacaggtttagttttgaacacttttacttgactgcacaacctgggtttatttgtttcctctctctcaggctgagaaagtgctgatccttacagtgctttgcacatagtgaaagtgaaagtcgctcagtcatgtctgactctttgtgaccccatggactatacagtccatggaattctccaggccagaatgctggagtgggtagcctttcccttctccgggggatctccccatccccagggatccaacccaggtctcccatattgcaggcggattctttaccatctgagccacatgggaagcccttgcacatagtaaatcttcattagatgctaattccttcccctttcctgatagatcgtggcctaatgaatatgtgcatagatcgctgtaggcataaaagcaacagtattaacaaggtctttagttttttattgacacagtctgtataaaacatttcttttggtgattaccagtgatcttttcatttccaaatctaaaaacctctgcttattcctcttcgtagttgactgttcattataacaagtaatgtctgcataaatatactcagaagaacccctttaaattctgtatgaagataatctttttatttgttgccttgataaagattttatttttcctcaaagcctatactcctacagaagtatgaaatggagagagttaagagtgaggaaatatcttgtattattggtagaaaggcaaagaa

SEQ ID NO: 26472 - DNA, 1607 bp, Bovine  19866880942337
  misc_feature (1)..(1): n is a, c, g, or t
ncatgtggaaggaagttgttgtggtaacacttatgcattaattatatagtatctcctttatgaaaatcatgggaagaaatttgctatttttttaaatcaagaacaattttacctcccctgaaaattgtcctaaaaaattcattcttggataactttgataatcaatctcctttatgttgactgctaagaagcttagaactatgattatgaggaacctgtaaccagtatatgggattttatatgcataactgcttgtgttaacttcatttctccaatgtctgtacttaaaataaatttatgactcaactttttaattactgttaacactacattaaaccttttttggaacaatatgacataggaattaatatattaaattccgacttccagacatatacctggaatttggaaatcaaccagttagatggttgtgactgcctgtacctggtatgtgccaatcctcttttcctctcactccccaatcagtcatatgaaggagaaagttatacagtggaaacattgtgctatgaaaactcccattgtttacatttttactggagtatagttggtttacaatgttgttttagttcctgccgtacagcaaagtaagtcacttatatgtataaatatatccactcttttttatagtcttcttacatatagatcaatgcagagtactgagttccctgtactatacagtatggtcttaattatctattttatatagtgtagtgtgtatgtgttcatccgtctcccaatttatccctcccctacccttccccttggtaaccatacggttgttttctttaaacatgtggctctatcccagagtcctaagcttgtgactcagtgtgtctagagagttctgtctcagagataacatttgccaaattaacaaataatttttttaattagtaattatgtataaagttctttgaaaatgcaaggctatataaatggatttggcatgtttcattatttaaaggtataagagaatggaaggagacctggatgacattttgtaattggaaagtggtcctactaacagggcaattcaaatggagcactcttcggttatgtgtgtgtgtgtgtgcagatgtgttttgatatatgaaatgtctgagtatgtagtatgcttattatcacagtctaatttaaaatgatcaccacttatctgataaaagcagaaacattttagaagattacattttggagagcagtatttgtgggcttttctttcaaatagcagagtcagcattctgatttcctctcagacccttcagtatatttgtagactggtggtctccatattgatccctcttgtttccatgactaaaattgattcctcctgcctaacactgagacctttgcctgtcatcaagcttactttttctcttatgccaaaatgacatttgattggattattcaacagaagaaggcttctgtcattgagcacaatcaatatccttgtgttcactgattttatagacctttcagtggctaccttcataaatgaaagctggaatggttcaggttgtagtcagattataccaaaacttaagttttttttttttttaacagttggaaaagctcttttatcaagctaa

SEQ ID NO: 26473 - DNA, 1463 bp, Bovine  19866881014654
  misc_feature (1)..(1): n is a, c, g, or t
naaatgtgactctcagatactgaatattaaaaagccgatgctttctgcaggagccattcagcagcactccaggggacacttgatttgtctgaataataataaactataatgataatagccaagcgcacctcacaggagtactaagctttaatgattcaatatttgtggaaccctttgagcacctccaaagttatgtaagcacaaatgaataggtagggacactatataccattgttatttctacattaaatctctcttggtaatttcctatcttataatgtcttgtaaggtaggtactgtatgagactaatatatgaacaaaattatggaagaaataaagtataaaataatatatagtagtgatttccaatgaaattattataatttcatattagtgaaagagaatggagtcgttaatagcatctctaaaaagtcattcctaggttgtaaaatagaaaaatgaaaatctggaatagacccttaagatttaaatgtctgaaaagagtttgaagacacacttgctattttttcttatgaaggagacacctaagattttagttggtttttttcccacactgaagaaattgtaatgatgttttctctgtttatttcctagtagaaattgtacacattattttcatacatctgtcttttcatcttctcctccatcaccagcataatttatgcaatgtgatagtacatttaatattcctagtttaaaaaatatatcttcacagttcagttatcctcatattttccaaaatgcaccattgtgattttgatactgtccctaacttccatgaggtagctatgtacaaactgcattgacccaaacagtctccaacaaattttcctctaacaccagatctccaccaatgaaagactcatttcttccagtgagtactgcctataaaaactcctctcagaggacactgtgaaagagagtgctcttcctgtccttgccttttccctttcacctagctgacatcacattctttaagacccagggtgtttccaggggtgatgaggaaaggaaaaaaaagcaaggttacctctttgaggagtgtaattctgagtaggacaacactgcaccaggttttgaacaggttcctcaccctgagagagggaagaagggacaaagagaggtggccaccgctaaagtcgcttcagtcgtgtccgactctgcgcgaccccatagatggcagcccaccaggctcccccgtccctgggattctccaggcaagaacactggagtgggttgccatttccttctccaatgcatgaaagtgaaaagtgaaagtgaagtcactcagtcgtgtccgactcctagagaccccatggactgcagcctaccaggctcctccgtccatgggattttccaggcaagagtactggagtggggtgccattgtcttctccacaaagacaggtaggaggacattaatacaaaacccacatgctttg

SEQ ID NO: 26474 - DNA, 1184 bp, Bovine  19866881036514
  misc_feature (1)..(1): n is a, c, g, or t
ntaagttgtcgttacagtaactctgaaaataaaataaatggagagaagcactgaatagttatatataaaaaaaactttctaaagtgggaacactttatatatcaaaattcttttcagggggaggttatttgattagtgataacttaatgttgtagacatgggtctcttagggagtatttcgccagtagacaacaggaatgctggctgagcaagccctatccaaataattatatgcaaaaaaaatgtcatttttttcaaaacacctatctttggctaaaaatatatttagttcattgcactcttaaaaataatcacacagttctctcatcagagaaaaagggttaattaggtgttagctaatggcctaaagacccaacctataacctacaatgttttcatggcttagggaaacacccagcttgcaaaccaataacattatttctcttcactactgttactgcctttaccacagggagcaaggaattggctgttgagctcatccttctctctgtatcaatttctactgttttcctgagttcttggaaggtccagattcactatttagcagacatgtggtccttcctgcttctctgagctcccatttcctcatgtgtaaagtgggaaactattttcttcacctcactgcacttatgtaaggcttaaaaacacaaatgagacagcatttataaagatgtgtatactctaagctaatgttacacatctaaagttgaaacaaagaaattacttcaaaaaaaaatcatacttactgcatcatgagcactatgttatgtaccttgatggttaacagtgtacagaaatcactgttaaagaaaaaagcaatgtaaatacacacaaactatgacattagaaatttattaacaaaatagtttaattacaattcctcttcctatgttaaagccaatagaaatactattaagaagatataataatagccattaaatggtggagcattttctatatctcaaatgattaatattttcatggcttcttattctatgctttcatactacagcagctgtagagttgtctactaactacttctatttttttttcaccttttgaaattttagtaaccagattattacctactcagaaattctgtatcaggctgatatcaaaagaggattaaaaaattatcacagttttttacttaacaagagtta

SEQ ID NO: 26475 - DNA, 506 bp, Bovine  19866881062316
  misc_feature (1)..(1): n is a, c, g, or t
ngtgtacactttatgtctggaagtgctgaggacttggcaaatatgaatacttataaaaccaaacccaacatattccaactctatataacttgatagagtaaaacatgaaagaggaaatgtgaaacagcactctctgtgttgctgaaagttagaaggggaaacaatgaacaaatgtatctgtcttgaaaaatgtataactagactcagcaaactagatactttttatcaattattaaggatgcatgtaaagggaatttttcagcatactttccttctcccctctgccttatagttttaaaggttctttgttcctttgatttattgttctgcttgtgcattccagccccagagtcatagttaggggacagctaaaattaagggactaaggaataagtctgtcaatctttgcccccttgggtagaaggctgctatacagcaaatgaaaaatggaaacatcattaagaataaattgtaggttttgaggtatgttcctttattctcaaaat

SEQ ID NO: 26476 - DNA, 744 bp, Bovine  19866881189327
  misc_feature (1)..(1): n is a, c, g, or t
ncttagcttcttgcaactttatactcctcaccatcctcctaatcctagcacaaaaatgtctttagattgatttatgaatacccagcatgttaaaaactgcagtggtgataatgacttccctccaggtaaagagataaagaatgagactctagtaaaagtgctttcatggtgtcaagatgttatcatcttttgctttttgcccaggccattttatttaaattgtaggaataatctttcacactgtggggatatggcagcaggagtattgacactaaaactcaaaagattctggtaagaaagggagtagaaagaagaaagctgggcatcaatgaatctctttccaggcactgactctgagcatctttggacctggaaagccagctgagagtttcaaatcgcacagagcttctagatttcagcagcccatggagcacttccatgggccctggggaggagagtcacttgaaacaggactggctgatgatgtaggaaatttggcttaccccaggcacatttgtaaagctgcacactcaatggggcatcaaaagcatggaaaaaatatttaatgtgtaatttatttgctgaaatataatatgggacagatacatgttttcaaggagaaattaatttttctgttccaatgttaacattattaaagatgctgattagcagccaactgatagagcaggagcaaaacagggggtggcattttgacttggatacagaataaacttcaataaagaa

SEQ ID NO: 26477 - DNA, 1195 bp, Bovine  19866881273086
  misc_feature (1)..(1): n is a, c, g, or t
natataatactcaaatatatgtttatttttcctatgatctactgtttcctttttttcactgaataaatgagttgactgataggactgcctagttttctgagtctccagtttgtaacaggttagaagttgatgaatgctgtattcatagtcgagatccaagtcatttctaaactgccactcttgagttgcgtgactctgatcaggtgactcttctaccacatagctttttcatatgatgaaattacattttctgaaaagacctctaaagtccctttcttcaataaaaacctattaagtcttcataatctaaccaatctaaattcttattggcttgcattttcatattggatctttaaaaataatacctttcccatctctaactatgtgcaaatggtatttccttttttcccacaatgatacagtattaatataaggacatttatcacatttacaaacatatggaaacaacacaaatggctataaataatgggaaggttaaacacataaattatggctacactcataacacagaacattattcaagagcctatctgtaaaactgtcttatttctatcttgaatttttcagaactgggaactagcaaaaattagtgaaaaatcagagcacacatatatattcataaaatatttcttaattatgctctaaaatggttttcaagcaatttattttaaatgttacaaacaattaatcataaattgagaatctagaatttaaaaaatacttttcccacctttaattatgttcaaatagcattccttttctaagcacaaactttgatttcctctaattttacacatatttatccatttgaatgaacagtttacatattttttaatttcattctctaagtgtgccctttccttcacagaattcagtgagttagaagcaataattcttatggaagcaaaatgcatgcacagtcaaattactttccttataaaggcagaggtctttcccctggctttgatatttgaaaaccttttgttgagctgctgggaacgctgccaaatggtgtcacctgccagctggagggatcatatgctccctattagagctgagggccatgctgctggtcagcagctgaatgtgggactaccagcactgcatgtactgagtagtgggctaaactgctgcagcagtgaggcctccctggaagggccagtacatacatttc

SEQ ID NO: 26478 - DNA, 633 bp, Bovine  19866881309750
  misc_feature (1)..(1): n is a, c, g, or t
ncacatgctttaaggagatagccagggtcttgatgtcactgaagatagacagtgatggcatttctccacctcaaggaaaatggatattctaaaagcacaaagaaaatggctcttggagtactttatgtcactttaccaagatgcttccttagtaatcagattaacagccaacacaggtacaaatggatgtgctaatgctcatctcaattagacaaaaaggttaaatgggctcttggatgtctgatcaagatgctttgctttgtcagtggtaaggtttcatgtcggtaaaggtgaacttcatgcccatttttcaatttttgtaagtggtaattttaacagaggtacaggtctggggcatcaaggaacaatgctcttgacatatatttataaaggaggtgcagcattcaggtcaattataaaatcattgataattgatgccttgggaggagggatggggcggcgtgacagaaaagaaaactaaacaagctattcattaggggagttaaaatgaaatttttattttattttttttatagagcagcatcccaacataggtcatcctaaggagtcctgtgggagaaataaattttttagtaatgtaaagtgattacacattcttaaaaaaagatgcta

SEQ ID NO: 26479 - DNA, 1877 bp, Bovine  19866881312258
  misc_feature (1)..(1): n is a, c, g, or t
nctatttaataggatttgttatacacagtactgaattttaatagggcttgctcaataggcaaaaggaacctatattttgaaagattattttaccttatagactagttgaccaactatggttaaattcaacctgtactgtttctataaataaattttatggagacatatccacactcatttctttacatattgcttacagctccaacagcaatggcaccccactccaggactcttgcctggaaaatcccatggacggagggcctggtgggctgtagtccatggggttgctaagagtcggacacgactgagtgacttcactttccaacagcagagttgaatcatcatgacagagacacatgtggctcataaagactaacaaatttactattttctccactacaaaaaaagcttgtcagtcctcattatagaaaatatgcaaagaactactgctaaaaatccaacttttgtgaagattggaaaacatagcttgttactgacacttttatttagtaaaactggtattatttgtttttataggatagtgtttgtaaagagatacatttctacttagaatttgtaaaaatcagtatttctcaacacaccatccagttgaaatcaaacagctaaaggaatatgcagtttgggcagacggggcagcagagaccactgtccttattaactcacgtggcacagggggcaactccatctccttgagacacacagggctcttcttcctcaagttctggacacttcttctcgctgccaataggaaactgcctgatgagccgagctctcatgcgggtgcctttaggggatgccgggtcatggcatgtttttgagcaggggctccactctgaccactcggacacctggcactccttggtcatcacgcaggcctggaaggtcattggcagcttctcttgctggcagaagctgcaaaagagaattaatattctcatcacagacttataggcaggcatgaacttataggcaggcatgaacttgtaggcaggcatgaacgttccagagcaaaatcagcttggacatttttatttctacttggaagtacaatttcaatttcactgaaaacgtaccaacatttatgacgtgtaaaagctgttagactccaagctaacatttgcatttcctcttagtttgtaatagttgttaaaccattcacaggaaatagaaaataaaaggatgaagcaaaattagctgaaactaagtttaccatactgttcatttcactcactccagatttgttttaacttagaaaatgaactgttaacataagacaattttcactctgtttagtgatttaaataaacatgcttggataactactacaatattattttgaatagaaaaagtaatttaatttatgcttataattatttttaatatcatttgaaattttagctgtcaattacaattataatgtaggcttattcaaatacctcaactttttccagttcatactttaatgcaaggtctacatatgagtatattaattaaacacatcctaagcattagaggcttccctggtggctcagacagtaaagtgtctgtctgcaatgcaggagacctgggtttgatccctgggttgggaagatcccctggagaaggaaacggcagcccactccagtacccttgcctggaaaatcccacggacggagaagcctggtaggcctgcagtccatggggtcacaaagagtcggacatgactgagcgacttcacgttcactttctttaagcattagaagggtgacagaggatgagatggttggatggcatcatcgactcaatggacctgagtttgagcaaactctgggagacagtgaaggacagagaagccttgtgttctgcagctcatgggg

SEQ ID NO: 26480 - DNA, 1175 bp, Bovine  19866881350326
  misc_feature (1)..(1): n is a, c, g, or t
ntgctgttgctgcacttcgtgatttatcaccttcccatctaagtgggaggaggtcaggtcagacagaggaagctattcattcaaaggtggcatttctccttccacagccagcactttaaaacacagtaattcatacctaattaatggctgtcttttgtgtcattatgagttttgttcattgaggttcacaataccatctgctactttctgatacaattcttcaaaaatattaccattaaggttagaagtgtgcctgcaatcaagagtcctgactccttttccttaccgaagacttcagctacaccaaggtggccttatcctttattcaaagggtaaagatcaagaaaatttatgatttaaactactgtgctacatattactgtctttccaaactctagtttgcagtcagtgacatttgcttacctagtctctttcattaacatttatgaaagcatacaaatattttatagccctaatagataagatacatagcaatgctttattgattttggttatctttacaaatcaactcaataataaatagtgaaggtgtttagaatgtaacactgaacctacttttatggtattgtatttccttatctcttagacctgaaatttatggcaactggaaataaatttatcatccactggggatactcatctaagtctgagagatcaaatttatattctgcatgttcaaatgtctcatcaatttggtgatgagctcaatggagagcagtatttctgtgagaatattaaataattaagaataaaaactgcactctcttttgtaatctaatcctatccattctagtttcagatattattttcagctactgtgttttaattcttcttagtatataatgtattttctcagtaatatagttcctcttgaaaactgctttttcactccctagaaagattacaccatggtcacatgaagattaagtacaaagtagtgtgaaaactcactaatttttattatcaattataaaacactcagagctgaatgaatagagatctgactgcccaatcccacagtatggtcaccaaccaataattctatactgcacttagacatctttccaaaaagcacttcttgcctattttatgtgatattcaaatggtctataaagaattacaaagatcttatttttaaaaattcaagttttagg

SEQ ID NO: 26481 - DNA, 1018 bp, Bovine  19866881361407
  misc_feature (1)..(1): n is a, c, g, or t
naatttgttatgttatgatggagaaaatatgagctttgaagtccaggaatatgggcttgaaatcctgcctctgctttaaatagctgatgaattgggcagagttgaaaagcaaagaaaaaaactatgattctctttttcaaatattgtaaaatgtgactaacaaaaatatttacctattgtcatgatgatgatcacttgctagacacttatgaggtactcagaaatgttatttcatctcccttagtttagactataataatcagtgcaaagctattatagatttctaaacagaaaagaaacacgagagattatcttaccttgaatggcagtgatagatagatttagatttagactggggagaaatttaaggttcttgagctcaaatgcataatttttttgtttctttactttttttcttttaaaattatgatggaaacactaggaattaaaagaacagagcttgtaaattgttgcttatactcaaaccttttatttgtaaaacttaacaaagtattcactgaccaagacacaaacaaaccaatttgaaaagatgccttaatctggcagtctgtttttaaaaatcagtatactttttttgtgtgcaagccagcacacaccaactgaatattagcatcatatttacttgataaaattgtgtaatatctttagcctaatctaattatgtttcaattttagaaaacatttactctttcctgtaagagcagagtttccactaatgtataccaatgcttgcttttagattttggatcaaattatattacatatatattggtataaatgtgtgtatgtgttccttcagagcagcaattgtattttattgatttatgattaaatagcccacctacactcatcaaagtatcttataaacaaaatgatattacccccaaatgtctttattaggaaaccactactatagaacttcattgcttagtctgtttatagaagacgaagtaaaaaaaaaagagcccactccgatttacttatatgtctccttaaa

SEQ ID NO: 26482 - DNA, 1709 bp, Bovine  19866881514733
  misc_feature (1)..(1): n is a, c, g, or t
ntgtgtgtgacctaagctatttagacagcctgttccaagatacaatttgatcagtcattatatacatctcacctagattaatagtttgaatctcttcattaaaaaataaaaatgatgcttgggaaatgtcataaatccatacacattctttgttttcacctttaaaagtagatgactctatgttcttgaaaattcaattatatacctcaaaaaggacaattgctattataacactttcaatcttgaagattaattaccttcctctagctttgctccttcaggtgagtttctgataataggcatttactggagagtccactgccggcattttttacaccttgatcttaattatatataaatttttgcatacttcttttcaagctactgtgttacaaggtattaaatgagtgtgtctatgaatctccgcatatttaagtatgctttgtaagttcaagtttcagtcttgtctcctgaaaagaaaacatgccttgttttattcttaatcttagaggaattgattaaagctaatttcttgatattaaaaaaaaattactacatttttcaatgttgaatagcttccctaaaaaaaaaaagaaaagataaaagttctgtgcaactcattattcatccagttcctctccagatttctatattctccagtccacatcatcagtagtatagattgcactccaaacacaaaccaacctcttatcaagctcctcaccaggcagcactgcacaagctagaaggagtcccagaatatatttacttgatcaagagtctttctttttattggtaatggcattatcacatccctttcaaaggtagtagcatactcctaaaatcactaaaatttctggggtatttgtattaaagcacatttgaatagtcttaatcttatagcattgccattaatggatttctttaagaatgcaagtgaatcatagctgcaatcagtttcttcattattttttattggaataagaaatcatttacatggttgaaatacatttagtaagcaacaatacgacttgctaatcagtaaataaggcaaatagttaattcacaactgcaactcagtgaaaataatggttatgtccagacaaacatgcaacatatattcagcgttaaaaatgatgttctcagagcatgaggtttttacggtgattactaaagaaatgcaagttacaatatttgctaagattttgacaatttatgtagacagtcaaaccaaaaacacatgaagtaaaataagtattttttataattcaaatctgatttcccaagtaatgacaaaagctgcttccggagaagatttataggggattttcattcattcaacaaataaatattgtgccccaccaatgaaacaaactgctctgggtgaactacacacattaagactttgttcttgtagaatttatattcaactgtagaggaggtggaggctaaccagcaaaagcagtatagaccagaagaaaataccatcaattattgattcaaaaagacaatagaaaccaggttatactcaacgatgactggtaaaattctagattatagcctttctggaaaatttacattgactttgagttggcactgacaagggagaaggtaaggagggagagggaataattatttcaaaggcacacatctaggaaaattcagaatatgactggagcacaagggcaaagagggaaatcacaggaaat

SEQ ID NO: 26483 - DNA, 1121 bp, Bovine  19866880319980
  misc_feature (1)..(1): n is a, c, g, or t
ntagaatgatgatatcaatcccagttttgttgtcactttttttcaggtgtactaacagagcaagtggcaggtcctctgggacagaatctggaagtggaaccgtactcacaatacaacaacgttcagtttccccaagttcaaccacagatttcctcttcttcctattattccaatgtgggtttctatccccagcagcctgaagagtggtactctcctggaatatatgaactcaggcgaatgcctgctgagactctctatcagggagagactgaggtagtggagattcccataaccaagaaggcccgactgggagcatcagcagggagaatcaaaggggatgagctatgtgttgtctgtggagaccgagcatctggatatcactataacgccctgacctgtgagggatgcaaaggtaaacgtcttttggttggcagttttctccttattaaggtttttctatatttgttgttgaaatccttaagactggattctttccttttcccaaataacttcccatttctcttcttctgcttctccctcttcttatctcctcaccttcattgggatgtcataggtttctaggaagatcttattagagtatttagcttggatataactaatattttccctattcacaacctcacatatagttagaagggatttatgattatgggttttgtttgtttttattgtctttttaagaaagagacatgctgaactcctctgtcttaaaattaaggtcaaggagaataagactttattcagtaaatattaaaaaatacattttcatgtactctagttaattgagaaagagaggaaggcaaacagaagggaacaaaaaagaatagctgatagtcaacaaatatttcacttagcagggacatagaagtgctgtaggggaatcaataaaattacaatccatataggatggataaaatacaacatatgaaatatgaaaatgactcagtatgaatccctacatgatcattctcctaatgagggcacaaatgataagtttgtaaagtttcagaggaagaacatagtgggctagtaggttcacctatttattttttaatttgtttattcaacaagtacttatgggatgctcccatgttagcctt

SEQ ID NO: 26484 - DNA, 2375 bp, Bovine  19866880365676
  misc_feature (1)..(1): n is a, c, g, or t
ntcaatgtcagtcactattactatcccctagtattgccattctgtaatgctgagctccatgacccataacaacttctcgttctgcctcacctgttgtacactttcgaggttatccatttaaggaggctttctgaccctcataaattcatttttacatccacggtaagcagtaagtaggggctattaaaaatgtgacaatgtgcacggctcctggcagcgacctccaaaagtatctcgctgtcctctcagacattttgaggacacttaagcctccatatgtcagtgaaagcttctccaccttcatgtgacaccacaccgcactgcttctatggaaacaaaagcaccaccaccttaaatcttgatgagccaacaaaccacagaagagaggataggtccacctgaaaatcatatttttcttatctctccctcggccttacccctacatccaatcaatcagaaagccctgccaagtttccctcttaaatatttaagatcctctgctgtcctagaagatacagcccatactgcttaccatggcaaacacgatccaggcatcctgccctccctttagagcctgccactctctgccttaaatgtgactctcccacagtatgaaactgcttcggttcccacatgcgtcttgctgttttcatcccatgcctttgctcatgcaggaacacacttcccttggcctcggtacccctagcaaacttcttcctatccatcctgcagaatacaatacaggcatcttccacaaacactccccgaaccatttgccaaactaaaactgctgcttgtcttccatgttctcagaatacgttccacccatcgctatcaatgttctttgcaactactgatttgccttttcccctcaactagctatgggagttggccctatacttcactcagcttctcatctcacagtgcttagtacagagccataaacagacgctcaacaaatattccctgaaagagggagcatatttatcctcatacatactcctacttatcagtataaacatggaaaagttccttaacttctatagcaatcattttcctcatttataaaatagagagctggctggctaaatcccttgccaaccataaggtaccatgattctacaatgcatgcttttccaaaatcaccatttgccattaaaagcagaaatgaaattttgggctgatgatgtccaaaaccatttagcaaagtactcaagaactacaacctaacagtcttccttcagtttcatttccctcctgctcctttccctcacccattgttccagccacaggatcaatttcaatgttctccaaatgcactaaggactttttcatgcttctggctcttggtctattaagatctcgcagtgtggaatactgtccagcctctccttgcccggggaaatccaactccttccgctatccatgactgcaatgcaagctcttccatgaaatcacttccttgattagattttgactacaatgcttgttccttttgctctaatattatagaagctgttagcacgtctatatccttggcttcactgtaagttccttgaagtaggtcctgtttatcactatggcattcaaaatgcacagagcttcctatacagaaggtgttaaataaatgctttttgttggtatgtgaatgtattccttacatcactataaaatgaagaaagttcactcaaaggacaaaagaattggcagtggctgaaccacagcttttaatttaacattctctatcctcagactctagctacagaaaataatgtaggacttccctggtagcacagtggataagattctgcccgccaatgtaggggacaagggtttgatccctggtccaggaagattccacatgctgtggagcaaataagtcctcacactctaccctgcgctccacaactactgaagcctgtgtgcctagagcctgtgctccacaacacaagaaaccactgcgatgataaagcccctgcatcacaaccaagagtagcccccacccgccacaactagagaaagcctgagcgcagaaacaaagacccagcacaatccaaaataaataattaaaaaaaaaaagaaaagctgaaatattctgggaaaaagttgtttgaaacagtgaaaaacaagaaactcagcatgacagagcacatcaattgaacagactaccattgctattgttgtttagtcactaagtcatatccgactctttcgtgatcccatgggctgtagcctgccaggctcctctgttcatgggattttccaggcaagaatattggaatgggtttccatttccttttccaagggatcttcctgacccagggatcaaacgcttatctgcactgcaagcagattctttgcctctgagccaccag

SEQ ID NO: 26485 - DNA, 1380 bp, Bovine  19866880433716
  misc_feature (1)..(1): n is a, c, g, or t
ncagtaaaggagaatgaagtgactgaattaaggcctgcaaagatctcaaaataccacagctcaaaggaaaatacaatttggagaaaaataagatttgtctgtctagaggcatagaagctagagtcagtagatgtttaaattaacagcaaattttcttttattaacaggtattgctacttccactggcatctcctttcctacaagttataaaatataaataatgcagccaattttttaggctcagggtagaaaaatacactcaacctatactaatgagtccaatggtatgctagccatagtcctgacctcaacttataatcttcctaaacatttattaaactacaacagagatgaaaaatacctaagatatttgacttaggacaagaattactataaattagagaaaggttaaactttagggagaatttccactggatcttaaaagatgaagagatttaggtcaggcagagagaaaaaaaggcctcagagagatttctcccaagtacagaatgttgtaaaaccaaacaaatgggagaagattcaaaacctaattgtttttccacttgattaacatattgtgagctctggatatataagtggcaacttattttctacacttgactttaattagtgacgtttaaagcacactaaaatgtatgaagtcagcacaagtgctgtaacacaatgaacatcaagtcttgtggcaatgacaacatggagcaaactctcaagttacttgtcataagaatctgataatctgatgaatggaggtatctgaatatgaaactgaacattttaaattcaagagagtatgaagatgccattgatttgctatgtaaatctaaggaatcacgatggctgacatacccatcaagtttctgccattcactttcaactaactcttacacaagttacaaagagaggaaatgccagacaagcacaagacagtgacactgctacaagtcactctgttctgcctcagttccactgacagtatttccattattctctggatcacatctggcgaaagatgaaaactattactgatatttgaagaagcatggtatcacgataccctggagcagtaagaaactaaccttggcaaacatgacaccaaatcagaggccccactttcccccacctccatcagccccgcaaggcccccatcaagtagaatctgcatgttctattctcttttgtaactacagggccaactgcccagtcttctcagtaattgttgagaaattaaactggagaaaaatcctaagaatgagcaattgcagactttaattcctagaggaatactccatatgatggagttgatggacatttacaagttacttccttgcttaaatataccaatacaaaaaaacacaaaaa

SEQ ID NO: 26486 - DNA, 1989 bp, Bovine  19866880516695
  misc_feature (1)..(1): n is a, c, g, or t
nacggcagtggttatgatcacatttttcttttttaaccactgtaaatgtataaatttgcagcctgatttcatagtcaacctttctcagtttggttatcctgaagtccctgagacctgtttcttagcctgcaaggttgagagccaggccctgggttgtagtggattcaccaactagctggtcagccggtacctcaccgcatacttcttccaaatgatgcatgccctatctaaaagaagcagtaatttattttgtaatagggaagcttctactgatatttattttccgtctcccatttcttaaccttataacaacagtaccagatctgagaatcctgggagagcaagaaccaaagccacagtgaattaataaaaatcctagagactgcttcaatctgtggaagagatataggtaataaaaggtagtaacaaaatatttaaataaggctaaagcaaagctccattttgtctgagacaatggtgtctttccatcttctggaaactttcagctttgattcgcccaccaggtcagaactacatttacttgtgttaaactcagtgagatggaaaaagacttgaaattaaatgtcagaagtattacacaacattgcatctcaagacctttaattgtatttaaaaaccatctggctggttctgcaacatctgaaagtttcttttaatttaagcaaaagacataggcaagaaccagatttcaataaaaataaagctatacagagaaaatgaacatcaatagctgagaaaagcataatgtaatgagaagtagctaaaggaaatgaagtgtaagtggataggattatttaggatctgacctcctgtgacttgctggacctcattcataatggggctttggaaacactgtctgctgctgctgctaagttgcttcagtcgtgtccgactctgtgtgaccccatagacggcagcccaccaggctcccccatccctgggattctccaggcaagaacactggagtgggttgccatttccttctccaatgaatgaaagtaaaaagtgaaattgaagtcgttcagtcatgtctgactcttagcaaccccatggactgcagcctaccaggctcctctgtccatgggattttccaggcaagagtactggagtggggtgctaggaaacactgtcagaaacaataataaaggtaacacaaaaatgtagattccatagctgtaatgcaaacgtgagatagaacatgtttttttttccttagaacacccagaaatttagcttgatactgttggtttctgttggctccttgaaaattcttagcactcaacaatgttaagatcaacagaatttcctccatttaataagtagagtggtgcttatcattccaacagtttaaataataacaactacatttcaaaccctggaggagctatactgctttatgatgccttcagatttacaggacactttcccacactgtcattcaatcctccaacaagcagtgaagtgttattattaaccccaatttacaggggagaaaactgaagttcagagtctcaactgcctctgagactttatttcttccaatttcatcacttatttccactcacattcactgaacttttcccagtaacaccgagctaaaggaactggattcatcgtacttgaaatagttggtatggggacataagatttgcagtgatgtggaagaacctagagtctgccatacagagtgaagtaagtcagaaagagaaaaacaaatgttgtatgttagcacatagacatggaattctagggtaactgtactgattaatctatttgcagggcaggaatagagaggcagatatacaaaacggacacatggacacaggttggggagggacagggtgggatgaactgggagagatactaccatgtgcaaaatattttggaatctggcgtatatataacactgagagctcagctcagtgctctgtgatgatctaaagggggtggggtggggggaaattggtt

SEQ ID NO: 26487 - DNA, 1477 bp, Bovine  19866880552664
  misc_feature (1)..(1): n is a, c, g, or t
ncagagcgggtttaccccaaacctgtgcttgtcaagggcaggtccacccattattcaatttgttatttccagaccttagtgctacgcctggaaaaggtgaatcctcaatatatgttcattgtttgaaagaaagaataaaggaatgcatgaaattaaagaaaaaatacatgaccatttccccttcttatgaactgtaacttcaatagaggttcaaggagaaagagcatttggctaggagtcagcagacctgaggtctgaagccccagctttgctgcacatgaactctgtgaacttggtcaagctcttgacttctttagtcctgatctttccatctgaaaatgacaatagtgcttatctcacttttcctgggctagggtggggaggtagaagaggatgaggtatggttaacaaaaataaatcagccacacaaaatgcatagttagcaagtaattctatatatatttgtggaatcagctgaatcaacaacactcagacctaaaacatatcaaactacaactactctaaagttgtcattcctaatttttaaaaacccttcactaatgatctgcccttaaaatattttggaagtgaaaagggacaaggtcaacggcatcaaagcgtggggagaggtgacaggagagattcagtagccacagaaatgattatgaatggtgagaagagaaaaggaatgaaaaagagaagaacactgagaattagtaatcaacaaagaagcagaatgtttgaattagcaatgaatgcctgggaagaggctgcgcatacatttgaacaggaaaaactactgaaatttgagtttaatctgagtggtaaaactagggcatagttttgcaatattttgaaaagaatcaaagagcaataataagtacaaaaaactaaggtagttttggtacaaagtgactctgtaaagaagatgttttcctatataagaattaaaaccaaaaaatgtgagagggcttgactatccatttaatcttttaggaacgaactgcagttaaataaaattaagtaaggggcggaaaaacttgagcctatgaatgaggttaatgaactctgtgggttttggagtcagtaatctacattagcggagaaggtgatggtaccccactccagtactcttgcctggaaaatcccatgggcggaggagcctggtaggctgcagtccatgggggcttccctggtggctcagaggttaaagcctctgcttgaagaaggaaatggcaacccactccagtattcttgcctggagaatcccatggatggaggagcctagtacgctatagtccatggggtcgcagagtcggacacgactgagtgacttcattcattcaatctacattagacacctggttccaccccttgagcacactgtctctcagtgggtctgtttctgtgtatgtacaatgggaataataattttactttataaaataatacacacaaggtgtacaattagtgttag

SEQ ID NO: 26488 - DNA, 2318 bp, Bovine  19866880577565
  misc_feature (1)..(1): n is a, c, g, or t
ntttggatttttaattagtagttaattaatcaatattcctaaataaatgatgaatttaatctttaaacacaaatattctaagaacctagcctcgaaagtaacacataggtagctctctgagttccaattcccttcaaataccttgaactcatctcaaccaatttacatattaagacatattacagaacttgggaagaccagacactcgatgtccagagctcacaggtcctggatatctgagaaaccaccagagctttgtgatgacagttcaaagacaattgatataaccctcatctttggcaatttgacaatattacaaggcatgtgtccaatgatctggcaagtagaactctagaaaatttcctaggtataggcatacacaagcaaaaccacatgtacaagaaaagggattcaccaatgacaatgtttgaaacagaaacctaaatatccagaaataagggtctagtaaaatgaactgagataaactcttatagtgcaatactttcaagctgtcagagagataagaagctccttgtgtacccgttcctatcatatgttgaccaagttacaatcatgaagcaaggagttgaacagctgcaacctgttaccatttgtcttttaaaaggcaaataactgaaacactgactccctctcggttggagacattggttgctgggggacaggagtaggaagaagacttttccctgtgtgccttttttatacctttagaatttgtaagaggtattatccatataaaaataaaacacttgaaaaaacacatacaggacaattcacctgtgtgtttctctgttgctctaatattcgtgataacaattactgctaatggccccgagttctttattttaaaatatgtgtctattgtaataggcaaatgttctccaactcaaaacaacagcaactaccaccataaccttctgcccaaaggacaggattcttctgttaggctggccaaaaatttaattcaggttttcccataaggtggtactggaaaaacccaaaaaaagtcgaccaacctaatattttcattatcagttaatccatacaatcattcatttaacgttccatgtggcagctagtgcactgaatctacaaggcggaaaagataggtcttattttaaggagctcacaacacagtacgcaagacagagaagtaaactgactgctcctacaagtccacaactatttagcacccactacatgcaggacaaataatttaaaataactatttgggatttccaaatagtagtttccaaatgacattgtttatctgtatcaccaacagactcaattttcaggtcccactccagacatactgaatgagaatttcagggcatggggccccaaaagctttttaaggtgtttttttttttttttaattttcctggtgattttgatggcaatccaagtacaggaaccactggtttccccacacaacgattcaaaatactctgatggtgactgaaaaagaacaggtcttcctgttgagtaagcagaaagcaggcttccctgggctgcttcaaccttccaggcagaggaaataaaaaatagaaacaatgagataaatcaaggtcagtccctcaaaggggaacatttacaagtctcatcctacaataaagttgagttaatataaatacaaaaatttcttgctttgattttttttttaaaggcctgagatgccaaagcagagagcacccttaaacattattttatctcagtcacatagttaaagagttacagcctcacactggacattcagatgcctgtagtacatacaaccctaactggcctgaaaaaacagtgataaaatgatggtgtttttcaccatctgaggcaaaatgagaagcagcaactcgctcttgcaccaggacaacttcatgctttcctcaggactggcaagagcttcacattcacaactctttaaatgcatcaaagtaaatactcatttctattttgggctcatcttcctttttaaaactcagcttggccacactttgaggtattttacaagacataattacacagcagatctgacataaaaacaaaggggaaaaaaatgaggaaaactaaaccaccccataaagatatttttaaacgtttcacagtcttaaatctacatgagtcacatactaagtagaaataccacccacaattccacctgacctgcatactgttttcttccaaaaagttaagcatatgtttcttaaatgtattcattcactcattccttgggggatttatagcacccactctgtggcaggcactgtgatgcgtatgataaagtagtgatcaagacaata

SEQ ID NO: 26489 - DNA, 1085 bp, Bovine  19866880647222
  misc_feature (1)..(1): n is a, c, g, or t
nttggagaggtaagcatcatgtctgtgctgctgctgctgctaagtcgcttcagtcgtgtccgactctgtgcgaccccatagacggcagcccaccaggctcccgtgtctctgggattctccaggcaagaacactggagtgggttgccatttccttctccaatgcatgaaagtgaaacgtgaaagtgaagttgttcagtcgtgtccgacttagcgaccctgtggactgcagcctaccaggctcttccgtccatgcgattttccaccccactactggagtggggtgccattgccttctccgcatgtctgtgctggtggcacgatttgtaatgtcaatattgttgatactttaactgccatatagggatttaatttactgcattttgtggtgttttatccccacatggaagctttttgtacttgtttgtttgttttcctctgcaccatacccaaaggactccttaaggtaaaacgaatcacttccctgtatggctgcaggcagttgtcagagaggctaatcatttgaattttcctgttgtgaccagtactgccagtatattcagctatttagtgttatccagtgctgggtggtcccttccaccatagccccttgagttgtgaagtggaaatttgatgcccttatataactgagcacttgtattattcaattaagcaaggtgcttgctgtatgaatcaacaaaacaactccaaacgaagatcaggaaaatacatctcaattagtgacagcaggaccagtgcccgagggccccaatcctcgagaaaaataggactgtgccagagaaacacgaatgcatttcttacaataattctgtctgctgaactaatatttattggagtcactcatctttgcatatatatctcatttacttcccttcactttccatctgtcaagaagtttttggagtccccacagatggaaacgttaatctgtgttaaatatttaaaacatctagtaaaggtttgcctgggctcagaggcctattaatcaatttgaaaaacgtcttctatcaggcactgtactaggcattagacctgcaaaaatgaatacaatacgaagcctttactaa

SEQ ID NO: 26490 - DNA, 1354 bp, Bovine  19866880647954
  misc_feature (1)..(1): n is a, c, g, or t
ntccatcctaaaggaaatcagtcctgaatattcattggaaggactgatgctgaagctgaaactccaacactttggccacctgatgtgaagaactgactcattggaaaagatcctgatgctgggaaagatcgaaggcatgggggagaagtggacgacagaggatcagatggttggatggcatcaccaactcaatggagatgagtttgagtcaactctgagagttgctgatggacagggtgcctggcatgctacagtccatggggtcacaacgaagtcagacatgactgagtgactgaactgaactgctaattttgaccagattgttttcctagaaatgactttgtagaatatattgggttggccaaaaagttcatttgagtttttctgtaccatcttatggaaaaccccaaacaaaccttttggccaactcaatacttattaaataaagtaaaatggcaatacttattaaatgaagcaaaataaagcaaaaataatttttgaagatgcatttctacctagtgctatataatctttagctatcttcaagggactaaacatttattaatgcccattttaatacccatattaaaatggatatctaatgaaaatattcttgatacctgtttgaaattattcttttgtcttttccagaattttccaatgagaaaagtgccctgtaagaaagatgctgcatctggttcattctttgctagagacaatactgctaacttccttcactggtgcaggcacattggggttgatgagacttacctctttgaatctgaaggtttaggtaaatgttgtagtcatatttaatgtttaataggatattttttgaggtttccctggtggctcagacggtaaagtgtctgccttcaatatgggagacctgggttcgatccctgggtggggaagatcctctggagaaagaaatagccaacccactccagtactcttgcctggaaaattccatggacagaggagccttgtaggctatagtctatggggtcacaaagagtcagaccgactgagtgacttcacttcttcaaatgatcttgatgatcttctctggttcctttagtctggcctcaggtgaccatatccagtgatactgacatcttctgtttgttgggttttaacaaacatattttaacaacaagggtatttttggagaaggaaatggcaacccactccagtgttcttgcctggagaatcccagggacagcggagcctggtgggctgccatctatggggtctcacagagtcggacacgactgaaatgacttagcagcagcagcagcaggatatttttgtatgcctcacttctagtttttctttccaaataagaactcaa

SEQ ID NO: 26491 - DNA, 1326 bp, Bovine  19866880666590
  misc_feature (1)..(1): n is a, c, g, or t
nttcaactgtaattttacatgccttttctgactcaccaggaagatttggcagaagggaggcacatctttaggcttcatcttcattttacatacatattccttacagtctctcttacactcctttggaatcactggcttggacaccttacttttccactagtctgtgagttccccgaggacataccctcatttccataccctccccatcacagtattactccacagtaagttaaactgtgtttttcattcattatttcattttatctgagaggcagtgaagtatagtggctaggacatgtggcttctgaagtcaggcttcctgtctatctctgaaaaaattatttaaccactctctgtcttagttttttcatctataaaatgggaagaataatagtacttaaaggatttttatgaggatttgaggaactagtatataaagtatttagaacagtgtctgaaacccaataagtgatgtataaatgttgctattggtattatttcttatttggctttgaactgagataaatagcttgacacatagtcattcatagctgaagtttctgaataaatggatctttttctagactgaataatccccactcctttatggtattttaaaaatcagactaattttccaatatttaaaaaatgttctcctttggtccttcatcttaatacagtgaaaagagtatttttggtattttgctattacaacaagaatttttgaaccaagtcacaacatttgcatctatttaaattgcatcttttcttttttgagtcattttccatgctagtcacaatgggcataaattacataggacaggcaagaggcctgccttcatggcatattcaaattcttacttgcaggaacaaacgtttcttaccattaaccaagttacttaccactctttcgaattctttcttccagtaggtcagtatgtccagctggaagtttcttactgaaaatctcagctgaacggagaaacatcgcttcaactgcagaccctttcagcaaagcaatctgatcttcatggtccaatgtctgaaatcctgaatgaagatggtaatcaaataggtatcaaaaagttgaatgttgtataacaatatttcaccatccccactgatagaacatttccataaagtgactttgtaattgttttaagactgagtagccaaatcgagttaataagtatctgttgtattccccaaatagaagctgacttttatattcattgagcaggatttggtcaatgaattgggcaaaaaaggatatcatgtctacaccaaatatatatacttgtatactatggaagacacaggctgatt

SEQ ID NO: 26492 - DNA, 2553 bp, Bovine  19866880742099
  misc_feature (1)..(1): n is a, c, g, or t
nccccacccaaaagttcctcatcctgttctgcattttctactcccctccgtacaggcccatcccactccctttaccttccaaccaaagctacctcattgttgacccaccatcacatctctaagttcttactcaagccagcccctctgcctaaaatgacctttctacttccgtcatgtctgaagtctacagcctactagactctgtctgccttgtaaccaggtcacagaataagttttcactagtttgtggctttttggaggacaggaattacactgctttttttttttctttaaaactttcattcctggggacctgacacaaggctctgcttagagaagacacttaataaattcttactgtttattgaaactcactgggaggcagaaacattttctgggatttcacatagaatttctaatggattacacaggatggctgccagtctctttatccttctcagtacaattcatacagtcacattattttgaaaaattaagttttccatacagagcagccattgccaataccagcaccctaggttttctatggtgattctcgatctgtttgctcaagaattattgttattgctcagtccctgactcaagaattactggatatctgctattcagcagtcactctcctgggccttagggtatagagatgaaaatatggtccatgcctcaaggaacaaactgtctacttgggagagacacaagtagacaaggaattataataatagtttataaagtcctatgaggtctatcggagaaggcaatggcaccccactccagtactcttgcctggaaaatcccatggatggaggagcttactgggctgtggtccatggggtcgctaggagtcggacatgactgagtgacttctctttcacttttactttcatgcattggagaaggcaatggcaacccactccagtgttcttgcctggagaatcccagggacgggggagcctgatgggctgctgtctatggggtcgcacagagtcggacatgactgcagtgacttagcagcagtagcagcatgatgtctatatcaagtcctacgaggtatgtaagaagacagacagggtctacctagctcagctttgggcacaaggctcagtaaaagtggtaagtgtcaaaaaatttccatgggagatgttgtctgagattgtcctgaaagttagtctcaggagaaatagcatgtgcaaaggcacagaggcaagtgagagctccttacttcggagcactacaaatgttttggtatttctggaatgttctaggggagttgcagaataagaagcaatggctgtacattataacaggcctagtatacaaggctaaggagtttggtctttaacctacagttagttccatggacactgtgctatccagactatgaatttacaattccaggaaatcaggctagttttgccaaaaaatggaacagtcatcttggtgaatcccaacaacagcacaaacaagttcagctaattaatctcttttgttgaatcaggtaacaaaaatcacaagctaaaaatactattttggaaaatggtaaagatataccttgcaatgacagcaaaggtgcttttttatgagaagaacttctcagtggaataatcacaggaatgaactgcccaggcaaactgtttctcaacttgggctctttcagaaacggttatgaaacagtaagcaggccactggctgaaaaagtcaagagatgatgaactccatgaagcatcactaaactgaatgccctcagaacaatggcagcatccagctgtgtcaccaggaggtccccactgcctggcactagggtggacacgtcaggtgctcaatgaatattggagtaaataaatagacaaaggaactgatccgtaaacaacaccccctcaactgaacagaaacagctgaagcccagggggtgggaaatcaagcataatatttttagaattcttgaaacgttcttaagaaaagcagtttcaatataaaaaatgcatttccgcacaagcataaacacgtgaccataaacagttgcttgatgtgactcactctgactggcacagccacgtaatctgcatgaaataaccccagaaataatggacagcagtgagttagatgtcacaaagcagttttgtgagcaaagaatgacacagtaagtgtcagctgtgtatcgtggaaggggccccgcaccaggagtggagctggtgtctcagtaaatctatccacattgactcaactgtcttgcccaggtgttgaccggatctctcctgtggtagtgacttaacttcccgggactttagctttcttatctatgaaaccagacggtaggtaagatactcctcaaggtcccttttgatgacaaggagaggtacttcaaggtgtccccggggcagcaggtagtcgccatacccacataagccctgatcatgaaggatcaacatcagcacatgtttctgagtaactctgatgattgtgtcactgtcatgacatgctggggtcttgtagggttaagggaaggcacagctcattccccatcccccaggaatgtct

SEQ ID NO: 26493 - DNA, 2441 bp, Bovine  19866880760765
  misc_feature (1)..(1): n is a, c, g, or t
ncttaatagttccagaagcagtctccctgccttgcacctccctgtgtccaaggcatcctttgcaggtaccggaggatttttaagtgaaaacaccaggcttgccctctccccttgaaaccatcttatctgcttcatcaccatgttcaggatgaagtgcactccttcccttattacatgagagccccccaggaatcttccacttttcctccatcactcccatttaccttcatcttgtaccttgacattttaagcagccctaacacagttccagcattcaccaatctgtttaaaatgtcagggtcctggcacaaccttttcccaaagtttagaatttcttgtcccagctccattcctcttgaaatcttacttattctataagacccaacccaagcctctccctcatcttccaggcttttcctgacactcccctcctcgaacccaggtcttcggcattgcaggtggattctttaccacctgagccacaagggaagcccaagaatactggagtgggtagcctatcccttctccagcagatcttcctgacccaggtatcaaaccatgatctcttacattgcaggtagattctttaccacctgagctaccagggaagccctatcctctaacaaagttcatcgtcctcaagtgatagcactgattacacagcattataactgtgttattatctgattccttcaggagagtcctagtcttgagttttattcatctttgcatccccagagacaaaccttctcttgagactctcacataaatggttctagaaagactgggctttcatgtacgtcttactagactgttctctgaggaatggaagaatatttcacctctttctaacctctctttattacaatggctggcatcaatgaatgctcagtgaacgtttggggaattcttcaaatatcgttggccaaaaaaaacccttcagttcagaaaattaaaaaatccctctgagctaatttctaattagctcatttaagtataaatataaaaattctcctttttgaaattagaaaacaccacaggcattaaccatgaagatttcaacttctgaaactcctgatttttaatagtaattcaactaactggggcatcttgcagataattgaagcattccaaacatcctttctactttgaattgtcaggcagaggaaagattgttgattctctcaggcagaaggggcttcttggagagatttcactagcatttaagttcggaggggaaatagccctgtctgcccaagtagagaatttcactgttgagactggggttgctactgttccttaaaaattcagttccacactcaacatacaggcattcttacaagaagggctgtggtttgatggcatagggcaaaacctggggcttgcaatggactctccacaccagccagaggactattcagtttcatcacctactccccttatagaaaattagctatgatgtagtcaaagaactggaataacacccccctcccctgccaatagctgcactagccatcctaaagaactaatctccctttgggatggctgaacgggtgacatccatatcagtaagggaggcccactcaagacattgcagacacctggccaagtcagctgttgggggtggtggggggaggccagaacatttgcatcctcccagtgttgctgatccacaacagacaaaccaagaatgagccaaaatatcagtgctacagatgtgatcatctagtctgctttttataccatttcccctcattgctctgaaaccaattttgagttctattatttgcgctgagaggataaagcagaatggtcattttaaaggactatgacatgctcatattttggtaaaatggaactaggccatatactgaccgttctacaactttgtagacatggatttttccatttataaatttttaaggagtcgcttggagactctggttcaattcctgagtcgggaagatccactggaggagagacaggccacccactccagtattctttggtttctttcgtggctcagctggtaaagaattccacctgcaatgccagagagctgggtttggtccttgggttgggaagatcccttgaagaaaggctacccactccagtattctggcctggagaattccatggactgtatagccattgggactcgcaaagagtcggacatgactgagcaactttcactttcactttgaacctccatcaagagtaagtctgtattgcaggtgggaatgcagaatggtacagccactttggaagatagttgactagctttttacaaaactaaatacattcttataaatttaccataaaatccagctattatagtatactccttggtatatacccaaatgagttagaagcctacgtccacatcaaagcctgcacgtagatatttatagcagttttattcataaatgccaaaagttgga

SEQ ID NO: 26494 - DNA, 751 bp, Bovine  19866880772699
  misc_feature (1)..(1): n is a, c, g, or t
ncccgtcatcattcaaggaattcagttaacatttttctcaagattatcaagataatcttaaatatagcttaatttcccctctttgtttgtgtaaactgataaagaattcagagattatgtgtcttcaatgcatgtaaaagccatggatttatttaaacctcagagtttatcagataaaatggacagagtcaagggatgtgggtggggactcagatttgaatgaaataaactttcagtttagctgtgggtgaattgcttagtctctttccttttttaagaaattaaagcctctcttacaagtttgagaataaaatgaggtaatgtgtaaaagtgcttataaaattatacagcactaaatatagtaaaggtgatataaaataaatataacaggctttataatcattgttataattgaaataataagaaaatggagggttttttttttaaatcatactgagtgactcaaagcagttgctcatttatgcagaaaatggttgaaatcccacattagaattttagttgactcagtacgtgttcagataatgaacttggctttttcatacacagaagtatgacacttagaatacgccccgaatgggatattgtatcctccctagtgtgttcatatattcatgggagatctacaaaatgattattcttgaggtagattatgtattttctgtaaaactagcaatcgcaataattctgtgaagagagtatattctaagatttcatgctctaaatcaaggtt

SEQ ID NO: 26495 - DNA, 1092 bp, Bovine  19866880801567
  misc_feature (1)..(1): n is a, c, g, or t
nattaatagtgaaatagaaatgcaggataaaaattagttatgaagtttctttaaagttttagcccctttacttctcaagctgctggtttttaaaaagtgtccagaagttttacatattaaccatttttccttttttttggaaacagtatttagaacttcgatttaacaaatgtgttcgtctctgtggaacaatcctcttcattgttcaaacagtaagtagccgtcagttcacttattttatcttctttccatctacagtgttttttaacacctacagtgttttaacacctgggtcaagcttctttgataaatacgtgaaagaaaagaggttgaacgtaggaggaaacacaaaaggaaaaacgcctgtcactacatagcattaatccttaagatcattaaaccttgtcttagaaaatgcattatttcctgagaaaacagtgagttaagtgaacactgaatattatgttgaacaagcaacagttatggttaggaaaatatgctttttcctcttatgtctccctctgtccctaccaaagtgacagtaagggtatggcttagatgacaaagatatttgaaggaaatgtactagctaatagtaggaattataataaagggaaaacacgttgtatattttgtagcatttttgcagcatattaagtaatagatttaatagaaaatattagctgacataggaagaaaaaatttgaaaataattttccttgaaagcatatttaaaaaaaatgaatcaatgcactctttcagaaattgaactgtaaaacctaattgatatactcactgagtataaagcaacaacatcatacactcaggaggagtttttaaagccaagtgcacaatccaatgggcttcccaggttgctcagtggtaaagagtctgcctgccaagcaggagactcgggttcagtccctgagttgggaagattccctggagaaggaaatggcaccacactccagtattcttgcctaggaaatcccatggacagaggagcctggtgggctacagcccacagggtcacaaaaaaaaccaacaatccccccacaatccaatacttaaaaaatatgcaagtatagattt

SEQ ID NO: 26496 - DNA, 1192 bp, Bovine  19866880840661
  misc_feature (1)..(1): n is a, c, g, or t
ntttttgactgaatgtagagattatctggggacccttcctatggtgttacatgtatttgggtgaaagaagaatgaaacaaattcaaactaaagcagaaaaactcattttacttcagagattaaatgtagcccttctctgcaaccaaaataaattattgatgcttataatttaaaaattaaagagcaagcaaactgtatttgttgattttttaaataattatgaccctacattacattttaaagccaggatgagtggtcctcagttaataaaaaaaaaaaaaaaaaaagtgaaaggaaagagtattttagaaatgtgtgggatctgaaagaaacattatagtcctttatctaatatctaaattctccttcagcattcagcaggaggcctgaaacagagagagaacaagttgctctgctaatgtttccctaccagaggtcactggctgagaataatctccccaaagtgcttagtaggcgggctttcaaatttgcaacaacagttccaaataaataatatgcaggacataaatattgtcacagcatccaactcttcaaaaatttgattgcactcaccatttctcagccagaagattcctatgggatcaaagatcaaatcatatagaaagaatctgtaagattacagtcttataacattttctcctttttttgaggataaaaaaacaatcaatagatgcgttaaagagtcagggagaattgggctaagtagggaggccaaaataaggagcatgtgtctgtgtaccaacgcagctcttggtgtgtatgtttaaaacacaatcagtgtgccttcacagccaatcagtccctcagtcccaaggttactgccctatgtcttcaacacataattagggattacaactgattcagggctttgatctttctccttcactgctacaacagtttctagcctttcctctgttccagttccattgccctttgccaatggcacttgttttctaaaacacagaaaatacaatcacatcatccccttactagtaaacctgggatggtcaagccaagtacagcaccacctgagcctggcattcaaggctctctgcaaacagcctccatctacagcctcttttcccgtaattatttcctacatattccatgctccagatacagtcaatgagtgcctattcctcagagtcaccatactcttttatcgtggtat

SEQ ID NO: 26497 - DNA, 2023 bp, Bovine  19866880863959
  misc_feature (1)..(1): n is a, c, g, or t
ncaagagtggtaacagctgactctgacagcctattaaatgccaaacagggctcagcagtgctcatctcacctgctgctgctgctgctgctaagtcacttcagtcatgcccaactctgtgcgacctcatagatggcagcccaccaggctctgccatccctgggattctccaggcaagagtactggagtagattgccatttctttctccagtgcatgaaagtgaagagtgaaagtgaagtcgcttagtcatgtccaactctttgcgaccccatgaactgcagctcaccagactcttctgtccatgggatcttccaggcaagagtactggagtgggtgccattgccttctccctcatctcacctaattctgcaaaaatcttattggaggatgattccagttttatcccatcccacagatgaagaaactgagacccagggaagttgagggatggtcccaacaccccatagtaagtgacaaagctgggatgcaggttgaggtcaatctcacttccaagtcttaagggaaatcaggagtgatgttggaactaaaagcttatctccctcctccatgaaatggttttatgctcccttctctttttgtagcaccataatacttttcagggtgagagttgggggtcagcgaagacttttggagggagatatgacctgagctggggctctgaggataagaagcaaggagaacagttccagcagagctgacctccaggagtcagaagtttgtcccagggaggcaagtgagtggcatgggtaagatgagagctctggagccagacagcctgagtttacatctgagctctgccccttattagcagagtgacattgggtacgtcacttaacctctctgattctattcctgtaatatgggggctataaagtactttcctcccagcttattgtaagcatggcatgagttaacatgtctggagctagtggccggcagcacaggttctctctgtttgttctcattacagactctctaggatccaggtatgacctagatgtaaaggagaggaaaacagaattaggaggttcgcctgtgatgcttattacagagaatgattacatgagctcacaaaatgtaatgtgatgctatttaaaaaaagggggtggggcagaaaatcatttaatggaggagcaagagacacgggcttttagcccagaattatcttgtcaagcatggttgtgcttatcagcttttagttatctaaaattgtgagtcaaaacggacttttttatttattgtctacttctttatgacatatttatgggtgttaaaatgtaatagtctatctcaaataaggtgaaaaagcagaggagaataagataaaaggaactacatttgctgtaactctcagttttcccctctccccctttgacgccataaaatgttttcagacaaccctagagaagagataagataaatgctgctgctttcccatttacccacatagcatttatctctcctgtatcaagtcaagttactttattctgagaagtaaattccatagcagaatataagagaagtgcaatagaagtgaacagaaagctcttatccaaggaatccattcatgtgatttacattttgtcttcatattctctggcttttttctactttatcccaacctaacatcctcaattctgttccacagtcaaaccccgtgcctggaccactctttgtgtaggccagttttatctagatgacttgagtaattcccaagaattcatcttattttttaaaaagtaatagcaatttccaatataaattcacacaaaccctctcttactgctattcaaaaacctacaccattacgttgtactagccactcacttggagaaggcaatggcaccccactccagtactcttgcctggaaaatcccatggttggaggagcctggtaggctgcagtccatggggtctcaaagatccggacgtggctgagcaacttcactttcacttttcactttcatgcattggagaacgaaatggtaacccactccagtgtt

SEQ ID NO: 26498 - DNA, 1707 bp, Bovine  19866880864741
  misc_feature (1)..(1): n is a, c, g, or t
nactggcctcacaccattcagtattatgctttcatgtttcctgacattacaaaattataccattctgtacccttttgagaggaacaaatgccaaaacatagaacatggctctagaccctcaaattccacttttagagccactgaaccaaaatctatcctctgaaaattcctaaattggaacgtgctcccccaaaatgtttatctaagaggctggtttccagcttactaggcaatttggcatggaggacttttctcataaacatttacaaatattctgctcagtaatgaagttaatcagtaaaccgcacaacctctggcctctgttactcctcacctagtctcattttcagttgctgtgagtaagctaagaatggtaatgcagtttcaggagttagaaaatccagttcaaatcagtccttgtcacagccacacatcctcaggattcgccatggaagtgatgagcatgaagcccgctaaaggtaagagagtgttcacagctgcttgtggcggagcttctgccaatggactgaggaaacgtgggggacctttgcttgagatttcagcaacagatctccatcaaagatgggctcagtcagaaccagaagactggggtgaaaaactggctggggtgatttttgtagggttcgaggtaggtgagtatctcatagagattaaatctaagtgtgttttccctacaattcttcactggatattgtctcaaagtagcacggttcctccaagttaaacactaggcagctaaagtattaatgccctcagacacttgaaaaaacatttaaagtacattgtttaatgcaatgttttttaaatggcaagtcttatatcctagtgggtcatgacatctattttgtgacttgtgaccagcattaaaaatttagaattgaataagtacagtagaaatatcagagtgcagtcagggataaggatagtgttatttcatggaaattttgtttcagattatttatacatatgtataagtatgtatagggatcatgatttaagatttatttcaaactgtgggttgtggcgagaaaaataaaaagagatccaaaaaatttattgaaatagtttcacaacagttttttcccaatagtcaatgggaaatcagatgagtaaagagttcagcattaagcccagtatgtttgttttctctgaactaaaatacagattataattaaaatatagatagtataaaaaatattgtttgttttcatattttttcaaaatagaagcttaccttttgaatttccagctacagaaactcatcatttttacaataattgtaattttgaacacatttctgattgtagacttcgcagcatgttattttggttaaatgtgttgtttaaaaatgacagactgcatttagaaatggaaagtagatagaaagctggagaagcaaattccccatcatttcaatttaataaatatttattaaagatttaaactgtgtcaggcactgtgtaaggtgccacaaatgaaggaaaaaagggaatataatatacaataattgcaaggagatccaaccagtccatcctaaaggagaccagtccttggtgttcattggaaggactgatgctgaggctgaaactccaatactttggccacctcatgcgaagagttgactcattggaaaaaactctgatgctgggagggattgggggcaggagaagaaggggacgacagagg

SEQ ID NO: 26499 - DNA, 1161 bp, Bovine  19866880914620
  misc_feature (1)..(1): n is a, c, g, or t
nttatcaaatcctagtctttagaatcactaagcaatatcatccaataaagatatgctggtggggtagagagtgttgcagtcggataccacttctgctgcctactggccaggtgacttgcaacactgtaaaaatcctttcaacattaattgagcatctatagtgggtcagccagtgctgaaggtgctgaggataatgtggcaaatcagactagtcttgtgcccaaggaattagagttcagtgaattcagtgaaatgatatatgtacaatgtttgtacgttgagtgtgggcactggacaagtgttaattcttgatgtagttgtcaagtgcatgataacacttcttggtgagaaaacgtcaacacccagtgggaagtttgttctgtttcctgatcagatactaagtgatgttcccacctacatgtaagtacccagtgatgttagtgtttcaaagttggtctcacccactgagtcagaatcaacaatttatagccaaggtgagacttactgaattgactctccctctaaaatcttcttcctaaaacaattggaatgaacactagttaacatgattgtctattggcggtgctggaatagtctccctgaggactgtggttctctagctggcagttattgtatttcattgtattttattttctttaatgaaaggagcatcagcattttctggtttatttgctcgtacaaagcagcgagaattctttaaatgaaacgaatcaaccactgatagatcttaaattttatcttctcaagggtccatgctctgatttcaccagtcaatattcatttctgagcctcagaacttgaaaatatctgtctatggtacttgaattagtgtgtctcaagaaaccaacccctgggaaggtgtttgttttctaacacacatgaggctggattttatactcctggagaagagatattttgtctatccctgcattggagtgcctattgcaggaaaccttgttcagcgaatggaggaagggatataccatggggaaaggggccattcgatatcagtgttgtgagtttaataccatagatctttctttctaaaagttctggtgccatcagagtttctgacagtgaagcgagcaattgaaacacatacatgcgaatgttagatgtattcttacacactcagtttag

SEQ ID NO: 26500 - DNA, 1026 bp, Bovine  19866881017762
  misc_feature (1)..(1): n is a, c, g, or t
ntgagtttgagctgtggtcaggaaataggattcagggccttggtcaaaaaaaaaaaagaaaaaaaaagccttaaaggtttaagcatcaaccaacattttattgatttcaaattaatgggtggcctactgtcagtccctggagtccagtatgtgaatgtgtgtttgtataggcatgcatgtgtgtatgatttggcagtatatgggttctgtctgtatgtgaaaatgaacgtattaattgctcagttgtgtctgactctgcaaccccatggactgtagctcgccaggctcctctgtccatggaattctccaggcaagaatacttgaatgattcccattcccttctccaagggatcttcacaaccagggatcaagcccagatctcctgcattgcagacagatgcccagggaagccccaaacaaaaaagcaggatgtccagtgttctgcataattgaggggtccattttaccatagctattcacctgccccccccaggaaccctcctagtgcaacatactcctcaggtggcaatgccagccctgtctactcatctttgactaccagggagcctctgttcctcagagaatatttctttctattcattttcaagtgacttatttgatatgggcattgttgaatatgcactggatagaagcagaggtatgtgtatggatggatttgcataagtataaatactgtatatgtagccttatttaagtgatataatgatagtattgtgttgccacctcagagtgaaagctaattaattcagctattgagatgataatgatttccttctcagtattaatacaatattaacagaataaaaacaaacaaacaaaaaaccctgcagaattatccttcgactcatcttggaataaggaattttatttctgttaattattgaactatcagtactgatcatgattttagagtgaatcatccttgggaggggctgagaataagtggaaatattaactcaggtaggctaaagtggtcattgagttcaatcatttggtaccagggaa

SEQ ID NO: 26501 - DNA, 883 bp, Bovine  19866881039981
  misc_feature (1)..(1): n is a, c, g, or t
nttctgagagctgagattcttctaaatcagagtcaaggccgtttaattggagcagggtctttccaaggtctcttccaaatggtttgtgctaaatcagagaagttccatccaccatgaactccatgtgacacacgctatccaaacaagtacaaactgataaccagaaagtaggagtccaagctaccagtcactctgtgtcttatcactttaaaaacaaatagtgcttaccacttctgaaatgattcctgggtccttaagttaaggtttacattacatcatagtacaaataaacataaagtaaaataaacattttgtccctgcttccaccagtaccaaagttttaaactttgtatcatcagcctgctttctcttcttcctcctcctgtttgtaaactgtactcaagtcacttcctttccatctttacagaaaccaccctgctttgcacctaatcatctcacttctggaatgcgaatttcctgaattttccttctcttttcactgcttactcccctgtcccgccttctcataagactaatcttcttgaacatagattttattgtgccatcaaaatttccaatagcacctcgttgactacagttaaaagtccccaacattttatagttaggaaatacttcctcctcaaagcctcaagaatctgtgtgtgtgtgtgtgtttgtatgtttaagagtgtgtaagagagaatctctgtatgagtttgcatatctttatagatgaggaaattcttcacgtatataatttcattcattttttaaattatgaaatatttccaacatgaagaacattgaataatatcatcagctttcttgtatttaacccctagcttaaggggagaattaaagatgctttgaaattccctctgta

SEQ ID NO: 26502 - DNA, 1088 bp, Bovine  19866881051129
  misc_feature (1)..(1): n is a, c, g, or t
nttgtttgaagtatatcccaaatcttgattgcaaatatggccatgactgcattaagtcacatgcatgcatacattcacactattttccatggaaaataatttctggtatctctaaaaatggtctcccagagttaaaatggaattgtgaaatgaacccttactcattcccttgtgaaagccaagagagagacttttccgagagagatgggaagcgaggtttcactaggtcttccatggttactgctgctaaggcattaatactggaggacactgtgctgtaaagggaaaccaaatttttaatgtatatgtaaactttaataataccttaactaggaataagaaaaagaaaacatattgtcacttctgaaatagaacccgatttctactacattattttttaaattatttattgaagtatagttgatgtacaatgttgtggtagtttctggcatacagcaaagttattcagtatatatatgtatatattatatgtatatgaaagtgaaaatgaagtcactcagtcctgttcgactctttgagaacccgtggacggtaacctaccaggctcagcagtccatgggattttccaggcaaaaatactggagtgggctgccatttccttctccagggaatcttcctgcattgcattgcagacagacgctttaccgtctgagccatatatacatatacatatatatattatttgtcatattattttccattatggtttattataagatattgagtacagtttcctgtgttatatagtaggactttgtttttttttaatctattttacctactacattatttttaataattacatcatcctctttctggaagctgtcacccaagaatgattcaggcaaatccataggcttaatagtgagaaaggataatttaatgttgcttccattttgcaattaatccttattatccatgaaagaatctcttagatcatgcagtattactatataatgactttaaagcacatttttctttatgcatagaaaggactatcataagtcctcactaacattcaccataaatattaataatattaatttgctggatcttcactaacatgt

SEQ ID NO: 26503 - DNA, 1375 bp, Bovine  19866881172365
  misc_feature (1)..(1): n is a, c, g, or t
nttttggagacattccagaaaaacactgcttctattttataaatgctccagggttgaggctagtcaaacagaaccgaaaaaaccctatttatcagaagagtcccaggaacagcatgcaacccttcccatacaaagaaaacagggatgcctggcttcaaagatccatccttcagccttgaagagaagcagcagaagcaaacacttttaattgcaacatgttcttcttgactatgaaaaactccagaagctgtgcacaatgtttagggaaaatgtgaggggagttatgtaatccagcaaacagggccaagttctagaaaagtgcacagcgtttctgggtgcacaacagtcccattgtgggttattatcagaggcctggctgggtctcttataccttcttcaaaacttcccctgtggaggaggagggaggagggggaagagtaaacactaataaggtaacccttgagtttgtgaacctgataaaacatcctgaacatctcttaaaaccagaaacactttgtaagtctcggatgtttttggccaaatcagccagccagtctcttccagtgtgtgaggatacccaaaccgatgatgtttcctgagatgtaaaaagagcctctagggtcagctgattgcattttatccaaagttttttttttaaatccatgcgaatatcgggttggccaaaaagttcattcaggctttctgtaagatggtatggaaaacctgaatgaacgttttggtgaacctaatagaacccaccgttaacatagagaggcagcagatgtaggaagtcaggtaaaataacactttgaaacaatccatttaattggaatattttgatttttatgaaatctttggatattaaaatgctctcaaaggcaaattgcagagtctaactgaaggaaaattctccatacactgcagattggcaaagcctcagaaaatgaaacattcagttactctactaactgcttattttttaaattgtctcttgatatgaactgacgaatatatatacttttctcattcaggcaaaccatttacctctttctccatttgtaatccttctgctctaatatttctttcaaatacttctctcttttccatctgggggttggattttctgtacacaagaatgtagtcaattcgacattttccgtctctgaagtaaaggccatttaatttgtttttttctggtactgtctgcacacaaagagaaagggaccagtttaagacactcaaccctgagccttgactgagtaatgttaaagaataactcaaactaaatgaatgttccttgtgttttatcaaaattacacttttattaataaaaatgtaaacaagagaacacaaaataaaaatcggaaaaagcatt

SEQ ID NO: 26504 - DNA, 1101 bp, Bovine  19866881271542
  misc_feature (1)..(1): n is a, c, g, or t
ngatgcctctgtgcagaggggctggctaactcccactgtgcctaaaaacaggcctccaagagaaaaaggtctccaggataccctttaacttcatccagacggcatggaaggattagacagagatggctcaggcaccttgatttggaattacaagaaaatggaatgaaaaaaatgagaaaaatgtgacagaactctgaaaaattcaaacaggcacagtattgggtgctgaagacagaaagtgaaggaacagggagttccctggtggtccagtggttaagactctgtgcttccattgcagagggtatgggttcgatcccgggtcaggaaattaacatcccacatgcttggagtacagccaataagtaaataaatagccagaacattaaaaagaaagaaagaaagtgaaggcatttgtgtatctatctctcagggttcacaattcagaaggattattaccctagatctttatttaaaaaaatttttcttttcccagttttattgagatataattatattgatatataattcaccctaggtctttaaataaggaacttcaaactatgaaaggatcatgcttttttagtgtctcaattttttttttttttaaaataccagaaaactgttaaatttcaggatggcaggatgaccaggatagctactgtcttcatccgcctcctaaatgggtacactttttagtttcttactttgaaatatttaaccttgtacatacttacctatgtgtggatgtttatcttgtctagacaagataacaagggctagaggcagtgacctcaccttcactatctcctgcagctctatgatatggagagacacgagccctgcgaactcccaataaatattaactgaatcaaaaaaattactatatgaaattccctctgggtatgagtggaaaaaattcttgcttcagcacaagtgagcagcaaaaggaaatgctgtatcccataacccagtgctaaggaagatctttgggaaacgggagcttggagagcttacagacaaagaaattaaatcccatctttccaagttgggcccagcgggctatgaaaggccgaccggaatcccggatctaacatcaggacc

SEQ ID NO: 26505 - DNA, 1589 bp, Bovine  19866881278726
  misc_feature (1)..(1): n is a, c, g, or t
ngaatagaagtagaatatttgaaaattggtgaaaagaaggtagcattggggaacagaacagaagtcagtaaagaagggaaaaaaagagaaagtatgaaggtagaaactcaatgtaaagtagcagagatagtccaaattatatcagtaatcgcaataaatgtacccagattaaattcacataacatagagacttctaggttgaatgaaacaagcaaaataaggcatttccatgtggcacaccaaagtgggttcatcccatttcttctgagctaagtgtgtttatgtgtgcatctgtattgtatatgtgttttgcaaggtggtggtggtggtgaagggggcaattcagtttatatgctctttgcaaaagatttgggtggcacacacaagtttttgttgggctcagtcgcacaatttttacttttgcatacattcttttacaaggtataattcaatgaattaaaaatttggggggattccatgggggtccaatggctaagactctgcactcccagtgtatggggcccaagctcactccctgattggggaaataagtcccacatgtcacaactaagacccgacatggccatataaagaaatactaaatttttttctctaaaagttcttcacctgaaatgtgcaaaatactaataaaaaggagatcatagtagatattgaaaagggtggtatcaatgagaatgattaagagacaacccaaaatatcagctggtttattcactgtatgagaaataggtcaacgtcaccattttattctaaatgcagcctttaaaatctcagagaaagaaaatttcacacatcactgattattcttttgacaattttagccagaagctcttcattctttcctggggcctgtataaatcaattgtaacaaactgtgcaattatcattcttgcaactgacggcttgtggcagatttaaattccattttgcaagcgagccaaaaactctcctttgcctcctaagctcaaaagccagaaagcagctgaaagatggtcattgctttgttcttgaagggagctaattacagagttgtctgcctgcctgggatgggctctcgcagccagtgtgtgaatagggacaattagagctcatttcaagcagacattatttctaaaaaaagacgcagaaacttcagattttaattactctcataggaattataacattaaacagaacctgaccattttttttctcctcgcaattcagttcaacaaacatgacagttctctgtcacaagaatgttctaattttatcctttctacagatggtttggtaggaacgtgaagtttagtcctcccttctttcctcactagatttattttaatcctacatcacagtcaagtttttaaaaatttgcataatattgaaatattaatgtgtcattttcctacatcttcttagaatcatcatttttacatttaaaaatattcaactaatcaatcatttacgtaaaccctacacagatttttcaagcatttcacttcatgctttggaaacattttcttgcttagacctcccgtctacgttaggagtggtattctcgatttatagttgaggacactgagatg

SEQ ID NO: 26506 - DNA, 1464 bp, Bovine  19866881300771
  misc_feature (1)..(1): n is a, c, g, or t
ncctgtttattcactgttgattcccaagtccccagaacaacagtgggcatggaacatgtgaatgaaggaatatttgtttaaacacatgcacgcacaacaaacatatgcttcagatgcttccatttggaagtgatcaatatttaattttacctcacttttaatggattttcatcaaaataaaataatggtaatgatagaaattttaaaattcagggaggaatatttttctctgtatctaacacaaacattttctgaaaggcaattcagaattgatctctatctggaaagagtatactatatacatattataaaaagagacatgagtcttttccaaatttcctcttctctgtgtcccagtagaaaacctttattatgagtattgaccttagaaagtaattgcctcaagggcagtactgctgatgccattttaagaatgaagggcagggctactgaaacaggccaacactcacaggcaaggaaaagaggaggaataaattaattcctgaatggacttgtcattcacagtcatctggtttgaccagagtttaatttatctcagagagttggtgggcctgcctgaggggtgtcacatgataacaaatagtagagagagagaaggtccgattttgcatccaccataccaaccaccacaagggaaaatttggcaatgtctggagacattttgattttagcaactaagtaagggtggggggtggggggcaggaaactgctatttgcatctaatggatagaagccatggtgctactaatcatcctacaatgcacagggcagttccccacaacaagacgtactcagtcgaaaatgtcagcagtgccgaggttgagaggccctgcagtagagcatgtttaagggcatgggatctgagacctctctgtgcaaatctgaattcctgcttcatcactgtccagctgtctggcaaaccaatttcccttttcctcctgggcacaaaagtagttacattagcactcctcaagttagggctaactacacaacaagttctggtgcgtgaaatgtgggcataagtgctgtccaccacttctaaaactggcttcaaaaacttccttcaaaatcactcatctcttttcgccttccatagaccagatgcaaaggatctaggggatggcagagtcactagacagacagagcctgggtacctgaatgactgtctggagcagagacagcgcccctccatccctgtagtgacccgcagtagaccatgatatgaataacagacagacagacagacagacagacagacagacttctacaatgttaagccactgatgcttggggttgatcaggtaggtggactgtcacctactgcaggcttcttaacctctctgtgcctcaatttcctcatctgcaaaatggtggtgataacaccatctctcccatgaggattaaagtttttaaaatagtgtctggcatctaataagagttttc

SEQ ID NO: 26507 - DNA, 1550 bp, Bovine  19866881308366
  misc_feature (1)..(1): n is a, c, g, or t
nggaagtcatctgtggctttagatggcccactttgagattacagcagacaggaaattcatgtggtcatgatgggagtgaagaagagagagaagtgcacaaagacacttactttgctttaatttgcccactgttccctctaagatactccatcttaaaggcaaggattccatgtggctggtataatcatctttgagggcagagatgttttgttggtttttaacaataagactgagcccagtgcttagcttgtgggattttgagtttgtcacaagagattgtaaatagctgatttccatggctgtgtctgggtagcatcaatcaatttagctccaggatttctcaacctcagcagtactgatgtttggggctggataattctctgttataggaggctgttttgtgtactataggatgtttaacagcacccctacccactagatcccagcagtgctcctacccgcatcccaccaagctatgacaacccaaatgtctccaggcattgtcctgtgtccccaggaataggtgtataaaattgtccctggctgagagctactgagttagactcttagatccaactttatgcagttggttgcagtgtctatgagatagctaaaggaattcaaggcaagctgttctttcatccacctgggctaaataatttaagcactcttaatatcagacttttgaatcataaagatcctatgtctttgaagagataatagggtaaattaagtttgacctttcaagccagacaacaggaatttagatccacttgctacttcatcacttactgagtaaatacccagatgagactcttaagcactctgtgccgcagcttcttcatgtggataaaacgagctagtatattgtagcctgcttagaagagagtccagtgcatatgaagggcccagtgagtggtggttgtgggtgttgataaagacaagagtggtttgagccccaggtcaccttgtgttctgatctcagacattcaaccctgtaccctcttagactgaaagtccctggcctgtgtctagggagagctgtgggggtctgttgggtggcaccccccccactcatcaccagggctcagtccttctgtcacctaccactgccctgaatcagtccctcagaatcagggctacattgtcatgggtccatcttaagattgtttctccaaatggtggggggtgtgggactttctcctctctctctcatcctttctttctctggctctgtttctctcttcctctttctgtctcagtcttcctttcactctgacttgtgagattgctttaaagagtggagggcctacttatttttaccttgactgtttttgcttattcaggaagacagaatttaagcaaaacatttctgttgccaggtcaagatgaccagtacacagttatcctgaactgatttactcaaagaatcattctaaatcaatacatacttacatgactcatgcgtattcctttgcttaagacagaatattaaggggaaaattacccgttatgtaagacacagcgaagaaccaaaatcatgttagaac

SEQ ID NO: 26508 - DNA, 1034 bp, Bovine  19866881314346
  misc_feature (1)..(1): n is a, c, g, or t
nacccctctaggtcatcatagagcaccagactgggctccctgtgttatacagcagctccccaccatctgttttacacgtgatagtgtacagatgtcagtgctgctgtctcagctcagcccaccctcaccttccctggctgtgtccataggtctgttctctactaggttcatcagcactatcttttccccctagattccatatatatgcattaatatatgatacttgtttctctgacttaacttcatctgtgtaagaggctctaggtttacccacctcactgcaactgactcaaattcattcctttttatcaacccaggtttttatagttttctgtttgcaataataggaatatccaagtactcgtctccctaatatggcaagaaatttagaatgacttttgttaattttaacttctccatttttgcacatgattttttcgagaccaccttcctagctaatacccatttttctttgacaaacattcacatcttctctgacttttgtcagctcagttaaacgacaaataacattgtattgactgtaaaaaaccattgattgtaagatgcatcttgattttgatggtgcaaaaagtcatttgctagtatccctcagtttttcagctaatatttttggttgcatatcatgtgctaggtcttatactgaatcctgggattacaaacagaaacaagatgtgcttatgaagggaagatttagatattaaattgctgctatactccctttgaaataattctaagagaatttggggaaataaacaaaatctttttcctaaaactttataggatcctcatgtattttcctgaaccactgccgctcaaataattttgtttctctttgtctttgggtacttttaagttttgcgactcctgcttgcctctggtggtatatattccttgtctttctttgcctttggaatttttaaaaaatgtgtttatttcttactacagcagattggaatgggctctttattttcctccaggtttgtctagactaacaatggtgtgatatagctttt

SEQ ID NO: 26509 - DNA, 1423 bp, Bovine  19866881322320
  misc_feature (1)..(1): n is a, c, g, or t
nttggactctgataccctttcctcaattgaaatttagcacagtcttttctctcaataattctatattaaaagtacatctaattgtatttcaaaatttgcaagtgttggtttgatagcatgtttatgtcagtttttattttaaaccaggggttgaccagttagtaaatatttttgactttgtgagttggtaggcaaaattgaagctattatgtaggtgcttatataactaccattttaaaatgtaaaaaccatttttagcttgtgggccttgcaatagcaggtgatggaccagattatataggttttttagataacactgttgttaggatttaaagtttataaaatgccatctgtgcactcattcatttatttgtccattattcaacaaatattcttaggcccacaagtgtgttagtcgctcagtcatgtccaattctttacgaccccatggactgcagcctgccagattcctctgtccatagaattctccaggcaagacttcccttctccaggggatcttcccaacccagagatcaaactcaggtcttctacattctacaaagatgtattattaactcaatttacaaccaagatgctgagactctggtcaggtaactcgttaaacttactcagctaacaagtgaaagaaaaataattatgtgttaacttttatccccttgatttgacagtagaatccattagttagagattcacttacatttgtcacagaattaaatatggaaagtaagtcaagtatctagactaatagtttgcttctagtttgttaactttctctgagctgctgcagctctgtatacatgtatattaaatatagtctatgattcattatttaaataaacattggaatcctgacttttaaccagttgcaccgattggttgatgttttctctaggtgtggtttggagaagacctgcctctaagtccacggagtcctctgacccccagacacgggccaggtttggctgatgtttgtcagtatgatgagtggatagctgtgaggcatgaggccaccctgttgcccatgcaagaagacctgtcaatctggttaaatggtttattaggtaaggctttcaaagatactcaaaattatgttgtcttacccagtaaatgtttattgagaatcttactctttgtcaaggaatcattgttccagaggttggggatcctctagtgaaggaaatatttgatgtccttattttcaccaaacttacattctattttacagaagacgttctggttcactctgacccccagggcttgaatagtaagcaagtttgaggcttaatggtagaggtcaagtagtaaaagctgtgaataatcaatgttttcatttttaatattaaaaaaaaatttaagtgtattggtctaatttgggagtctatatttcatgatttttttcctc

SEQ ID NO: 26510 - DNA, 1042 bp, Bovine  19866881379761
  misc_feature (1)..(1): n is a, c, g, or t
ntcaaagagaataaatgaggcattaaaaccagtgctgggaaaatcagaaacctttacagcaacatgaacacctaccggtcttaaatacaaacctatccataagtagatgcgtgttagtttttataatgcacaaaaggaaattcttaatagcaccactggggctgctgatccatgctcaactaagtgatactcacataaatggagcaaattctcttttccatatccaaactatttcacagtttggaaaaaaacttcttccttatgatctaaaaggaatatcccccaaagaaaccctttaaaattcattgtatcatcagagctatttttccagaatgtgaaaaatgtgaattggaatattgtatataagacattggtttaactgtgattcatgttcccaggtaacccatctttttgacaatggagccactgttttctttgctgttttcatggcagtctggggtaagtgttctacatttgtatgacttgagttcccatcatttgctctattatatgttcctttaaaatctgattttgaatatgagaggaagaagcaaagtgaattcagtttggctgttctgttagacacaagttaataaataattcatttggtttatttttaaggtgatgttttacaggacaacatgtcttctttctcttaagccttccaacaatttcatcagcattccattattggagtaaaattcaccttctgttggagacaaaagtaaagattatagtataccaaaaggtctgatggttaagacctgattacacatctcagtgtatatgggactttctaatgtgagtggaatattttcatctgactagtgtgtgaatactcacctctaggattcttccagttctggtcagaatgactccttatacacaagagctacttgcaatgctgaattgagtccttttaaatagtttcaagccaatagccataaaataacaaggtatgatggaatgttcactgaaagaattatttagcccaaaggagttacttcacccacgtttgggtttaatagtatcttcctcagta

SEQ ID NO: 26511 - DNA, 778 bp, Bovine  19866881380956
  misc_feature (1)..(1): n is a, c, g, or t
ntggatataccagtcgaaatgtttgcttgtaacttgggaaataattccattaaagcctcttccgaaagtggccccctgaagccacataaggataatctctgataatagagatcagccaacagcaacacagacggctccaaaggaaacgttctgcaacgagatatttattagaccccaagtgtgccacacaccccaaagaagtcaggctatactaaaaaccacagaagattatcactgacggaaatataagacagaacaggtaaaaattatatgtggacatttagcatcacttaagacatgaagaatctgaggctcagcaatagtgagtcacaagctcaaggacacacagccaagtggaggcagagataggattataatactgtattgtgactaaagtccaatgctgtcttttcagcaataaatgacaatgacatatgagaggatatgtaatatttgtggggtgttttccatgtgctaggcactgagttacgagggaagaggtacagagcaggggctgccacaccagctctggggtagggtagtcagcccatccccatcagagatggaaccccgaataaaccacttaaccactgtgtactatcctccaacaaatatgtattgagtgtctaccatgtaccagtgacttttcctagatatagcaggaaaccatggaaaaagtccctttttctaatagcagaatgtagcccacaagtaaataattaatgacagtggtgaggatggtggacaaaaacaaattggggaaaggaggctggactga

SEQ ID NO: 26512 - DNA, 1610 bp, Bovine  19866881533560
  misc_feature (1)..(1): n is a, c, g, or t
nctgtattttgttttaccctattgatgctatataaatctgggtctcagcaggaaacagatggaacactcaaattagaataatttgaagaatgtaataaagggaccatttgcaaaggtgtgggcagggtgtaaggaaaccagaggggcagtgtggcactctggggctagaacgcagctgtgtttacctcctgtcatcctggagggggtcgggggaggagggagccactggcagagttggctgggagcacacagccggctgctgctgctcctacggggaagcagctggagtattaataccctaccatctctctcctttaaccctcctgcattccattggtgcctgccatgggcagacccccagaagccacagggcagaggagctcacgaatatgatcttttccagccagcacatgtggcaggatgaagagatggtctgcagtggcagggggagagccccagcacagctgcaccgtttttacccctcagtaaatgcgcttatcttttgtctaagtaaaaagttcttgttcccttcacacgggacggaggaagtgccatcagctagggctcattgttggataaggtcacttcagtgatactcccttctcaacctagtgaagaagtgaagtgaagtcactcagttgtgtctgactctgcgaccccatggactgtagcctaccaggctcctctgtccatgggattttccaggcaatagtactggagtggattgccatttccttctcaacctaggaacaagggataaaagaacaatgaaagcatagcggttgcagttctggactctgaagcgcaggctgttttctccatccccactctgtgctcccttactgtctacagcttctcagcaaaggggctggaagcagtgaaacaaaccttttattccttctgagtctcagtcctggcagccccttcttcactacgtcgtttcagtgttgccaggttccaagcccagtcgtccatgctgttttagcagctcggtttcaccctgggaaatggaattaatcagtgagtcctcctctgtctgttggtcaatcatttgaccaacccaagctacccaggggtgaactcagcttccaaagctatgaaattctcgctgtgtttcctgatggaagcatttctcccttaggcactgggacttccatggtcaggtggtcaaggtcatgggagtgagaagcaaagattctgcaagtgggttactaggtatccaggttacagtgaagatcggaacactctcttcttgtttttggacccaggcattctggttgaggaggaggtaaattataaaaaatgctgttgactgttgacacgggaaacttggtgagaccggagaatccctggacgagcgtgcagtgctgtacttcccttgtctggacagaggcaacattaaatgagaccccacggcatgtgggcaggcccactaatagtggtgctggcaggagtgccccagtgccccagacaagaatctttcagagagatctgatgctggtagtaaaggtatactgttctatccccacactggaagcaagccgattcccatttactttatggttaggatgggggaaatagcatttgcctagtcagtcgctgtgtaccag

SEQ ID NO: 26513 - DNA, 1704 bp, Bovine  19866881828985
  misc_feature (1)..(1): n is a, c, g, or t
ngtacctgactgactgtttggaataagcctccagtccactcaatccaacccatactcagctagtaacccaagagagaaataaaccatttgctgatatttgagatttaatttaataccacagtaaccctagggaaataaattagttctagagaacttataaagatataattaaaagggacttcagcatccattaatggcagactaggtagttcagaccaactccacactagaaaagacaacaaaaaatgtttttaatgtctgctcaaaaaagcattgtggaaccatcatggcagtgaaaaatcacctggccaccatctggccatctgggagaagatgaaagtccagagaagtaagcctgacatttaaggtcacttttctcctgggagcatttgctaattataacaaagccagtatttgatatctgagtagtttgataacctggtatagacataaaagttggatgctggggaaaacacagtatgtaggatgggaccctgaagtactgtattccagaaacaagagtaaattgaaataaaaagagtctccacactgcctgtagcccaaacttcagataatctgggtggcccagaatatctcaggcctttcaaatggattaaagagattccagattgctaatgccttcaggctcttgaaagaagcaaatgaaaatcctttctggagaaaaaggaagcaaacaaacacagacacacacattattttaagcctaaaataaatgaacattttttctaaaaaattctacaagcaattttccaatataattttggatacaatcaaagaaaacgaagcgcagactgagatgagatactgtgaacaagagtcagcaaaaccagtagaaaaatagacacagaattacatggtctccagatagtgacactgatcagactttaaaataattagctccttgaattccaggaaataaaatacagtgttgaaaatttcagcaaagaattggaaatattttatttaaggatatagcaggattgaaaaagaaccactaaatgttctaaaattgaaaacacaataactgaaattaagaacacaatgagtggagttttactagactgaaccttgtagagagagaaatgaagaacttaaaaataagtcagaagatatccagaataacacagatagaggcaaaaagcctggaaaatacagaagtgatggtcagaatgctacccgcagactagcatccgttctgggttctcagaaagagcctacagaaaaaaggggccaaaagcagtatagtaagagagaatggctgaaaaatttccaagagtgatgtaagacattgagctccagattgaaaataaaattaagtggacttggcagggaagagagaaaaggctactttcttaaaagtcaaagatgactcaaagatttatttccagtgaaagggtgatgtaattaactgagataagaaacaaggagggaggaaaaggtctgttgggctcagaaggaatcagtgtgaaatagaaatagtaggttccaatttttactttgaatttaacacccaggcagggataataaatgtgtccttatttcttaaacaattactatttttcttgttacgttcatgttccaaaactttcattgtttaaaaaggaccagtcaaactttctcatctcaagaatctagcacctcaggtctccttcccttcttgctagaatccatagtttgcctcta

SEQ ID NO: 26514 - DNA, 492 bp, Bovine  19866882017441
  misc_feature (1)..(1): n is a, c, g, or t
naatgacactattagttccctttattagttttgactagattagtctaaaacactgatgtttttaaaggtgcaaaaaaaaaaaattttaccttgcatttctgcaccagatactaattagtttcagtagaggagtaggagaatagtgactttcagatccaagcgtgctgatctagatacaaaataaaaacaatacaagataagaacatatacagacttgaaggaaaaaatcaaacaactgaaaagcagaacaagaacagaagccacacgaggacataagagccaagagatagagattaatatttaaaggataaactgaacagtgagcaactgtgcctaagatcaagtctctgctacagtcttagctataactacaccagttatcatcaccaagtggggacaaccagagaaatcaaacaaggaaacatgcaacaacaatcccggtgtatttttttctcacgcttgtcaaaatccagaggcatatcatgtgaggtg

SEQ ID NO: 26515 - DNA, 2116 bp, Bovine  19866880516234
  misc_feature (1)..(1): n is a, c, g, or t
nctgaatgttgagctttaagccactttttcctctccactttcactttcatcaagaggcttttgagttcctcttcactttgtgccataaggatggtgtcatctgcatatctgaggttattgatatttctcccagcaaaccactggttatagtctcccagattaacatgaattgagaaaaaatgtgaagatctcaacctgtacaacccaatcttcttctcttccttttatcaagcaccatatgtattcattctccagacactttaattgccttccaattgtaaaatctactcgaactcttcccacactctctctagacttttgttactttacctgcaggaaatcctctgtcgtccctttctcctcctgtcctcaatctttcctgcatcaaggttttctcaaataagtcatctcttcacatcaggtggcaaaagtattggagtttcaacttcaacacttattaaaaaggtttttaaaaattaaaactaaacatgcaataattagtgttcttaatataagtggcatgatgtcatctaaattattttttaattcagtttgatacatttttctgtagaatttttagttctattaatacatggaaggaatctttcaacactatactgctcaatattttctctctcatagcaggataagttggtttgtagagaatcacttctgatcctaggctcagttcagttagtcagttcagtcactcagtcaagtctgactctttgcgaccccatgaacctgcagcacaccaggcctccctgtccatcaccaactcccggagtccacccaaacccatgtccattgaattggtgatgccatccaaccatctcatcctctgtcaaagtattggagtttcagcttcaacatcagtccttccaatgaacacccaggactttccacatacctgaattaagttgtgctgaaagcatccatctacctttacaactggacatcagttggaggatactaaagcagagtatcatgtttatacaccacttgcttctttatcaaaatcttatctgattttcaattttttaaacatttgaaggtggaaatattaaaataagtaaataatattaaaacaagtaacattatcctaactatgctccaattgattctacttaataccagaaacttaaatacaaatatagtgtattatttttatattgttgtcataacaaattagcacacaattagtggcttgaaacaacatgaatttattatcttatgtgtctgaaagtaagatgctcaaaatgaggtcactggggtaaaatcaagatattggcaggattgtgtttcttttggaagctctaggggaaaaattgtttacttgccttttccagtatccaaagactgtgcacatttcttggttcatgatcctgcctcattccaacctctttccattttgacaactcatttgctgaccgtaaccttcttacttcttcttataagcacaactgtagttatatttaggcctactaggataaccagatttcttaatctcaaaataatgaacttaattgcatcagcaaaaccccatattgcatataaggtaagatattcaaatgttctggaaattaaggtatagacctatttggaacaccactattaggtctattagacagagtgaagtctctgatgtctcgcagtatagaaactactctattttttcagccattgtttatcaaacagaaattttatcccctggttaaaattatgttttcaaagaaattgttttctggaatgttttgggaagcaaaattttaaaagaatcaatatgtttaaagtaacttaaaaaaagtaaaattagctaaaagtacatgaaatgatacacagtaaaaaacttaaattatgtgttacatgagtgcactttataattaatgaataggcagttaaacagaattgcttaaacactggtgatacaaaaacaagtaacatctcttcaaagacaagctaaacaaagtaataaaaataacagggataggtacaaagtatgtatgactttgagacaagtaaaactgttgaaggaggtcagcaagtgattctatcaggcaaagtttcatgtgggaaatcctactgactttggttacaaagaaatcaatacaaattt

SEQ ID NO: 26516 - DNA, 2065 bp, Bovine  19866880577862
  misc_feature (1)..(1): n is a, c, g, or t
nattacagagatatgagcctcttttatgtacatacagagttcacttgctatagtgctgttcagtgttaaaaacaaagttcagtcagttaattcattatatactatgctttagtggaaagatttcaaataaggagttttcaggtatggttttgcaaacacagtcaaagttttaaaaatgcccttgccacttcttttacccctcagattatgtgaattgaagaaatttttatttttatttctacagttttgtagcagcttcaatataagatgcaaaagagcaatcatgcatttgaaattttccctcataactctatttctctttaaaaaaaaaaaagcagattagctgcttttttccccaataaatgagcacataaatataaaagaaccaaaagggaaacactactttgcttttataccaccatctgctacatatcagattctatgtgttgtgttaactgaggcaaaccatatactgctgaattgagcaatatttttccaccgtctttaataaaacctcactcaatttactgattttattcaaattatgtagaaaataatgttttacaaatataaacttatatataaatatactcaacaatttctctgtgaatgaagataacttaaaaagaaaaaaactatgagaaatatggtgggttatttcctgttacaagatagtacaatattaatacatataaaatttagattttatgattatttgaaagaaaacaaaagtctttaaaatactatgtcaacattttactttgtcttgattattatgaaatgagaatttaataatggtagtcaggagtttatagctaaaatttaattaatatgtaattttgagcatttaatgtaaatgcaaagtctgtcattagtgtgatgtgaagatttcaaatttgaatgcaaatatacacataatagacataagaggggcagattgtttctaaaaagctgtacattttattataattgcttaaaaggaattaatggcatttatgaacccattgtgggcaatgttggagagtgatataaacaaatcagcttcttattcttgaaaactgcatatttgtgaagcagaatgcatgtgcaggaaaaaaaaaaaaaaaagacttaccaaatagaacaaagtatggcaaaataaagaacttctcaaaagcttcaattatgtgcaagaaaatactcagaaagaacgtagtggatataagtttactttaggctttctgtctcaccaaagtttttccttcttatagagtttagatacattaaaaaaaatgatttgagccataactcattcttttccatttcctgtattctgaaaataacagagaaatataaagaatatgtagggccctggctctggtatttggtttagttgtcctgaggaaatcaactaaatctcgttccttacatgtaccttaccttttttatacattatgtgtgaaaaagactgaggctgattttgttatacggtattggatcatgcaatcatggagaagtcctaaaatccaccatctccaagctggagacgtaggaaaactagggatgtagttcaaaggcctaagagccagatggtactgatttctatctgagcctgagaaacaggaaccttggaagaaagagaatatcaatgttccactcaggcagaaacagagtgaatccttcttgctcttgctttaccttaggtcctcagtggattggataatgcccaactacaccagttaaggtaatctgttttactctgtctactgattcaaatgtgaatcttctccagaaataccttcccagacacacccagaaataaagttaaatcaggcatctgagatccagtcaagaacatatacacacacaggaggactacccatggtaattacagtcctgattgtggtaacttggatgcagtaataggacatggtcaagcaggagatggcaaaattgaatatcgtcatcttaggaaatagtgaactaaaatggaagggaatgaaagcaaaagtgttaagttgttcagtcatgtccaatgcttttgggatcccatgggactgtagcccaccaggctccctctgtccat

SEQ ID NO: 26517 - DNA, 759 bp, Bovine  19866880652053
  misc_feature (1)..(1): n is a, c, g, or t
nctatgtatttatttttgtgactgtagatactcgcttgctttgtacaaacaataataggtaatctaatatacaggtaaaaattatattttgaaactttaacatggaactcagtgagaaatatttatgcttatactgaaaaattagaaaagaacacactgaaaagtttttcagaacagtttactttccaaaacatgaagtgccttttgagtttaggaaaaactttgaaactatatacacaaagaaaaacaagaatgaaggacaagaactttgaagtttgtaaacactattttacattttcaaatttggtactcggtttttaagtaactaaacataaatggtaagaataatagattatatcactataaaaatcaattctctattttcctggaaataaccacttttttttttcttcttttgttaggtaaacctatcactgtcattaagatatgacacctgtgtaatttgttaagataatttatattgacaaatatcatttatcaagtgactgtggctttttgaatatattgaaatatgtaaaaagcaatgccttttaatactgttgacagcagataattttgtacatgtttcaattgaatgctcacaaaaatcatgccatttttatcccaagtgaaaagatgagaccatttggcaagtacagaaattgcaattattaaatgatagacttaatcacttaaaaaagagatatttagggccaatagcatacctaaatatgggttaacaaagtaaaactataaaat

SEQ ID NO: 26518 - DNA, 1390 bp, Bovine  19866880758895
  misc_feature (1)..(1): n is a, c, g, or t
natagcttttcttccaagaagcaaatgtcttttcatttcatggttgcagtcaccatccacagtgattttggggcacaagaaaaataaaatctgtcactgtttccattgcttccccatctatttgccatgaagtgatggcacaagatgccatgatcttagtcttttgaaagttgagttttaaaccagatctttcattctcttctttccttctcctcaagaggctctttagtttctcttcaccttctgtcattagaatagtatcatctgcatatctgaagctgatacttctctcagccttcttgattacagcttgtgattcctccaccccagaatttcacatgatgtactctgcatataagttaaataagcatggtgacaatatacaaccttgtcatactcctttctcaattttgtaccagtctgttgttccatgtcctgttctaactgttgtttcttgatcctatagaggtttctcaggaaacagataagatgttctgttactcccatctctttaagaatttttgacagtttgttgtttttctgaattttatgtaaaattattagcaaaagactttaaataatctatttagtgttttgtttcctagcacaatgttcaatacatttctaccaaattagtaattctaaaaaagaatgtgtgctgaaaacttaaacataattttcttggtttgttttttactttcctataagcacttatgattaatgtttgagcaaatatgcttttgaatttgcaaatacaaaaatttctactttagaagtaagatattcaaggacaagttctaccagcatatcattgctaacaaataatatttacatatttggaatcttgagaatttttttagaattaatcacatcatgattgtaaatcaccttgaaaacagatagagctacgttaaaattaaaataaggctaataatctattatgtctctactaaaatgtttgctcctatgataatgggtgccagtattttctgacagctcttccagaaattattggttttttctccatcttttttgttcttttagaatcctgctatatatacctcaaactattttctcactcatcagcaaaaatatttaaatacaaagagtagaaatgctaatgtaagcagtggaaaaatttgactgttttcttctcaaatctctatgatttaatatgaagtttacagtatgtggttataattcttcctctcatacaagctttcataaataaaaaaaggtatattttcctttgatctgaaaaaggaaaaataagaaatggtttatcttcttgaacagactttttttcctccaagaaattaacatagctgtggatttgcttcagttgaataacctgcttttaatgcacaaaatcagacaggaaggtattagg

SEQ ID NO: 26519 - DNA, 885 bp, Bovine  19866880813722
  misc_feature (1)..(1): n is a, c, g, or t
ntacaggcaattcactgaaagtttgcaaaggcagaaaggagtctcactcttttacatagtcaagcagagacaacaaattatatgcatattttcaaaataagtaataactgtcctaaagtaagagggcttggcagcaccatttgtcatgtatagttcatcctaaatttacctggttattggagtgaccattcatgctagtgtattagctttatccagagaaaaaataaaattctcacatctttatgaaaggaggtactttggcaatttgaagcaaggttccaactgaagttaggctcccagccttcccaaactgtgatataagggtacctactttccttgatgtttatatttctaagagatagttcccaagtccttgagaaagaagtccctcagtcataaagctaattttcaaaagaatttatatacatttcacgaagatgagaaagtacttatgtgttttctgatttaaaatgatctctttattttcaacagggaaaattaaaatttgtatttgttcttacacatttttgcatttttatttctgttgggcttagacaagtatccaaacttcccaaacctgtgcatatacaaacacatattgttgcaatttaaaatttatattaaaaagtatctaaaattcagataaattagaaagcccaagagaggctttagttatatggatattcttttcaagaatttttgcagcccagtttttaaacccatttttgcagattgcttgcaaaagaagatcagagtgaataaataaagcctgaaggttaattgctcacttccctcttgacttgtggcttctcttccacatcaagatcacccttgatgtcatcaagagttccacaagctgctcagatactaagcaaaggcctagaa

SEQ ID NO: 26520 - DNA, 1499 bp, Bovine  19866880908180
  misc_feature (1)..(1): n is a, c, g, or t
nctgataacatgtatctattgctgtttttcatattctagccacaactggctgtactgatactcttatttatgttccataatattttatttcattagaccagactgattgaattatttaatttgttccctgcagtaatagacaataaaatagatttttctacttctggaaaggaatatattatatttacgactaaaatcccagaacctatgacagtgtctagataagtcaggtgatcaggagatactttctgaatggataaagaaaggagtaaacagaaactgttgaaataataatctgaaactaaaattcattgaaaagttcttagatcttgaaatacttttaacattcagagtttcttcttattcaattcaaaaaagactgcttaatattgatataggtaatgttattatattaatttataaaaagctcaaattataatgggaaaatcactaagcatgtgtaagcataataagtgacaaatgacacactttaaaattctacagaactattaaagattttacttgcatgatatgtttaaacatattttaaatgtctcagaggactgccgaaaaacagtgtactctattcacatttaagcaaatgttttgacaatccccagagctaaagatataatatgagaagggcatgagccatttctagaagtggaagataatgataaaaccagattttattccctgttttcttcttgacatctcaaccagtaaaatattacagatcgttggtaatggtttgaatttaaattataggacttttttgctccaggcatgaagacttttatttgtttctccaattctaactctactttcccttacatctaaacacttgtatacgattctgtgagaaaactctcccttgatccttttgctaatttaactgtactcttcctctagatgtcagggcaaatatagccgactaaggaaaaactccctgatctctatcagctctccatgatttaagcactcataacaacataaaatattcatagcatatatcacagtttctgaatatatatttacccacttacatgtacaatcagtatctctcttccacaagctttaagtaatgtgtgaacagagatgatgctgtaggcagaataatgatccccaaagatgtccacatttgcatgttatattacatgacatagaggaattatatttgctgttagaattatgatgcaaatagcagaccttgaaactgtgagactttcccaaattttcagcgagggtgttgtataatcacatatatccttacagacaaaaggagttgggagactcaatgtcaaaataattcagtgtaagaagactatatcagtaattagtggtttgaagataggaagtgtccataagtccaggaatatgggtagtctttagaagatggacaacccaagaaagtgggttctcctctagagtttcagagcatgtagctccctcaacaacttgattgaagcctaaggatgtcacacttctatagaattgta

SEQ ID NO: 26521 - DNA, 3314 bp, Bovine  19866881185110
  misc_feature (1)..(1): n is a, c, g, or t
natttggatattgattttattttcccaactgtactgtcctcatgcaaatttcatatcattttatgaatttgctgaggctgttcacttagctgagcataatgccctccttttttattttaaaatactatctactccatgaagcccttccctgcaaggaactatagtagatgctaagttcacacagaacatgaattagataatactagctaaatgattgcaaacttcatcaaaactttctaaatctctcttaacttctcagaaaaatggtaattcagcctcaatcaaagaactataatgagtaagcaagataatactcaggcagatctagcatccatcagaaggacttaaaatctatgacatatatatatagattaaaaaataaagtggccttgcatcagttttaattctttatttttgtgcataagtacatatatgaaaatggttttaatgtatacatttataatagaaatcattacttaagaaaaatactttatgctaaacattctttgcaatatcacccttcaaagctaagaagattagaattattagaaattccttggaaacttgcatttatatttagaaaggagaaacatttgagtgtgaaaagcaagagactacagggaatatgatttactttccatatcttgaggagtatagtaagtcttacaaccaaacaaaatattcagtcttttgtgatcacaagtatcacccactcctgtattcttgcctggagaaccctacaaatagtatgaaaaggcaaaaaagatatgatgacaggagacaagcgcccagggtcggaaggtgtccaatatgctactggggaagagtaaagggcacttactaatagctccaatgagaatacagcagcaggaccgaaatgggaatgacactcaggtgtagaaagtctgttggtgaatttaaagtctgactgcataggcccttgaaatatgaagtccatgaatcgaggtaagctgaatgtggttgagtaagacatggcaagagagaacatcaaacatcttaagaatcagtgggctaaaattggctggatgggcaaatttatcttttataggttattggaatgccacagtagaaagttaagagataccttgagtaacaggcaagtttggccttagagtacaaaatgaagcagcacaaaggctaacagttttgtcaagagaacacactggtacagtaaacatcttccaacaacacaagagacaactctacacaaggacatcatcagatggccaataccaaaatcaggttgattatgttccttgcagcctaagatggagatactctatacagttatcaaaaacaagacttggagctgtttgtggctcagatcatcagttccttattgcaaaattcaggtttaactgaagaaagtagggaaaaccactaggccattcaggtatgacctaaatcaaatcctttatgtttatacagtggaggtgacaaatagattcaaggggctagatatagtagactgagtgcctgaagaactatggatggatgttcataacgttgtacaggaggaagtaaccaaaatcatccacaagaaaaagaaatgctagagggcaaagtggttgtctaaggaggattcacaaatagctgaggaaaaaagaaaagtgaaaggcaagggagaaagggaaacacatacccagttgaatgcagagttctagggaatagcaaggagagaaaagaaagacttcttaaatgaacaatgaaaagaaatagaggaaaacaatagaatgggtaaaactagagatcttttcaagaaaattggaaatatcaacggaatatttcctgcaaagatggacaccataaaggacagaagcagtaaggacctaacaaaagcagaagagattaagaagagttggcaggaatacacagaagaactatacaaaaaaggtcctggtgaccataatgatgtggtcactcacctggagcaagacattctggagtatgaagtcaaatgagccttaggaagctttactatgagctaagttagtagaagtgatggcattccagctgagctatttcaaatcctaaagatgatgctgttaaagtgcaatcatcaacattcaatatgtcagtaaatttggaaaactcaacaatggccaaagactggaaaagttttcacttaaatccaaagaagtaagtgaaagaaagtgaaagtcactcagttgtgtccaactctttgcgaccccatggactgtatagtccatggcgttgtccaggccagaatactggagttggtagactttcccttgtcctggggatcttcctaatccagggaccaaacccaggtctaccacactgcaggtggattctttaccagctgaggcaccaggaaagcccaagaatactggagtgggtagcttatctcttctccagtggatcttcctgacccagggattgaactgggatctcctgcttttcaggaggattctttaccagctgagctataagggaagccctttattgggcagggccaagtaatgtccatgatactgtacaattacaatcatatcacatgctagtaaggttatgctcaaaatcctccaagctaagcctcagcagtacatgaactgcaaactttcagatgtacaatctgggtttagaaaaggcagagggacatgagatcaaatgaccaacactgttggatcattcagaaggcaagagaattccagaaaaatatctattctgctggcttgaaagtcaacattaaatatataaataaataaataaataaatatatatatatatatatatgtatatatatatatgtatatgtatatcatgacatctagtctcatcactttatggaaaatataatgggaaaaagtgtcagattttatttttttggactccaaaatcactgtaggtggtgactgtagcttccttatagctttaactataggggcctttgtgggaaaaatgatgtctctgctttttaatatgccatctagttttgttatggccttcccaggaggttcattgttcaagaatgtgcctgccaatgcaggagaggcaaattcaatcaagaaattgagaaggtccccaggagaaggaaatggcaacccactcccatattcttgcctgagaaatcccatggagagagaagactggcgggctacagtccatagggtctcaaagtgacttagcatgcaatgggactggatgccatgatcttagttttttttttttattttttttaatgtttagtttcatgccagctttttcactctcctctttcaccttggtgaatctaatgctattagcatagactgttattttttcttttattt

SEQ ID NO: 26522 - DNA, 798 bp, Bovine  19866881193964
  misc_feature (1)..(1): n is a, c, g, or t
nggctcttttagctgtaaattttatcatgccattaaaaataaaaaatattcccagcacaaaagttttacctttgttgcacacctactgaaaattcagattatcagtaacaggattgatgttgtattacaggtatattgatttaatattttcattttatgcaatatgcatttggatgtgttcttcaatccactatcacactgctgcttttaaaataattaatagctgtgaatcagtttcttagacaatggacatcaactaagagttagtacattttaaaatcatgaaataacaaacaactaaccttcccttaaaaaatcagtttgtgacttaatatgtcgttgacacaacaacaaagaaagcatattgttacctacatactttttgatatgaaatgtgttaataaaataggatatttttatggtttatttagaattccttttgcagttagcaactcttccgtttgatttcttccctttagactttaaaagaataattacagaatgcatttaaaggattttcatcaaggtgtcctttgaaagtaaaaataaaaaccaattcaaaatttgtcaaaatggttttctacaaattgattctgtaatcctgtagctctattctatactgtttctctcttttcaaaggtcttctctaggctaccttgcagcatgctttatggatcagtgactctgctgattgtttttcctcaccaaggtcattagtgagaccctttttctcagtctccaattttcacatagactttcatctgtcttgtaaatcataatcttaataactgtgtattt

SEQ ID NO: 26523 - DNA, 1723 bp, Bovine  19866881235104
  misc_feature (1)..(1): n is a, c, g, or t
nactctctgttaatttttaaagataaaatgtgtgaaattgaggtcagtaatttcaaacctattttaggcaattaagacaaagcttttatgttgttatgttgaccatggaaactttataataaaaagaaaaacacattgaaacttgatctagataaaagagaataaaaaacttagcaaaaatgaactcacatatataaaaaataaaataaaaaataactttttacatgagggaactaatacttagaacatctaaatatatacatggtatattatatagtgattcatttaatgctgttaaatagaaactgagttttattcttttgttaattaattggctaattcatttcttgatatatagtcctccattgtgatatactatcctagacacataggttaaattatatatacatttttaaaattttgctcaatatctcctctgataatatgactgaatttcaagcagaaattttggtccatgcatactttaggttgtggacttgtcactaatattcattattaaaataataataataaaattaaaaaaaaaactaaaggaaatgcaatgaattattttcttaaaggagacagctaaaaaatatatttattttatctctaaaaataaaaaaaaaagaatcttaactttaaaatttagattattaaatattctctggaaagaagttaaggtggagagatttaacttttgcggtatattctacttttgtctgagaagagtaaatgacaacatagatgttcttataatattgttacatatcttttaaaattcaagcatttctcattgtactgtaagtaatttatcataataatcatgattataattggaatgatcttgcttgcaactcacactattattttataactttgtactgaattcatctcttaagtctagtaaagtaataaggatgttgaaatgaagtgaaagtcactcagtcatgtccgatgctttgctaccccacagactatatagtccatggaattctccatactggagatgggtagcctttcccttctccaggggatcttcccaacccggagatcaaacccaggtctcttgcattgcaggtgtattatttaccagctgggccaacagggaagcctataagggtgttatgaatgtataattccttctcctatattctttgcctctttcttttactctttttccacaatacttctctcctttcctttctcattgtctgtttttaaactggatgatatcaattggctcttttgagtctccctgcaactaaagtatcctctgcaaataacatctcaggcatctctgttccttttgggcatcgtatctatgtggatacctggaggctcagtttaagattattcttcttgaagcacagtaagaatattatctgaaagtcaaagtgcatcaaattcaactgactataaagtaaagatttcaactttctttacttgtacaataacttagcaacctaacagtcaatgattatatgtccaaataacattcacatgtagcaagttacttgacagcagaaacaacacataaatatttcagcaccttggaataagtccaacttataacattaaattgtgcctgcttaaaatctttcccaaagtatatcgtttccaattctttacccaaatctggcagtgtctgcagtggtttaatgaggtgaagagttacacatagaatttcatctatgtcaagggaatctaagcatttcaatta

SEQ ID NO: 26524 - DNA, 1095 bp, Bovine  19866881335541
  misc_feature (1)..(1): n is a, c, g, or t
nttcctggttcattgctggccatgttttctgtgtgtttccacaatggagaaggatcaagggagctctctggggtctgttttataaagatattaatatcattcatgaagacttatgaccttacatataatatcataatcttgaggatgaggattcatccagtgaattatggggagacataaaccttcagtctatagcatcatttcatatcttcttgctatctttgattattttagcacatacaagtcataagtagcttgatactaaaatgataaatataagcccattcttgtgaaaaattttaatgtatatggatgatgccacttttataattttattttcagtaaactgatagaggtgttattatctgttcttagatcctaatgcaaagtcagttttagagtctcatagctaaacgtagctaattttagaagagtgacacatcacacaaaataattgtgcccaaaagactaaatttaagttaatgctgcaagagagttgaaggtttcaagagttccaactttcaaaacactttctatagtaactttaggcttttggcactaatatcaacaagtagtttggtgaagaaatattttcagtctaagctcaataaaagtggatctaaatcaatgtgtatactttgctaaatttagcatattaaatcacttttggatttagaaagttgtatttaaactctcaatttcagagaaacttttcttttacctttaaatttataaaatcatgaaaatatagactaaaatgtaagtaagtaaaaataaaaccatttttcccactctaataagtggcagagctcttatactgaaagttgtgtgaatgatcttcagaactttgacatttggtagaataattttatatgagattccagagtagctgccagttagtgaaatgaagatcactcagtcatgtttgactctttgggaccccatggactatacagtccatggaattctccagaccagaatactggagtgggtagactttctcttctccaggagctgctaataaggaaaggaataaaaggaagaacaccaaagggctattctaaacagcacagaaaaaaagaagaatgaaagcta

SEQ ID NO: 26525 - DNA, 1500 bp, Bovine  19866881361230
  misc_feature (1)..(1): n is a, c, g, or t
naatcaggaggttaaaacattccaatgttcaagagtttcacttaatgagttctgtactgagtgagtacaaaataggttatgcttcagatgaaacaaagttaagtttctaggatgtgttataaccatgttgacactgttgacaagagaacattacgatgatctgtaaggtaaatgtgaaaattttcaggatttttctgatttcaaaaagatagtggaaaatttaaattactagagtgggttgccatttccttctctagggcctctccccaacccaggaatagaacccaagtctcttatgtctcctgcattagcaggcaggttctttatcactggcgcgtcctgggaagccccagagtttgatttctgtgttctaatacaatttaaggataatatttgcttgtgtgctaatagttattcaaatactgatatagaataactattctaagattgagaaaagggcatattactcaattatgacttcttccccagagaatcaatttatatgggaaaagcaaagtattaaaacaggaaactctgtacataaaaagttttctggatttcagggaatcaaaaactcattgaaaattttgccttcttaattgttatttctgctctgaaccatagattaatttttcctacaggtataaaaaaatccatagaaaaaaagaattaattattcaaatatttattcacatacattttcagcaatagtttcaaggcttaattataattttcaccttgtgcttaattgttcagttgtgtctcctgcattagctctttgctgcctcatggactgtagcctataacacgcctctgttcttgggacttttcaggcaagaataatggagtggtttgccatttcctcctctggaggttttcctgatctggagatcaaacccacatctcttctacattgcaggcagattctttaccactgagccactgagggagcatcattttctccttagtgcaaagaaaaataaattgaatacaataaggcatttttgtctttttttcataactcagtatagtctatatggtatatatgacttacaactaattatttcagtgttcacttaccaatttttttaagtcataaagcaggtaagaacataacagtgttagcgttaagaatattaatttattatttctatcttctggtccctatgctttaccatctgagagtacaccttaaatttctctccacctgaccccttccattcactcatcctacaatcacctgattaacagtgtttactgagaattaagtagatgtcaatcattgcttcagaataagcataaaacatcctgtccttctgcttggaatcataaacatgcagagtaaaacttgttaaccttaatatgttaaacatataaacaaaggttgctaatgtgaatgctctagtcaaaagacacaaggtgacataaaaattaaattgtaaagcaaataaaggattgctatagattatagattatttagctatatttgaaaataataca

SEQ ID NO: 26526 - DNA, 1258 bp, Bovine  19866881952864
  misc_feature (1)..(1): n is a, c, g, or t
nctttacaattgtaattatgtcaataatttagtagtatttctgcaggaaggagcctcttaacatgttaacatgttcattcgctgtgaatatgtgacataatatgttatattgtataataatacaaggatgtccccaaagtacatcagttatttgacataataaacagaaattgaatgtggctgcactctacattttttgaagatatctgttatatcaatcgcattctcatcaaaggcattgaagctgtactttgagggaaagataaaagatatcattgtcctatttattataaacatataaaaataagaatattacttcatcattgtcatgtcatttaattgtataagagggatcattgccttctgtgtattatatctgttcttttactaaatgattcatccatggttcctttttaaaacttgtcatttcagggactaaagcatagatttgagcatctaacagcatatcttgaaaggggcactgctgaaatattatagcagattgtcactatagaaaaatggattatctatccatgtaacagtgtcattcatctagatttgaggcttgttcaggtgttcatgaaataagagctaattttttctccctgagacaccaaacatctagattaaaatgaggtaaaaaatggccactgactcagatgtatttaaaagcagatggttgtaaaggttttacaaaatgcaatgtttttccttgaccaaaaatatttgtgttttttaaagataattttatgtttaggttaaatgagagtttatcattttattgaacattttgaatgttaaggaattaaagtactatacattaagctgaaataaaacaatcttgctgaaaataattgaaaacatactgaattatatgctgcttgaatatatttacagtgatgttttgttaacaatataaaaaatgcattttgtacaaacttggattagaatcatttcaagagatcttccaaaatttgtgttgaccctaatatatgtattaaaaatcagtctttaataactattttattaatttaggcctgtttttaaaaaagcaatatgaacatatagcatttatctttattgatcatagactagacacaagttctgactttattagaactaatattaaagagattttatcacttgatattcttaaaatttctagtagatttctcctgtattttacataaatatcaaagcatagtgtaagtttcatgtcttttacataacattttccctactactctaaaaacagtaa

SEQ ID NO: 26527 - DNA, 1637 bp, Bovine  19866880354261
  misc_feature (1)..(1): n is a, c, g, or t
nacttttatgagataaagtattaatagtagcagaataaatgaagccataatatattaaacagatttatttgttctcataactttttaaaaccagtgtgcttctgtttattttagaatgcacaattttcaaagttcaaataattgtgtcgctttgaagttgttccttttttcttaagcagtctttttaattggattaggtcaccttgtagatattactgtattaaattatgtagctgtataaaattatagctgtattaaattatgctattgttttttagcattattcaaattacatggaagaaagcaaaagtattttctcacttccatataactttgacattttaaaagaagcttaaagaaggagtcactgactaatgaagaattatagatgactctctctctggccttttccatttcatataataaagtagtttcatatgatataattttgttcaaaataaataaggttgtgaagaaacagaattgaaagaaaggaaactgactcattatagtgattatctgggaaggttatgattatgcttcagatattgtatgatagaataacaaaaatttagacaaaaataattattgaaattgtttttggaataaaagttaataatataaatcagcaaggtaatttttacattgtcaatggtattatgaaaaaaatcttccagaacatggtatgtgtgcttagttgcttagtcgtgcctgactctttgtgactccatggactacagcacaccaggctcctctgtccatggaattccccaggcaagggtactgaagtaggttgccagtcccttctccagggggatctcccccggcccaggaactgaaccttggtctcctgcattgcacgcagattctttaccaattgagccaccaggaaagccagaacattgcttttaattttgaacaatctaatagctcaaaaaattttaacaattttatgatactttacagtctgcattttgctagagtgtcagaaggtcaaacattcattaatttctaattccatccaacatggactggttgggccaatttcatttcattctattaagtttcaaagttcatatgtagaatagaataaaatcagattgatggaggcttatattcagcctttctggattttttttttaaacctttcttccctgcgttattcccttaaacataaatgtattgtgtttattgttgttcaatcactaagtcatctcaggctctacaatcacatggactgtagcatgccaagcttccttgtccttcactatctcccagatattgctcaaactcatgtccattgagtcagtgatgccatcccatcatttcatcttctgtcgcccccttctcctgcactcaatcttttctagcatcagagacttttaaaaagaagtctgatatggagtctagtaccttcacaatagtgtgagaacttccctggtattattgttctctaatttgtcattcgcccaccccacaatacccccataatagttcttgtgtattaccatatgcaacttactactttggcattgccattaggtaactacaaaaatgttattgtatttctcccagcaatcttaattccagcttgtgcttcttccagcccagcatttctcatgatgtactctgcatat

SEQ ID NO: 26528 - DNA, 2245 bp, Bovine  19866880389678
  misc_feature (1)..(1): n is a, c, g, or t
ntgtaacctgtctttgtttatctatctataataatcagagacatttgttcaaaagacagtgacaatgaaagataaacatatatgccaactgcagagatataatcatatgaaatccagataatgtataaaataatccacagttaccattcaggggccatttggacaaggaaagaagttccttaaagaaaataaagtcattaagttacttctaaattgtaaaataaaagttgaagcttgatttttgtatttgaaaatgtcaaaaattattaaagcatctggaggtcagataaaaaaaatatactgcaagcctccaggaatacagagacagtatttgaacatggaggcagcagcttgcaaggtattttaatggatttataaaagctcatgtctctagggaactttacttcgctcaagaaaatgtcatggagatgtatgtctcagacagtattatgaacagtggagttactcagttttctttctgcagttcctgtggtctgtgtgtccaattgcttggttgcatttttgattgttttctgacatgaagttaggctgcctgatatatatgaacttgtgtgactcatacagctttcacataccaactggcttagaagtagccttaatctaaaataattgttatatagtttttcaattaaagcttgtagggaaaaaaaaaaatgtagttagttttaagttagccatggattgaaagtaagtacatagctgtaacacttataaaacttattacttgcccttttacattaaaaagtactatgttaaaaacaattattatagttgatttacaatgttgtattagtttcaggtgtacagcaaagtaaatcagttatatatacacatatatccacatctttttagattttttttttccatataggctattgcaggttattgagtacagttacctgtgctatagagtaagttcttattagttacctgttttatatctagtagtatatatatgtcagtcccaatctcccagcttatccctccccatcccctcgccccctgagaactatgattgtcttctacatctgtaattccatgtctgttttgtagatagtttcatttgtatccttttattagattccacaaataagtgataccatatgatatttgtctctctctttttgacttaattcactcagtatgaaaatctctgggtccattcatgttgttgcaaataatattattttgttctttttcatgtctgagtaacagtctattgtgtatatgtaccacatcttgtttgtcctctattggcggacatttaaaaaataacttgtttatttgagcgaaaatatgctgataatttacattaaatgaagtaaaatagaaaataagacagggtcagagaggcagagaaaacttggatatatttccaaagcatataatttgtaggacattgctttctggtatttacctacagaaatttagaaaaatttatttttgaaacttctttctaaagcatattaagtatattaaaaaataacatttattaaatgtatttaaatttttcattttaatttttccataaatagcattgtgttaataatgatgcatagttagatagattaatagagatgtgaaatactgttataacagtacctaatacacaaataatcacgatgcagataatcatgatggtgtgatcactcactgagagccagacatcctggaatgtgaagtcaagtaggccttaagaaacatcactatgaacaaagctagcggaggtgatggaattccaattgagctatttcaaatcctaaaagatgaagccgtcaaagtgctccactcaatatgccagaaaatttggaaagctcagcagtggccacaggactggaaaaggtcagttttcattccaatccctaagaaaggcaatgccaaagaatgatcaaactaccacacatttgcactcatctcacatgctagcaaattaatgctcaaattctccaagccaggcttcaacaatacatgaaccatgaacttccagatgttcaagctgattttagaaaaggcagaggaaccacagatcaaattgccaacatctgctggatcattgaaaaagccagagttccagaaaaacatctatttctgctttattgactatgccaaagcctttgtgtgcatcacaataaaccgtggaaaattctgaaggagatgggaatgccagaacacctgacctgcctcttgagaaatctgtatgcaggtcaggaagcaacagtttaga

SEQ ID NO: 26529 - DNA, 862 bp, Bovine  19866880396044
  misc_feature (1)..(1): n is a, c, g, or t
ncagtaagtcatttacttacgatctgtcacccaatttaagacctaatacatttattagtagaatgaatagattctctccacctgttctgtgagaactagtgaattagatttacctacagtcctaggatgtaaaagaattttcagtagaattccagggactgagagaagtgaaactactagaaagaatatattgaaattactgactggcccagactaggacagaaggaaataaggttgggaactagaacaagaggtggaaagggaaggatatgtcaccaaccgttgatcaagatacagtgcagttcttcctgctctacatctgtttccctctcagaggcataatgtcttactgctgacatattttgaatcgagttgcaaaaggacgctaaaatatgactgtggagaggatgatcagaggcttggagggtgtcacattcggtacctaaggtgttagaaggagattcacagctccacagggtggtaactcattgggaagtagacccatttcatgttttgccacagctaaaccatccaacattctcagaatcgataggtgtcaccatagaacaggaatattgtgtgttcaagttgtagtaaaggtagggtaggaaagctgagtttcaaattctgacagtcttttacacctgaactgcatctacattcagttgaatttcagttcatacaaactgtgataaacctccaattgttttaaaatggaggaaaccttgctcttatttacacttccaattcagctttacaagtttttctcagacactacagtgttttactgagggtaaagtttagcagttttatatatagattattccttagttccacccacatcacactatttcatgcaggg

SEQ ID NO: 26530 - DNA, 778 bp, Bovine  19866880401918
  misc_feature (1)..(1): n is a, c, g, or t
ntggcatcagtagaaaatctacaaccagtttaatcttaaattatgatattgtgacacattgaccacacaataaggggggttttaaaagctctcaaaatgttcagagcaattccacaggttttatagaagcataacaaagtagaactatctgttataggatttagggaagtatatgtgcttttttgtttttgctttttttctattatacacaatgctgagaagacatcatccatactagtgaatacaatataaaatgaggcatactcttggcttggtgactaatacttaaattgaatctttacaaggaactggttcagaaagtgtttaaattttaagagtatcagggtttgttggcttcaagagaaaaatagcagtttaaagatgtgaaatttcttttattaagatataaaacaacacaagtaaccgaaaataatgggctataaaacaaactcagtgattgacgtcagaactaccaatagctatattacagtgtaaaataaagatgaaagtcacaacttggaaacataagaccacatttcctcagaaataacaaatagaaaatacactttctttgaagacaaaacttaggctctgttgttggctgacctagattttaaactcagaaaatggcaacccactccagtgttcttgcctggagaatcccaggaatgggagagccctggtgggctgccgtctatggggttgcacagagtcagagatgactgaagtgacttagcatcagaagctttcttccaatcatacaaacttcaatctccat

SEQ ID NO: 26531 - DNA, 3534 bp, Bovine  19866880498220
  misc_feature (1)..(1): n is a, c, g, or t
ntggataaagaagttgtgatgtatatacacaatgggagattttggagccatgagaaagaacaaaatctttccatttgcaacaacgtggatggtcctgaggacattatgttaactgaagtaagtcagaggaagacagataccgtatggcatcatttatgtgtaaaatccaaaaaaactgaacttatagagacagagagtaggatagccaataccagggaatgggggtggggaaaactgaaagatattggtcacagagcgcacaaacttccagtaagaaaatgagtgtgttttggagatctaatgcacagcattgtgactacagataacaacactgtatgatgtgtttgagagatgaagaataaatattaaatgttctcatcacgaaaaagaaataatcattatgtgatgaaacagaggtgttaaataacactaacgtggtaaccatactgcagtatttaagtgtatcaaaccaacattttcaacacagcaaagttacacaatattctatgttgattatatctgaataaattcaggggaacattttaaaaaataacttcagtttttaatgatggtattaaaatatggcagttattttctctccttttaaaattagactcagttcacatatacaaaaatagaatttaaccacctatagagtcaacattttaagatttttttttttggctaaatgttctgcctataaattttctcagggaaattttttaagtatctgtaggaaaactacaaatgaaggtaaaatgtcatacttttcttaagccttttaataatttgagaaagatcataaacatattccttatttctttcctcctcacttatgctggcactgaaaaacctgtattcatttaaaattttattagctcattgttctgtaaaagaacccatgattgtcttaattgttatcggcagaagaaaaaacaaagggtctacttcaaatgttcaattaggattacatacagagatgcagttttatcagtgttgacatttgcacaagctctgcatatttaacaagtgatcatgctctgctgaaatgagtactgttgctatagacacattataatatactttaattatcacattaatattgatattatcatcctcccaggtcaagatgagacagtaaaacagccatttagattaaattactcacagtattgattttattgctatttctacagatatggcaggatgctttaattttaggtccatatttgacaggacacttcagttctatctgattttaaaactctgagggtgctctatgtgggtgtttaaagtctaaaaatatttaaaaattgaatttcttcctgaatttcatcaacctgatttttttaaatgagaaaagaatgttccccaagtaagtttttaaaatattttttgctttctattctcactgactgttcattctgaattacaagaagtcattatacatattgtttcaacttaaaagtgaatatatatatatagattagagctccataactttttaatttgacttttgtttaaaaaatgatctactaccagagatggctgatgctgtatataatcttaaatatttcagaaattttaaaagatcacttattaaaagagtctgaacacagcaacttgaaatacataccataagttatttaaaaattttttgaaattattcagaacttacctcctgagctataaataaactaggaattcaagtttaaataaaataggatttgtttacttgagaagcactatttttcataatctcttcttggcatcattaaagtattttcagaactttgggatatggagagttttattgtcttattgtccatgaaatctctctgaaaacatctataactatgtttataactaaaaatataattttcttatcttctgttaattgtactgatgttaaggtttgggaaatgtcaagaaaaaacaaaatgaaacattcctagcctcaacaattataatctatttagagacatagttacatatacatttgattatgaaaaaaagctaatgtaaattaatgtttattttagaaaaatttgtctccctctttctcagttccataagtatattggaaagtcttcaaagattaaggaaaactgagaggcaatgtgtggcattttaattgccagaaaattaattttgattctaactaatatcaatcaatctggaggtaaaattatgtaacatcaaagtgaataccaactctattaaaggcacattgctttctttttagagggactgcatgtttggctttgatttagtttttaagtacaaaatcattgtaaacaaaatcttttcagattctaatttggacatttgcacttaaaaaagagatctcctgcttctcttaacctgcaaaggactaacatcagagttatttctatgaggtattggaattccatgtaattggaaacagtacaagctgaaagggtacagaacttatatgcttccaattcaatttttaactaagatgatttgaaatcccaatatgtttcctaggcaaccagtactgaccagatgcaaaatggtggcggccaagtaaaaattggctatggttatgattctgagaggaggaaggagagagtaatagaaatgaatgctagggaaccagccatctatgaaataatcttgtcattaattcagaaaagtgccaatattttcaagtctgaagctctgggaaagttaaatgaattttccaaatttgtattataatgctgcaaaactgtgactaattttctgtggtttaccttccagggaagtgctagtagatactagttactactcattctaccgtctatgaagacaatccaaaatcttataaaagtttcataagacatttattagaaaattagaaggctatgtccctctttcttctaatgtggccatacattcactcactggttcattcattataacagtgaatactttggaaaaaataaagcaatgtttctgcatttatggagtttctatttttgtatgggggtagcagaaaagataatttaagataggagcaaacccatggaaagagtaaagttttttttgtttttttttttagggatttgacagtagaaagaatgccttctgcctctgcaatgaagtatgcagtaaaaaattggcaaagcaagtgcaaattttcaaatatactttataaaaaaatacatgactcccagaaaaggatctctaagactcagcattttttaatagtggtacttgcacatattttaatgacctgttaaagtcacaaatgcatgctttttatgggtttaattacagagaaaatttcctaatgtaataaaatctgaatagctttttggtagaaattctcataatagcatgatggtcttcagacaatacacaaaatggctattaatgagtcctgcgcaaaaagcattgccttattacttgcttgcttgaggcaatttgacatggaaatgaaatgaaattattgactgaaccaagctttaatcctggccttggcctcagctagatgaatgtgaagtaactactcttgtccttagttaa

SEQ ID NO: 26532 - DNA, 1219 bp, Bovine  19866880578038
  misc_feature (1)..(1): n is a, c, g, or t
naggctctttagttcctcttactttctgcctaagggtggtgtcatcggtgtatctgaggctattgatatttttcccggcaatcgtgattccagcttgtgcttcatcaagcccagagtttctcatgatgtactctgcatataagttaaataaattgggtgacaatatgcaaccttgacatacttcctttcccttttggaaccagtctgttgttccatgtccagttctaactgttgcttcttgacctgcatacagatttctcaagaggcaggtcaggtggtctagcatttccttctcttctagaattttccagtttattgtgattcacacagtcaaaggctttagcatagtcaataaagcagaactaaaggatgtcttaaaaatatagtacttttgacagttctcaggtcatagaattattgatttatactctgcaaatatatcctaagtatattcacatgaataattagaatttggggctttgatatcatttggaagcacactatttaggttggatggttctagaatcaaacagcctccacacagttcttagttcctgtacatttcttagttattgctttttacactttggtaaattatttctgttccctttgattaagttccctcatcaatataaaagataggatcatgatagcacatacctcataaggtgctctggacattaaattagtatacctaaaactctgtcatttcatattataagttgtggctaatattaatttgttcaaaagttaagcaaaaacataattttgtcattctgtgagcttcaataattcattaatttgaattcaatttattctttgtaagttgaatatagggctttggatatcatctgaagttcaggttacaattaaattgctgattacagaggatcactaaagatatttgtgctatgtaaagaagtctattatctgttctattctagtttttcaatgtcagctgcaatctctctaaaaaagttgaagtcagcctttattttaaaagcactttaaacacttccgtgaaataatttgatgtattggtattaatgtaattctcatggtacagaagaataaatgggctgttaagaatattgaaaaaattagggaacactgaatttaaagcatcttcttcaacttttgtcagacattataaatgtaaccataatatgcagtttcctactaaagttcaacatacttaaaaggtctttctttttttttc

SEQ ID NO: 26533 - DNA, 832 bp, Bovine  19866880583083
  misc_feature (1)..(1): n is a, c, g, or t
naatgaatgaaaaacacctgttgctagaggaaataaacaacaacaaatccttgctgaactttttagacaaactagagaaaatcagaaagactctttattcagtgatatgggatgagtgtatcaaatgggagatctgttgtcagaatttaggcactaagaattactgctgaactaatgttatttattaggacttgtgtcctgatcctttacctgacttatcagaatgttgtgagaatccaccaagataaaagaatataaactatatacaccccgaaacactagtcaaaaaatatcagctgtcatttgggaaacatggaaatcagatgacttcaaataagaatctgaacgtctgattttttttagaaagtctagggtatcaggagaacatgttttgtttgtttgtttttcctgcatggaaaaactatactagagttgaacagctggtttggcacttcagtttacatttgcaaattacattatttactttacatcacatattttacattatgccatactaccaaccacaagctagctttagccttttgcccctggacctttatatatttgttcaagtgatgcccaggataagtactcctggtaattttaattatttaaaagcttatcaaattacatattttgaaatatttgaaaataaccctaagtatccccatgccactgttaaaatctccatagtcaatcaaactagaagtttttacccttcataaagtcactaattccattttcttttttcacttagtgttagttgcccagttgtgtctgactctgaaattctatgggctgtagctcaccaggctcttctgtccatgggatt

SEQ ID NO: 26534 - DNA, 3162 bp, Bovine  19866880716531
  misc_feature (1)..(1): n is a, c, g, or t
nggtttgggtaactctgggagttggtgatggacagggaggcctggcgtgctgcggttcatggggtcacaaagagtcggacatgactgagcaactgaactaaactgaaagggtagtagaatataaatgacacatcacttgtctcaagcaactgtttggcattctaaatctggttgcaaaatagctttttgtttttttactacacataatacattttcattgcaaaatatttagaaaccatagataagatgaaagaagaaaatgacgactagctgtaatcataccatcctaggtctagcagtactatattttggtatacattccaggacttactgtataaatacttaaaaacattaaataggatgaaactaacatgtgtttttaagctattttcaagtttttaaatataatgaaaatatataatttaagaatagatacagaaaattttatttgccatgcctaatgtacttagtgggagaaggcaatggcatcccactccagtactcttgcctggaaaatccatgaacagaggagccctggtgggcctgcagtccatggggtcgctaagcgtcagacacgactgagcgacttcacttttacttttcactttcatgcattggagaaggaaatggcaacccactccagtattcttgcctggagaatcccagggatgggggagcctggtgggctgccatctatggggtcgcacagagttggacatgactgaaacaacttagcagcagcagcagcagtagactaaggttagggaaccattgagatgaaccactgcaaggagataaaatcagtcaatcctaacggaaatcagtcctgaatattcattggaaagactgatgatgaagctgaaacaccaatattttggccacctgaagcacagaactgacattggaaaagaccctgatgctgggaaagattgaaggaagaaggagaaggggatgacagaagatgagatggctggatggtatcccttacttgatgggcatgagtttgagtaagctccagaagttggtgatggacagagaagcctggcattctacagtccatggggttgcaaagagtcagacatgactgagtgactgaactgaacagaattgggatggattttgcagagagggcaacagactgagttcaactgcaaatacaacaagaaaaagtgggatttatattcaaagaacaggatggagatcagtaataagaaattttcttagaagaaatattagtggtaaggatggggtggggggtttctggctaataagatttttgttaaagacaggctaggacgttaatcctagtgtgtagttaaagattatacccaatcagatatcaaaggtgattagttatcaatgatggagagttctggctaatttgatttagcaggatttttgctaaaattgaacagaccatacaagacatacacaaaagctgaagagtagggcctttgagaagatattatagatgagtctgagtagaatttgatcaagaagagaatcttagtcatacctgtaaagctatttcttaaattacatagcactgtaagacttaaaagaggattaaaatagatcatggcctatgcttgcttctgagagtggtcaaggggtgaagtttactagggaacccattatgaatcatgggagtaaaaaacccaaaccttcatttagtagagatgaaagaagtaattagtccaaatctcaggaggttatagataatcatcatgaagaggatgtgtaaggaacaaactcaaaatgtagtgcaatcagatatctaccaagaggctgtgatgccttgattctctcatcctaaaacagtaattcattctccagtcagaagatgcactgcatataagtatgtctcatgtccatgctttagactaggggcagttttactgacctcagtgtccagaaatgaggaccagaaataacattgtctgtaggcactgtactgtcatatttatgatataaatagcaaaagcttgttcatgattcattatttgtgagtgcatcactacttttttcactgacattgaacagaaagaaaaccatgattgatgagcaagagagaacattgacgaaaaaagataaaatgtcataaggtcagttcagaagtaactgagcagctggcacagaatttttaaacagtctttattgtgataagggattgcatttaatatgagcgtttttttcctaaaattgtggatatggaattcactaaaaataattgtatacatatgaacaaaatgctatttttataagcacacagtatcttaatatctattatgaggctgggttcccactgaaaatattttcaatttatagagtaataatatacttatccattggtcttacttaaaaagctacattgaatggagatatagaaaagcactgacctccgggtatgatggaacaggaaatgtatatagggaatgaaatagatgtatgaaatgtagataaaagttaccctttaaagagaaattcaagtaccattgctctctaaatttgctgaactgtatatagtggcaaacatacaaccctagtctatgaaatatgaacatttcaaaaagttctttggtttgaacttgtaaaaggacacactagagcttacagagagaaaagcaaaggaagatctgagaactcacaactggtttgctctcaggattcttagaagattatgtttgttacatatataaaactgctaagatttaatataaataggataaaacttgtgttctaaaagaatggcaatcatataattaatttcagggtttcgtttttcatttaggttaaataaaattgtttaactttgctttaaaaagaataggaaactgacccagataatctgcatagtagatatgaaattctttgtaagtgagagaataatccaggagtcaaactgataatatcctctgattgtttgtctgactctttgcaacctcatgaatggcagcccaccaggcttccctgtccttcactgtctcctgggatttgctcaaactcatgtccattgagtcaatgatgccatccaaccattttaccctctgttgcccccttctcttcttgccctcaatctttccttgcatcaaggtcttttccgatgggtggactcttcacatcaggtggccaaaatattggagtttcagcttcaacatcagt

SEQ ID NO: 26535 - DNA, 1710 bp, Bovine  19866880818347
  misc_feature (1)..(1): n is a, c, g, or t
ncattaacagatgaagtatcatttaaattaaatgcttcatgtatttcattattttaaagtcatcacatgagtttacagcaagtaagcacacaacttatgacaatttacttttggcaagtaaattgtctgatttttggcaagtaaatttggggatcttctagggattggatctgtatgttctcactcagaaacaatgaagagtgacttccaaacttgcctctattcttaatgagtttttctgtgttgacaaagaagcatatttgagcttgttgctaaatgagaaaagtgtgatgcacatattttcatgctgaggcagaatgcaaactcaaattcaatgactagattttttaaaaaattatgactggattcctttgcaatggtacaagggtaaaatgtatggaaaaatcttgaggtgtttttgaatcaaatgtgaacaaatatatagtttacatctattttaaagaagaaaaaaaaatagactcagaaattaagtgacttacctaaggttctaatacaaacagtataggcattcatgttgttgtgaggcaagtgcagagaaaaaaagcaagctgggctctcaggaaaagggaaatttattagagggaaatgagagggtgactggcccttaagaagaaccagtgtcctccctttctgatggggtctctcttacaccctgccaatgaaaaattctctgactgctgctgctgctaagtcgcttcagtcgtgtccaactctatgcgaccccatagacggcagcccaccaggctcccccgtccctgggattctccaggcaagaatactggagtgggttgccatttccttcaatgcatgaaagtgaaagtgaaagtgaagtccctcagtcgtgtctgattcttagcaaccccatgggactgcagcctaccaggcttcctctgtccatgggattttccaggcaagagcactgaagtggggtgccactgccttctccaaaattctctgaagtgatggttaaattttagcctgtggttgagccccgtgttcatgtagccggaggtcaggaatctggtggtctcatagccttgagaatgtaggcaacagaaaacaggaatgttgtctgggcaatttggtcagtctcaaggatcactgtgatttttattctttgtttgtgaggtcagcataatgagccatttctaccatgagcctccatggaggccctgtcagttattctttcttgtctttatttattaatttatgactacttttcttctgctgaatgtgtatttcttaaaaggtattatacagtgcctagagccaaaatggagactgcgcccttttggatttctgcacttgtgtgttttatgtacagggttatgggggaaaagtgtttatgatgaggtggagatagcaagttgagatagcagagataataatctggggaattagatgagatgctcggattgacatttttagagaagactagtgtttgttctttggagaaggcaatggcaccccactccagtactcttgcctggagaatcccagggatgggggagcctggtgggctgctgtctacagtatcacacagagttggacacaactgaagcgacttagcagcagcagcagcagcagtctttgttcttatgggttagtgtctcattttcctctctcccttctcagcaacataataaaatttgttcccaacactaaaagtgtaaaatacaaaacaaaaaa

SEQ ID NO: 26536 - DNA, 1565 bp, Bovine  19866880883053
  misc_feature (1)..(1): n is a, c, g, or t
nctttcccccttgactgattagttttattatttatccaatttttaaaactgtgtctttggcacacctgcctctgggtagaccaccccaattaaacacattaagggaaatgcacaaaacatggtaattatgtaattaatcagttctaggtaatataacaaattgctagcctagaagcataacacttagagaaagggcaattttaagaatttaaaaccattttaatcattagactttttcttttgaattttacatacatatatgtgtgggctaggatatgaaggtatttatttctttatagcaagactcctttcacaaagtaaaacagcttccccacttggcaccatgcttgaggacactagagaaacaactgatggagaatttatgggaatgtccttaggtaacctaagtacattttaatcttcttagagttatatttataatgtattcctaattagtacattaataagtcaaagaggctatagaaaatgatctgcaacagtacatttaattacatggtttcattgtgctttgctatcatttttttttttcaattaagcttttatatactcccccattttttgtgaaagaagatagccataggaaggccacactggcttcatttgcatgtgactgaaggataaaatgaagctgtcagtttccataagccacgcaatgtcctgaagctcagctctggcagaacaatgtctagcatacatcaggtagtatatctgattattatctcaaacactgcgggaaaacctagtataagttaccatcttttctctctcactgcatattcagtattcagtccactatggcctaagttttgcttttgtcttattgcatctgttttagaaaagaaaagatatcttagaaatatgaaagccagtatgcactttaaggttcagttaacttgaattttctgtgttagtagacattgaccactgtatcatcaagcattgaaaaacatttatggaccttaaaggagaaattatattaaaaacaggtaattagaaaacataagagtattgctgtgattttggtcatcacacagggtatggtatataattggtagttgtcactcaatatctgttctcttggcatagaaacaaaactctgatttagttggaggaagcgaagtgcctagattaaaacacagagaaacgaacagattttacaatttgcagtgtcctctgcagttccacatagccatataactaaagttttgccaataatatgtaagagaaggcatttggaagagacttaaaaaaacagatgtaaggaatgtttacttctgtttctcttcatttttactgtctggaatataaatgccatagctagagttagagaaggcatattttgattcttataaaaatgaaagccagaagccaagtataataaagtggaaagacataaatgctcaattccctgatgactctgaaattaacatttgggactgcccattctgattatttttttttaatggagatagtaaaatcccaaatcctttaaactgccacaccaaatctctgtatctgatacaggcacaccagaatcacatgtt

SEQ ID NO: 26537 - DNA, 789 bp, Bovine  19866880945620
  misc_feature (1)..(1): n is a, c, g, or t
natggatatttaaaataaattatgatgaataggatttggtctctaatgcatactcaaactgtaaagagatacacagcagtaatctgtgtgactaggtgaatggcaaatggattgtgaatctcagccctaaatttctcctaggtctaggtatagtgggacagcactaatttgcaaatgttctgtaatgtatgaacatgtataccataatgtctaggaaaaaatacttaaggctttatttagtcataaatactagtataaagtttcacttagacattgtgaaaattattttttaatttattttatatgtcctcttgatttctaaaggctatttatcttaacaatgcattttcacatttttttataaagtctatgagtgaaaattgagctgaaatttaaagttgcaagcagttgtatgtcttttatgattctagtaacttatttgccattcttaatcatattaagcattcttttttttatgatatagagttctcttcagtggaaccatacactataaattaagttcattttataaatcttatgttgatttgagttgtatatttttattatccatagtattttttataaataattcatacatgtattctttttattttgaacatgcttcaatttgtctgaatttttaattacaatttgaaaagtccaatgcttaattcttataatctatcttaatgatgagtacattttattttctgcagtgattgaaagtatgaattcttatgcctaggtgaaactgtgtgtgtgcatgctaagtcattcggtcatgtccaa

SEQ ID NO: 26538 - DNA, 1349 bp, Bovine  19866880986395
  misc_feature (1)..(1): n is a, c, g, or t
ntttggagagcttgcaatgaatatagaaatatgtttatcaaaaatcttctcatctcttcatcagttcagttcagttcaatcgctcagtcacatctgactctttgcgaacccatgaattgcagcacgccaggcctccatgtctatcaccaactcctggagttcacccaaactcatgtccatcgagtcagtgatgccatccagccatctcatcctctgcacagatagcactaaattaatccctaaataggctattgttataaaaaaaatcaaagacttgcttctaattatacatagatttaaaactcagttttgataaggactgaaagtaaggaacattaaattttgctttgtaagctcttccagggatgaattgcattggcctcttgaaatggctcatcatcatcactttcaaaggcatttaataattgtactagatctaaaccataacttacatgtgcatggatacttggtagctgtactaaggcctgagtcagcactggccatggctgagcaaaatcagtttatttggtggcttgcacccaactggaaaagggttgcaatattcactgtgactatgataaaccactctctctcatgttccctgatagaggagattttttgaacttactaccttgttgagattttgattatagtttcaaatgagatcctaagagattaagctggaaatttaaatatggcttttaacaattaaaaatgattgtagaattttgagtttgaatgcaattgagagataatataaacccaaccccttattttaaagataggacaaccagacacagagcaggatgactgttttagccctcacttcttgttgtcagccaggctggaatgagaatacaggactccagaatatagtgcaggtttgagcccctgtaatttgatgctaagtgccaggtttcagtatttagccatactaacataaaaagaaagagcaggagaggtatgaagtcagacttggaaataagactgatattgtttgtcagtttaaaaatccctgtgaatgaatttagcaaattatttaaatatactgatgctatgggcaggaaacacatcatacatgaaaccaactcaacaaatctttctcaataccagtatgaataggtatctatgatgccattattattattattattattatttttgcttttatttccaatattctgggaggtgggtcatagaggatcctgctgtgatgtatgtcagagagtgttttgcctatgttctcctctaggagttttatagtttctggtcttacgttgagatctttaatccattttgagtttatttttgtatatggtgttagaaagtgttctagtttcattctttta

SEQ ID NO: 26539 - DNA, 892 bp, Bovine  19866881039883
  misc_feature (1)..(1): n is a, c, g, or t
naaggggacgacaaaggatgagatgtttggatggcatcaccaacgcaatggacatgagtttgatcaagctccaggagatggtaaggacagtgatgccttgcgtgcttctctccatggggttgcaaagagtcagacatgactgaggggctgaacaacaaaaatgagtattcttatctatatagtcctctctatattttttttaatataaacattataaggatttagaataatttatattcaattgcatcatttttttctttagatcttcattctaggtttctgtaataatttttgtctcaggtcttgccaaggctgaaaaagtagaaatcctcaggctttgaagctacactgctacacataaataaggaacaattcaataagaaaatattataaaggctgggagaaatccaatcaagtcttaaaaagcccattcattttatttacaagactgcctttaggatgtgactcagaccttagcaaattatactttgcacacaatttaaggaagtttagttacctgaattccatgccccagtttacagtaaattggaagtagacagaaagaatgctagtctgacctcaggaaaggaaaataaaatctatcaaagaagtgacagaaagctcagataactcggggtctttcagtttatgaataaactttcctatgcaaatcaggacacctccatcctatcagtgtattatagcatagtacaattatgtttggtcataataatgacagtgactcatctatagcatcatcacctagcatttacttcataggagttatatggcaccattcctgctctcaaaaaatttaaaatccctctgcccagaaaatatcaaattaaattaggaatatttcaattggtaagttaaataacatggaatacaa

SEQ ID NO: 26540 - DNA, 2039 bp, Bovine  19866881115852
  misc_feature (1)..(1): n is a, c, g, or t
nggaacgaacctgggtctccagcattgcaggcagaccacttttactgtcagagccaccagggaaatctgattataagatggtgattaaaagaaataaaatagaaacctaactcagggtgaaaaatgtgatgattgggaaatactgaacatggagatagagcaggaaatcatcagaagaggaaatagaagcagaaaaggggaggaaagagcatgtgtctattctgcataaaacaaatcctatcagagaaatggaattaacccagcctgaagctggtttgctggctttcctgagggcaaagcgtcacaaatggggttaaactgaaggtgattgatgtccacagactgaaatgactagagccccctaatgctgagtagtacacaaaatctgaaatatatgcaggggccctgacttgctggaggaaaactgggaaacagcaatccttaatggcaatcttgatttgctactaatgcttttgagtcttaaggttttcagtattgcttcactagatattgatacttgagttctgggttattagcaggggctcaaataatgtttttcactcctttgtaaattactgaaaatttaaattttgtggcttcaaaagttaatcaggagcaaataagattaaagcctcagaaacatcccttaggtacagtcagcttaaactaggattaatgatcactcacagactatatgaatatattgatacaagtattttcatatatatcatacatatacatatatatacacacatatacttacagacagagaaacacatacttgcataaacacacacacaaatatatagcacccctattatcatttattagcttagcatgtaggaaaaccaaaacaattgaccaatgtcattaaattgttcatcttctgtaaaaaagaaaatggctaattattatggaatacttggagaacaaattgagatatatatgggtcatcataaagagcttgttttcataaatagaaatcaaaactgtgattaatagattcaacttatggaggaaatgacatatgtttaaattgcatactgaaactatttgctcaagtattgaaagtgggatgtggcgttttaacaaaagtaaaagatttctgctttgccacacaaattggtcaaagctcagcagtccccaaattccaaattaaacaaatactttttgcatgctcactgtagcagtaaattacatagtgcattataaattacagttaaaaggacagttttctttgaaagtgtgacacaagaccagaaagtatgagaagcaatcagcatcctactgtttcctctttgcagaagaaatgtggttagagcagtgaaggaaatggatgtcactagcataatgggcaaaccacctggtgttctgcaatttcaggtttctctgatttgctgaagttcctaatatgtttagtaacctgttatcttaatataaacatgcattacataatctttttgtttgtgtgtgggagtattaaagtggccctattcttttgccagctatattttcctgtgttccatttgtttgagaggggtagttggattatcaaaagtccaaatgggactatatgttagaaacaataaatccaagtcacagccaatccaattagaaatgtgaaaagtgaattctgatgagatgactcaggctctatacatgacatgctgtatacatctcacacataggatttcctcaaatgaattattgaagagcaacatgaattcattgtaagatgaaccttgataaaacatatattgtctctggtcaaaggataaatcaatgtattttatcagtaaaatatgtattgtgctctaaactatatattctcattaatatttttattcatgtggaattaaaaaatacctatgctactcttcttcaccacagaaaaaaacataagaaagtcattgtgggggggatcatagtcagcattaaagctgtgctatccaaagactggatattaaatctgaaatagaaagtgaaatgaagccagaattctcactacaaaggaaatataataacacctaaaacatata

SEQ ID NO: 26541 - DNA, 1012 bp, Bovine  19866881163431
  misc_feature (1)..(1): n is a, c, g, or t
nttggatgtgttgccttccctgctggctcagacagtaaagaatctgcctgcaatgtgggagacctgggttcgatccctgggttgggaagattgcctggagaaggaaatggcaacccacctctaggatacttgactagagaattccatgtacagaagagcctggcatgctacagtccatgggattgcagagagtcacacacaattgaactactaacactttgatatgtttacttctcaggaggttagaaacaactttttatccttactttgtccaggacaacataggacaatgttagggttcttgatgggcaataattgatgataccatgggtaattgtgggtgtaaaattactcttctggctctgtaaatgggaagtgtgctgttgtgggaaataatgcaataataaaaattaaaaagtggtggtgatgatggtagtgacaccggcagtggatgactaataacacagtcaaacctttaactcttgggtgtaaacactgctaccatgacaatcagacacattctttggtatttgagtaagaaaaatctcaacttctccatcaaatactaagccaaacagattgtttatgtgaatatgtgtgttcttatccctagaacagacagctgaagagaggttatctaactaaaaattactatttttttttcaaaaactatcctacagatgttaaaatgaatttcagagaatatctaatgcaaagaaaaatcacttaatactcttttaagactcttcattgaaagtataaatacatatattctaattatataaaacatattgcatatatatatgacagtgttgcagtgttatctgtgactttctttataattgatttgtttctaaatttttaatatatagatttatcatcagggggaaaaaaaaaaaaaaaaacaagcaatgagtgttacaagaaaatctgcttaaggttgaatgtgacacttcaaggatgtgccagcaatgaaaaagagcaagattgcaaaactcattgcacaggaaca

SEQ ID NO: 26542 - DNA, 1308 bp, Bovine  19866881193693
  misc_feature (1)..(1): n is a, c, g, or t
ntctacctcaagtgtttggccctgaggtatttcttctcttcatctggagagtctttttgttttaatccctgaacatttaactctgttaatcatctctactcagtttctctgaatggcaccacccagtctaacttctgtccttcagaaatatatgctaaaagtgattgcttataactctacttcatcttcattccaccttttcaagagaatgactgatttccctagtaaaagttgtttgaatttataggtaaatctctatttttgtagagcatgatttttgactatttactgaattcctaacagtgggctgactgatgtatgtaaatgtgtatattttcccatctcagatgcctaaggttttctcttctttttctaacctcactattcaacttgaacgtctatgggtccaagaatttaaacaatgtaatgatgatagcagagtgatcacaaagaaagaagagggttgccctctagctcaaagcttttaacccaggcttcagacacactggtgcattttaattactaatgccatttgtgacagggtccataatttggtagtgataataatagtcaaattctgaaactggagaagggttttctattttcccacaaattagaatgacttcaaggttatccttctaattatatcctttcacttacttgccttctaatacacttcttggaaaagaactaaaatatatttcctaataattaacttgctgctgctgctaagtcgcttcagtcgtgtccgactctgtgcgaccccatagatggcagcccaccaggctcccccatccctgggattctccaggcaagaacactggagtgggttgccatttccttctccaatgcatgaaagtgaaaagtgaaagtgaagtcgctcagtcatatctaaccctcagcgaccccttccaggcctagaagcccactttatcaataccatattcactgaagtgggcctgctcataagaaatatattctgcatatgcatgcacatcacagcagaaaaacaaagttagagatattatcctctgggaatgggaggctgagattaaacagagtattcctcttcaaagatgttccccataacaccaatatgacctaatagtgtgggtatcttctcattcgaggtctaatttacttttaataatctctgtttcatacatttattaagttttcagttcatattggttcacactccacggtgttttctgtggtagacactagctgctaagtatccaatagtcatttcttttttcttcattaataactaaatttctatcgattttattcaggcttttctcccag

SEQ ID NO: 26543 - DNA, 987 bp, Bovine  19866881194872
  misc_feature (1)..(1): n is a, c, g, or t
nctgaagttacatgctaaataaaactaaaaatagcacgtgctatatatgaaaccaataactttttatagcctgatgaaaataaaatctaagtactcttcagctaaattatcttttcttacttttcaactctcaccttttattcttatctttccatctctttgaaataatttagtatgcccatcattctttttttctaacattgttctatcttaaaacctcctttttctggctaatcttatctactattcagaaacaagaaatgctatttggtatccggaaaggagaaattgttttcaaaatagttttacaatgagagagagaatctacttaggaacaggatccaggctatcaatgtggcaagatgaaaaagtatgctatgttctatctgagaaaatttgctaggcttaatttaattacacttagtggctgcaggggttgggtgtggatatgggtctgtatgtgtgtttggtttgtatatgatgctagtctttttaaattaaaaggtatcaggggattccctggtggtccagtggttaagagcctgtgttttcactgctgagggcaagggttaaacccctggtctcaaaactaaaatctcataaaccatgaagtttggccaaaaaaaaaaaaaaaaaaaaaggaaaaggtatcaaacattactttttgttataatttaaaaggagaaaaaaatacagattctattcagaagatatttatgaattgctctgtgtgcagcagagttatgttataaaattgtcataaattatatgaggtcacaatcattttttaacaaccatgccccaaggcatgtgggatcttagtcccctgaccatggatcaaacccatggcctctgcattggaagcacagagtcttaaccactgggtcaccagggaaatccctaggttaccatctttatgaaactacttcattatctaagttctgtttaccaagttttactcaaaatttcataatatagaaatatgtt

SEQ ID NO: 26544 - DNA, 724 bp, Bovine  19866881527433
  misc_feature (1)..(1): n is a, c, g, or t
ntagagtgcaaaatactaagagaccaatagggcatgccttatgagatggcaaaggaacagcagtggaaattagtggttatcttaattattaaacatgagtagtcactggaccaacacctggttctaaccaatgatcaggcatcccagagtgacacaggagagtgggtttactataggtttatagagcattctttagagttcttgtttattcagttcatgcccttagcaaggatgcaatagacatcttttattttaaaaactcaaattggagagagattaaactagactcctaaaataataaaattcttaaacttgataatattttttgtaagtcctaaaagaatcttcttaaatattttattaaatataaactaaggtacattttctttttaaacagagctgtgccagttatcattaacactttagagaatgtttccaaattgttgtttttgttcagtcgttatgttgtgtccaattctttgtgacactgtggacttcagcacaccaggcttccctgtccttcactatctcctggagtttgcacaaactcatgcccattgagtcagtactgccatccaaccatctcatcctctgtcatccccttctcctcctgccctctatctttccccatgaaaagtttccaagttggtgttttatctaagagaagccctgaagccctgaagggttttttcttttttttttccccttgattttactaatcagg

SEQ ID NO: 26545 - DNA, 810 bp, Bovine  19866881644278
  misc_feature (1)..(1): n is a, c, g, or t
naatttaaaaagatagtttagagataattttaaaaataatatgtgatattttcaatgcagattaaaaatattattgcaatcttaaacagatcattctttttttcttaatgagaagaccatgaactcccattaataagaggtaggagtgaaatgtcaaaacacttaaaggaaatacaaacagttacatctttctctggttcctttagactatgaggaaaacattgacttgcgcatattatacacaaattgatcaccattccaaattatgttcttcttcaatagactgaatcacagggaggaaacccattcaagtttaattctcactgaaaccaagctggtggaaaattgattctctttaaaaaggtacgaatgttgtgaatctttaaaaggtctgaatgttacccttgcagactttcccttgattaggatcaaaagattagagtggccaaacatattcagcggaagtaaactcatgcataaagtagaagagaaaactgaaataaaataaacactgttgcaaaaatgttgatctcatggttgtaggatccatgaaggaaaacagggcttgatctaaaatcatcttttattcctcaaccataataactcacacacatgctggttgagataaaacagtttttaattgctacacagaaaccaccagtgctgatttttctaggcaatataaagggaaacacacttagatgtttcctatgattttttcatctacctcagtcaatgctgatacttgaatcctttctcagtagtctcccccaaacacttttcattttgattttatttgttaagcacaaa

SEQ ID NO: 26546 - DNA, 777 bp, Bovine  19866881819139
  misc_feature (1)..(1): n is a, c, g, or t
nggttaaggggaagctggaaaatgtgcccaggcctgtaagagatcgtgtacatgattaatgccgaggccactgccaacaggaaaaagagggactcccacagttggagagtgtgattgtatttacagtacattggctttgattaatgtgtgcactcagagaagtaatgtgtagaaggcaagaaaaagacctgttttcaaatgcttggtgcttgagtacagatttcccattatgtcctaaggaagtatcgatgaataatgacttaacagtcctagtgtttggtggtgatgcaggggttgctgctgccgcaggggttactttcccatgcatgagaacacgtacaaatggatttccgtgtcagttttcaccacccatgtgagtctggagagccaccgctgagaaatttatcccttatttcggtttcttaactgattgcttccaagaggtttcttaaatgatttcaatctaatgtcccaaaatgaccccttaacataagcagcaggtatagtttctgaatatcttatgaaaatatgtttcagaattttcaagacctgtaggtctgaaagaaacaatgaatatttataataaatcacctgaaaaatgttccctatctccctcagactaggacttctccgcttatctccctccatggtagacttgacgtactttcaggcaatggatgtgtgtgatttcatggacagccccaagaggcgagagagtgcactaaaattactgtgtcctgaatgaggaaagaacaacaccaggaacaaaaatagtct

SEQ ID NO: 26547 - DNA, 805 bp, Bovine  19866881943074
  misc_feature (1)..(1): n is a, c, g, or t
ntgtagcaattggtccagaatgtccaagacttgagcgacaactaccaggccaacacctattttgcccctgctttcaagtcagtaaccatcagagaaagcaaaatgtgctacccaaaccaattccataagatgccctgcttcctccctgtgtaagtaatctccaattagagatactagaaatcttccctttttttttttttttttttcactttaaagctttccctgttccatgactgtctttttgtctctgccaaaagcaagcaatggaactgattttgctatggtgagctctgcatggtttctgtatgttttcctttggatggtctttgtttactcccatatttctaacagtttaggctccagtgttctaaaaccattcataatttaattctattctcctgaaatctctgcagattcatacaatatagaactatttggccacccggaaactggcgtagtcagttcaccaaattctctgataaattccatacagccatacattgaaatatcagatttcaggtaaaagtgccccctcactctatttttattaataatagacaattactaagatgtaatataagctgaatttttgcacattacttatcatattaggatgcatgcagattttatcatgtaaaaataactgacagcattattctcctttatgttaaagtatttctcattggcattactgaaaaatgtttccagtgattcaaggctccacaaagtaaaataaaccgattacttaaagggagcatattcttacaaaaggcaataataacagcctagaattaccctaacacaa

SEQ ID NO: 26548 - DNA, 850 bp, Bovine  19866880116361
  misc_feature (1)..(1): n is a, c, g, or t
ntgctgctgctgctgctgctaagtcgcttcagttgtgtccgactctgtgcgaccccatagacggcagcccaccaggctcctccgttcctgagattctccaggcaagaacactggagtgggttgccatttccttctccaatgcatgaaagtgaaaagtgaaagggaagtcgctcagtcgtgtccgactcttagcgaccccagggactgcagcccaccaggctcctccatccatgggattttccaggcaagagtactggagtagggtgccattgccttctccgatttttctttcttagttgactataaaacctatataattaattatgctattagattagtttctcttcagttcttcaagttgtcttggctataaggtacagcttcagaaatctaagcttcagtcacaaaaaccattatcataatgctaattccttcaggtaactaaattggtttgtacacaaaaggcactcaagttattttctggtaacatatgtgaactcctacctctagcacatcagagactctgtggcagctcttgataaggaagcaagcctttgccacagttacagttgggcgcatcaagtaataacaaggtggattgttgtgaacaacagcttgccacatctcaaacaattttattattcttagagtcttacaagtgcaataaccacagtcctcacttctcctttgccttttgagtttttaattacacctggaactcattttctcagggaagtcacttgggtatatttgccccttggataactactggagaccaaaacatattctaagggaaggggaaaacttcttttttgaattgtcgactacttgtctacatggtgccaaacat

SEQ ID NO: 26549 - DNA, 3046 bp, Bovine  19866880120629
  misc_feature (1)..(1): n is a, c, g, or t
natgcttactccttggaaggaaagttatgaccaacctagatagcatattcaaaagcggagacattactttgccaacaaaggtctgtctagtcaaggctatggtttttcctgtggtcatgtatggatgtgagagttgaactgtgaagaaagctgagcactgaagaatggatgcttttgaactgtggtgttggagaagacttttgagagtcccttggactgcaaggagatccaaccagtccattctaaaggagatcagtcctgggtgttctttggaaggactgatgctaaagctgaaactccaatatttggccacctcatgcgaagagttgactcattggaaaagattctgatgctgggagggattgggggaagaaggagaaggggatgacagaggatgagatggctggatggcatcactgactcgatggacgtgagtctgggtgaattccgggagttggtgatggacagggaggcctggcgtgctgcaattcatggggtcgcaaaaagtcagacacgactaagcgactgaactgaactgaactgaagacttaaactgtcctttcctcattagaaaactctttagtaacatcagcaatatcagaagaatcttgctagaaagtcctagaaacccagttcttccaggatactgcaataggtgctgaaacgctcgcattactttctggttggcattacattgggccaataagaaataaacatacaaatttctctactacaaaaaaaaaaaggaggagattgaagataagctgcccttaaagtctggatatgggatggcaaagcataattctaattcttagactgacagaggtaccaatatgagagaaacagcacatcccagccattcggaagggtgttcacagctgtaaatccagataatagagagggtggcccaccctgctctccatctgccaggaccagataaacagtacacacgtcagcgtgaaagtgaaagtcgctcagtcgtgtccagctctctgcgaccccctggactatacagtccatggaattctccaaggccagaatactggagtgggtagcctttcctttctccaaggggtcttcccaaccaggtctcccacattgcaggcagattctttaccagctgagccacaagggaagcccaagaatactggagtgggtagtctctcccttctccagcagatcttcctgacccagaattgaactgaggtcccctgcattgcaggcagattctttaccagctgagctaccagggaagcccacgcgtgagcaggcaacccgacaaatctgaaggctcccctctctcagcccctctgtcctcaaagcctccaaggagattccagtttgtggttattcaagtataataatgtgtttggtacctgagcaatgcactatctcaaatcttttctatttaatgaaatgttcaagttgacagtcaattaaaactctgcatcatcaagcggctgacagatttcaacactgcctgcaattatgcaaaactgaaacaaaccaacagagaggggaagaaagaaaggaaaaggctaaaaccataactcgacaaagagaaccttaaaagggaaagttattcttcttgcctttttcacacaacatatgcatacctgaaaatacaaacatgtgcacacattcaaacccatacagacaagactgtcttgtcaatcactgatcaatattccattttgccagagacacctaacttcttacctagactccttaagtttcagtgagtcaaaggattgcaattccttcctaaaaaggataatgtttgtttaaatgcacacaaacacacatgggccttaactgctagtgaaaaaaaggccaatggtagccaggtgttgcaaaagagcaaagcatgccacaacctgatccttgctttctgctcttgaactcttgcattaattataacaaattacagggaatccaagtacagtttatatgtacaataagctccctaataatagcctataatttaatcaagcgttctttttaaactagaaaaactcattttctacaatacatcctagacagagaacgtcaatacgctgacagtacttctctctgtcctactatgtgctactgggtacagactgctctacggtaatcacatcaacggaattttaaagagctaaatacgtttccctgctgtgaactgtgatgccctaaagtagtgaaacaaggcaacagcggtagaaatacttcatctccaaaaaaaaaacaaaccacactgacctcaagtgtgtgatgttaaaacagaacctgagtctgtgttgccctggcggaaaaaacacaccgacttagaagagttcagcaattgctcagaacgtggagtcatcatctgacccagcaaccccactcctaggtgtacacccaagagaactgagaacgcatattcacacagaaactggtacacaaacagcaccatcgtctgtaacaaccaataacgcggaaacaatccaacacccatcaacccatgaacggataaaccaagtgtggtcgagtcatgcaatggaacaggatttggccacaaaaatgagccaggtattgacacactgctacaacacggataactccgaaaacattaggctgagtgaaataacgcaagacaaaaaaggccatgtattggataattctattcacacagaatgtccaagaacagacaaatccatagggatagaaagtagactagcggttgccagagtctgggagacaaggggagggggtatgactgctgatgttctgaaattagagagtggtgatggctgtgggtaactttgtatatatagtaaaaaccactgaactgtatactttaccatgattaaaatagtaaatattatattatgtgaattgtatctcaacaaaacgaaatatccaataaccctactcaggaggaagtcctgagacagcacaacaggctcttcagggttcactcggagctactttctttctagttttatgcctcagcaggcaccacacactgagttgccctgggtgtactgtgcttcccagtgccacgtcttgctgtttcctctag

SEQ ID NO: 26550 - DNA, 2893 bp, Bovine  19866880140512
  misc_feature (1)..(1): n is a, c, g, or t
nacatggaagcaacctagatgtccatcagcagatgaatggataagaaagctgtggtacatatacacaatggagtattactcagccattaaaaagaatacatttgaatcagttctaatgaggtggatgaaactggagcctattatacagagtgaagtaagccagaaggaaaaacataaatacagtattctaacgcatatatatggaatttagaaagatggtaacaataaccctgtgtacgagacagcaaaagagacactgatgtatagaacagtcttatggactctgtgggagagggagagggtgggaagatttgggagaatgacattgtaacatgtaaaatatcatgtaaggaacgagttgccagtccaggttcgatccacgatactggatgcttggggctaatgcactgggacgacccagagggatggtatggggagggaggagggaggagggttcaggatggggaacacatgtatacctgtggtggattcattttgatatttgtcaaaactaatacaattatgtaaagtttaaaaataaaataaaattaaaaaaaaaaaatacacatgtatcctttaataatttgcatgttttgtatagatatggatagattaagaaatcaagtttctaagaatccatttcatggtaacttggtgtactctggccaggcataattctcagtagtgagagggaattatttttcacatgtccaccaggtattctattaaatctttttaaaagaattatgacagttaattcatttcctggtagagagagaacattttctcctctagtttagggtttcaggagataatatggtatactagagaatttcagccaaaaaaaaaattcctggttcagaaatgatgcagattttgagtcacttaactatatgttcaaataaaatagtatggctctttcataggaaaattttaaactgtcaaagtggagtataaaacataagaaaatgaaaatatgacatatgctgaaaacagaaataagaatatgaaaataaacagaatcttgttctttcattcctaaatacaggaagacttattagatcaaagagcccataagtactcacaggcatattgagagtatgaattttttactatcctgaatttctctcagattcatgaacatcagtctttgtgacccaaatctccccaaaataaagtgatcagagggtacaaaaagatcaacattagagttaacaagagccacttctaagtttcgctgatacctagtatcaggcccaggtcaaaggcacccggggcctctctcacgggcatataaatggcatgaatgccaccaccttccctcactactcctattctcaagaggttcccaggctgccaaaataatggccccagccataatcctcccactgctcatgactggggtcacgtagaggaaactcatttgcactgcaacctatcaccaactctggatattcactcaatttcttaaagaaatgtttaatggtgcaaattttactttacttgatttgattttagtttttacttcttattcagtccctcctcctaggtcactggcaaagctcccctgggaggcagggccatttgctactctgggtttacaccattaaccaggtatttacggctggctgagttgggaaggaatacagacaggcgtcacttttctgccccatcctcaatttcacattttacctctactcactacttaggtatttatttgcaatactaacagaggtatgggcttccctggtggctcagatggtaaagaattcgcctgcaatacaggagacctgggttcgagccctgttgggaagatcacctggaggagggcatggcaacccactccagtattcttgcctggagaatccccatggacagaggagcctggtgggctgcagtccatggggtcacagagaggtcagacacgactgagcaactaagcacagcagtggaggtatactcccaatttataggcaggagttgagggtcaagaaaaggggtaaggagagagcaggctggtgggggatggagtgggaggcatagcgtctcttccccaaaaatccgcctggactctgttggaacacctggcttggtcaattagaaggaggtgaagaggagccaggcttcaagagctgtggcctcggtgacatcctggctcttctgcttttccatctataaaattgctgtgatgattagatcattattttatagtctgataaatagtaagccctctggatagaaaaattaggtcttcagaacaaaatttttcctttgaattgcctacttggtaagttaatgtgaaaattgaaaaaatatcttgtagatcttcctatgatatagaatattgcctttctaaagtacatacataattgaaaactgtgtgaacagtgtcagaaaatcctcagttcttgctctcccaaggcctagttcataaaagagaaaacttaattgctggtttctgcctaaggaaagaaaagtccattgcaaagttgagaaatttttgcttaaaaagaaagtgaaagaaaaaaatataaggggggaaaaagggtattagaaagaaggcaatggcaacccacttcagtactcttgcctggaaaatcccatggacagaggagcctggtccaggctgcagtccatggggtcgctaagagtcggagacgactgagtgacttcactttcacttttcactttcatgcattggagaaggaaatggcaacccactccagtgttcttgcctggagaatcccagggacgagggagcctggtgggctgccgtctatggggtcgcacagagtcggacacgactgaagcgacttagcagcagcagaggcagcagcagaacactgttcccactatctcagattatcacatgaagaatccaagcaagccattt

SEQ ID NO: 26551 - DNA, 2977 bp, Bovine  19866880440461
  misc_feature (1)..(1): n is a, c, g, or t
ntcgctttagtcgtgtccgactctgtgcgaccccatagacggcagcccaccaggctcccctgtccctgggattctccaggcaagaacactggagtgggttgccatttccttctccaatgcatgaaagtgaaaagtgaaagtgatgtcgctcagtcatgcccgactcttagcgaccccatggactgcagccttccaggctcctctgtccatgggattttccaggcaagagtactggagtggggtgccattgtactagaatgtctataatacatgtacagcagcacagtccacaacagtcccaaactgaaaccagtccaaatgtcctcacagtagaatgtgcaaactgtggtgtatgtctgtactggaatattaggcagcaacaaaaaggactgagatctaactctcctatactgttatatggatgactctcacaaaatggtgactgaagaagtaagagaccaaagacaatatattatattagtcactttaaaaagttttcttgttctggaaagatctcagatgaccagccattttcacatatgtttctggagggaccacagtgttttcaccgctggcatcatctgtgtcaacccactggcgaacatccatgggtgcagctgtcatgtcaggaaaagcctggtagcctttatgatcatgcccctggaggatatgaatgagttcatcacacatattctggaagtagtcaatgcacacatgatgctgagcaactctaacagccagccttcagcagggacagtacctatcagcaatccaggaatgggtgaagctgggagcttcagtggaaataacttcataccagcaaatggcctcattgtagcccagaaccaggtgctgaatttgatcaaggcttgcccaagacctgaaggactgaactttcaggatctcaagaaccaactccaacacatggtccgtagcctcaatcaagctagccgtggattttctaagcaacagggagcacatctattccaccgtggatgacgatcattttaaatccacagatgcagaataactggatctaattgggtatctgagatattttccagttggaccttttttttgcagcctcttgtctccagctgtgcatacaattggcgagttgacttctaggaagtagatttcatctaaaaatctcaactgacatccttttgaaatttactactactcttctgtgtttttgatggacttccctggtagttcagacggtaaagcgtctgcctacaatacgggagacccaggttcgatccctgggtcaggaagatcccctggagaaggaaatggcaacccactccagtattcatgcctggaaaatcccacggaccgaggagcctggtgggctacaatccatggggtcgcaaagagtcagacatgactgagcgacttctgtgtgtgtctgtgttaaaaagttttttaaaaaataaagtaaagctagcctatgttgtttgaagtcaggttaatggttactctgggggcatagagactgggagggaacaagagaaaggatgtgaggggctagcgatgctccaagttttgatctaaggactggtaaccgtacagtctgatttctgcacttgtatgtatcacacttcaataaaaatttacctaaaaaaatgactgatggtagagaaagaaggtagcaacatgacttcaagtggaagtgtctatgagagcgtggaggaatggcaagcacctggtataacaaacgataaaaggatagagagccctggatggcggtcgatttatgacagggaaagacagagctagctacaggaaaacgggatgtttagagaaggatttaaggtcaggagaaggtaggaggagggtaacagttcatcactgtctagctttctaggtcttgctaaatttggttgtgcaagagtgagcaaagtgccccagggagaggttatcaacaagcagtactgtcatcatcaccctgaggagcctaaagcaggactaccaggcaacagaagggcgcctatgaacacagacgctttaagaaaaagcctgtactctgcatacacttccagggccaggtatacaggagatactcaatatatgcatgaatatattctagacagtcctcagtagggggtcaagaataagatgtaagtggtataaaactaagacacatctatcagaaactacctgtaaaggcagaagatgttttaagttttataaagatcatagataaagaaaaatttagaagggcagagttctggcaaatgaaggatcagataagggaacaggactgggagtctaggagggagagaatttcaggagtggactctcccatgtctagtgttggtcgggagtgaaatgaataggaaaaggtccctggttctgaggtgggggttcccatggtaacctgcaaggggctcaaatgagccaaataaatgatgggcataatttctcaagggctccagatggaatggctaaacaaaaaatgatggaagcagtaagcagataaacagaatacaaacagaaacaccaggcacccaaaggtaatagaaatattaaatagtaattaagaagtaaaaatgtgtgacatgaatatttggggtgagtttttaaaatagaaaaaaaaaggttgattgaaaaaaaaaggcaaggaatctataagaagcagatattaaagatatttgaaaatcactggaaactggagcttgcctggggaaagcaatgacaatcaagaaaaaaaagtggaagggtcaaccttcttgcagacagcagacacccagtctgggacctgggtgaagggtaggagaagagaagcagcagctggaacatattaaacacagatatgggcacaggacgccactccagaagtagatgccagcctgggcttttggctctggatctgatcagggtggtttctttaaagaagaccctcatttgatggtctgtactgtcctttatcatataaagttctggtttcttaataaaatcataagaggagaat

SEQ ID NO: 26552 - DNA, 1473 bp, Bovine  19866880470646
  misc_feature (1)..(1): n is a, c, g, or t
nttaagtaactgtgaatagcaaacatttgagaacaaagacaatagaaatcaaagttaatgaaagcacatttagcagttgtcagtaatgacaccatcaaaaacaaaaacacagcagacttcatgaaattttcaagaggaggggaagggaaatggttagattaagagatgcataccactaaggcttccctggtggctcagaggttaaagcatctgcccgcaatgcggtgagacccaggtttgattcctgggtcgggaagatcccctggagaaggaaatggcaacccactccagtattcttgcctggagaatcccatggacagaggagtctggtgggctacagtccatggggttgcaaagagttggacatgactgaacgacttcactttcactttcaccactttgctcaaaatggcatatatccagaaatgatggagaacacaattattaactgaacttttaacacacacaatgtggatgattgaatattaccaatacatattgtaaatcactttgtccttctgcatttgaaaggtttagaaaatgatagttataatgctaaattcctttgtaatttgactatctcttcatgtaaagtatataaataaacatgtactatccgttagcttgggtcaagttctctggaaaccagatgcagagacacagagagtgtgtgaaggaaatttagtagcgggtactcttgggatcagcgcctatgagggagtgagggaagcaggtccgttgaactgtgatgcacagagccctcagctagagtctttagagtggcccagaatcagtgagtgacgtaaggcaactctggcttcatactcacatcagccagccgttggatacgaattgcccttgtcagtgggacataaacttggatgaggcaggtcctctgactcaggcagagtctcagctctgagaggtcagcagccaactgtctcggcagcctgtggaaagggtgccaagagcctgaaggggcatctgggtgacattccacagcactcaccccactacttgctatggagtattttctcttaggtaggacatatgtcttcatgttatccttttctgctaaagaataatatccattaacattagggagctaggcagatcatattgaaggagattttgttagggctatctgagaatagtgtatagaagaagaaaataagattaagaaaatcaaattaccactgtcctagggcagattctaataagtacttttctagacattcagtaatctgtatttattctttatatcaattactgtaatatccgacccagtgacctgagagatttaatgcagctactaaaaaatatgcctaattttcaataggcaacagttcttgcttgataatagctgtgctaatgttacatttgcttccttgggactctcagctttatcatttttttttagaatggaagtgatgtatggcccctcagacccctatgattatccttattccatag

SEQ ID NO: 26553 - DNA, 4072 bp, Bovine  19866880494938
  misc_feature (1)..(1): n is a, c, g, or t
nttttttttttccccttcataatatctctggtattcatcctgtctgtttagtcaggttctctagagagccagaattaaatagaatatatgtagatagccaaagagattttaggaaattggctcatatgatggtggagactggcaagttcaaagtctgtagggcagatgagtagtaagtcagagtggatgttttgaatttcacagagtaccaggctggagacacaggcagggattctatgtttcattcttgtggagaattccttctttaggaaagctcagtctttgctcttaaggccttcaactgtttggatgagactcatccacattcaggaggctaacctgctttacttaaagcccgctgataatattttaaatgttaatcacctctaaaaatatcttaacagccacacctagatgctgtttgaccaaacaacgggatacattggtttgccaagttaacacataaagctagtgagaagacttccatttctatttatatatatacataacttagacctatgcttccatcacctcatatttgaaattattgaaacacacccacactcaccccagactaatttgcctctttccagtttctccattattcacttttcttatgctattgctatattcctaaatattattgccttgaagttttccactgtcttacccagcctgtcaaattacactgactcttccttcattccattcatgatgttcttctcaccatctccacattgagtggctcagtttgtgctggtcatgtcatagctgagctgtaatgtttcctcctttaattttctagtactcttcttattatgggtccattcaatttatatctgctgcaattcccatgatgatcttgtatctctaaaacatttatgccgtccatcaccaatagcttacagtttaacagttagttgctctctcattgtttaatgtatctttgtcctctcaatcaaattgcaaagtacttgaattaacagctgtgttcatttctcttgtatgcaccacttcgcctagaacagggctggcaagtggctgcatgaaattgataattgcccctttcatgtatgtattgtggcaaaaaatcaagaacacggtgcaattcaagtttaaacaatgcatagaaatgacaactcagggccatctttgccatactgaattaggtctctgtggatgaacccaggaaactgtattcttcagaagttcctcaaagtgactttgattttgcaagtctaaatattggtattcaggaattactatatagacttcatcctattttttatcaccccattaattcacaaaagagttctgtgggtttttcctttaactagttcacaattatgcccttattgtcattgcctctggtaagaatgtaaggctttccttactcttacccgatttacatcagtgtcctcttagcttctatgcttcccgtcaggttcctctccagtaatgccttcaattagcagtcaaagtgtttgtgcttaaaattcagaagtttgattgtactgtttaagcataaattgctttacatttttccctattcagagtgaagttctgtcttctttacatgtcttgtaaagctgttcaaggaatatctgcctacctttatagcctatgcttcttctactgtctctatccatacaaagctacttgaaatagttttatcttttcgggagtctttgttttagtacatgcaaagaatttgtgctgtaatccatgccatttgttcacgtaatatttattgaattggtactatgtatagtctaggcactgccatacactgaaaattctggtattaaagatacagtctcttcctgaatcctactgctcagaaggaaaacaaaaactcatttaatgatagctactatggactgaggatatattatttaccaggactggactaaacattttgcatgaattaccacttttaatcttcataactacattatatggagctggcctagagtccaggtctttggaacctggagcctacattcttcactgctacacccctctgctgctatgttgaaagaattaagaggaaccacagtcatatcacaggaaacttaataaattactcatggtattgtctccttgattagcaagaaagaaaattaaaaataataaattctaatactttctttactccttctttacactgccctgtaactaatattttacttatttttgtagcatcagaaattaatgaagtgcctgtcatgtggcatgtaccaaataaaatttgaaagttcctgttcctttccttcagccttctcagatcatttcactagccctcagcatgtcaacactgacaaagctaagtatgaatctggctctagccttttattagtcatttcttcttaggaaagttatttagcctcttgttcttagttttctcctctataaaatgaaaaatgcaatagcttgtaagccatgctgaattttaataaaaggttaaagtaggaaaatgacataatcaaagatttgtgctttggggtaattaacactagtaaactctgtgtagttttctctgtaaaatactttaatggacaagactatgatgttaacagagggtatggaaagaagaaaactcatgcgtatctatgtaatgaagtcttcttgctgctgctaagtcgattcagtcgtgtccgactctgtgcgaccccatagatggcagcccaccaggctcccccgtccctgggattcttcaggcaagaacactggaatgggttgccatttccttctccaatgcatgaaaatgaaaagtaaaagtgaagtcgatcagtcgtgtcggactcttcatggtcccatggactgcagcccaccaggctcctccatccatgggattttccacgcaagagtactggagtgggttgccattgccttctcgggaagtcttcttacccaagtgataaaagaggtaagattcattctttacaactccctctttatagttacacagggcttgacataaactctagttttcaaacttattccctattgtaattctcaaataatttgaatcactctgtctcagtactgaaacacttatataagataatagctaaagtaatttcttacggattctgtaaggaagatgactaagggagcaaaaaatatttatgttaagggataaagcatataattgtgatacattcatggggaggatttgaagtagcctaaatcttgtcttttgagatatgtagctgagagataattaaaaattaaataagcaagaaatagtaacaaaagcattttatttaaaaaaactggtgctaacagaagaattaaatataaatgcttaacattggtctttttaaagactgaccccagaaggcaactagatctctgagattgaggcttttgataatgaagagttaggggacactattctgatttcttcaggcagctctcaactaggttctaaataggtgggttcctgggagacacaaacctacaaaggtaaaggaagccagcccgcaggaaagaactcccttccagacaaaggcagtgagttttgcagatatccaaggagagataccctactctaagagagcttatctatttttaaagttaaatacccttttaagttctagggttttacaacaggatagcttttttaattaaaaaaaatgtgttaattggagttctaattgttttaatgttatggtaaaaatatatatatatatatatataaagtcaaatttactatcttaaccattctaagtgttcaattcagcaatgctaactaaatgcacaatattctacagcagatttctagaaactttttttcttgcaaaattgaaactctatacctattgagcaataattctactttttcctctccttcagtccctggaaaccaccattctgatctttgtttctaagagtttgactactttgctgctgctgctgctaagtcgcttcagtcgtgtccgactctgtgcgactccagagactgcagcccaccaggctcccccgtccctgggattctccaggcaagaacactggagtgggttgccatttccttctccaatgcatgaaagtgaaaagcgaaagtgaa

SEQ ID NO: 26554 - DNA, 3429 bp, Bovine  19866880578558
  misc_feature (1)..(1): n is a, c, g, or t
nattttttagatcattgcttatgaggccttgaactcacaggccttatatccacctctctaccttcagtctaaaacacttgcctacttgttcatggcattcctggacagccctcttcttcctctacattcaaatcccttcctactcccagcctttatccatgttgttccatctgcctagaacactctttctccagctctttgcatgactggtttcatcctcagaaactcaagccttccctgacccctcctgataagatggccaccccgagggactctgtgatcattaccccatttattttctttagaacattttcccaaacaaatacttatttgcttatttagtgtcttccctacaagaatgtatacactgtgagggtagacagcttgtcttgttcacagctctttccccagtgcctagcgcagtgtagaacattgaaaggagcttttaaaatactggttgaatgactcagtgcatattaagagaaggaacaaatgagtgaatgagtgaccagaaggaacatctggtttcccgatcttttgttggctcatctcagaaagtttttgatgatgacttagctatctgtggcactagtgggaaggaacctgtctgccaatgcagaagacataatgagacacaggttcaatccctgggttggtaagatcccctggaggagggcatggcaacccattacagtgttcttgcctggggaattccatggacagaggagcctggccagcgcctggattcttctgtatctggatttctttttctgacattctgggtcctcttacttgcagacagggtgaacgtgtgatgactgtttggctcttcaaacacccactctccccaccttgcaactgaagtacaaacccaggcttcatccttagctctttctttcctttcctccacacctagttaatcagccaccatgatgccttacgcctgcttcctaatatgagcttgactcttctgcttctgtctacgtccactgtcaccctgctctacatatcacaagtttccctgcctggactgctttagtagcatcccagagtcttgaagccttgcgttaatatttaatcaaatacatctctgacaccaaagccagtgatgtgaaaaaatgtagatcagatcgcctttctcctctgcttacattccttagtaacttgtcctgacactcaggtaagtcttcacctgactcacaaaaccttaggaagttgcccttatctttcacttcttttgtattgcttccccttctcccccagctggcatattctaaattctggctgtgatctttcagtccttcaggccccatggactcttctttcccttaagaccataggatgcctctgggtttgggatactgtttctcccccacttcatctggccatctcctgttcatgcttcaggctgcccaaaggggtactgctcccaggatttctctcctgtcctctctgcccagatgaggcactcttgctagatcctcctgaggcagatacgactttctctctcccaactcttgtcccttctagacacaagagttcctcagggaagagtcactttctagttggttcaccatttctggcatctggcagtgcctggcacataataagtgcttaataaaaatggcgctagtggtaaagaactctcccgccaatgcagaagacataagagatgtgggttcaatccctgggtcgggaagtttcccaagaggaggaaatggcagtctacttcagagttcttgcctggtgaattccatggatagaggagcctggcgagctatagtccatgggattgcaaagagtctgtcatgactaaactgaattagcttgcaaaaatgtgttgacatcaggcatatccctggattcttctctaatacagtcagtggaggttgttgggagaccttatttctctgtgctgttccactttgattctcacttttttctttttaaaaataattgtatttatttatggctctcctgggtctttgttgctttgcgtggactttagcgagtgggggctacactcgagtggcagtgtgtgggcttctcattgtggcggcttctcttgctgcaaagcataggctctgggtgcgtgggcttcagtggttgcagcgtgtgggcacaatagttgcagttccccgggctttagaccacaggctcaatagttatggtgcacaggcttagttgttacagggcatgtgggatcttcccagaccagggattgaacccatgtctcctggattggcaggtggattctttaccacggagccaccagggaagcccactgatacttactcttgacttcactctgtctgtaccctgcatattgccttggcacctgggtacccctccacccgcagtgtacccagactctggttcctcaaaagccaagttcagtttagaggcggctcttctcagcatactctgtcccactcacctttgctcaattcttttgttagatttggcagcaatcagagaggaaataagcatttttaatgcccattgttaaacagaaggaaactggagccccaaaatgaagtacttgcctcaggtagccattcttataataaagaagtcttaggtcacaggttgtccatgtgttaaaaacttttccaaattctgtaactccataacaagctaaacagaaggaaatgaaattctctgggatgacattcagggctttggtagattgccactctatcttgcccacccttgaaaaaatgcatgacaaaggatacttaatgagctccatcgcccctcccactcactttctctggaaagccctgatttgaggtgtgaggtccgcctgcctttggagtggttagtaaaactcctggaactcgtctgtcagcctaggtctcagcagttcgatctcattatgagaatctccctccccttcactcccactcagacgttcttttctgtatcttgcagtttgacacttacccatgaaacatcaagaaaagtcacttaaaattggatttttttttcagtcagaatgtcgaaaataacaagattcagaaggagactggagtaataaacttgacccctttcttacctcctctggccgttctttggcattcccttctcagcattgccatggaaaccgctgactcctttcttgtcagggtgattataccttttcagattttgacaactggaagatacaagtgaaagaaatccagactctttcattactgctcccccttccactgatgctgcttatgcaaattggagaaaatgggctttgttatgttttattttgtattctgctgacaaatacagtgcatctgtgaagtgcatgtgtgagagaagactggttgcccagacgtttggggaagcgtcggattttcttgcttttattatattactttaactacctgcttgacagatacagtaatcattacagattggaaatagctttgtcag

SEQ ID NO: 26555 - DNA, 956 bp, Bovine  19866880623647
  misc_feature (1)..(1): n is a, c, g, or t
nacgaccatccaccaactgtacgagatgattgtgaggccatcaccacagggcctgtcagcagtttagtggggtcttaaccatttttcctacttatgagtttcttttccaatgagctatttgcatatccgccgtctccccactgtggctgcagacacggtttgtaagacagttagggtatgggtgcccttaatagattaaatacctgggaagcctgacctcatctagttatggataagtctgaggctaactaaccaacatgaggatcaaatccaaagttaaaactgattaccaactatagtttcctcaattcagaatcaagaaattgagtctggaaggggaggccaaagggtggactttggctgttctgttgggtttcagaaggagttttactagctcagattctctttgcccagtgtggtctctctccttacctcctctgtcttttaatggtgcaactaaaggtttgattctcctgcagctcacgggttcaagggaaatgtctgtcttctatattgctttctacttttaaaaaaaaaaaaaggaaagaaaagagtgccagtaaaactcttgtttttttccttccgatttccatggacagtaattttccattaagtcctgatccttcaaggcccccccttttaagtgtgctgcacgtcatctgaggtagaggcaacctttccagggatctgatctgttggccagatttactatgttttctgtgatgaaaagtatttagctgccttttaaaaccatacacttcctatggaaagaatatacacggggaaataatttccattcttttcttcttctgcttcagaaggtggtcctgggcaggcagttgggcagggcgtggtctgtcccataggtgcttctcaggacttctcagtgcctccttggtactgaacacgtatcaccctggttaggagtccttcctctttttcttttaaaggtcttc

SEQ ID NO: 26556 - DNA, 3286 bp, Bovine  19866880636939
  misc_feature (1)..(1): n is a, c, g, or t
nctcatgggagctgctgtagcacagggagctcagctctgctctgtgatcacctagaggggtgggctggggcggggggaggctaaagaggaggggacatacgtatatatacagctgattcacatcgttgtacagcagaaactgacacaacattgcaaaacaattatattccaattaaaaatagagttagttggagcaatgctgtgtagtttcagaagtgtcacatataattatagttgatctgcattcctcaaggaaaagaataatgacctcagtaatttttccatggagtcatatgcatttctgtaaaaggatttatctgtttcattatttcttaagctctaatggagagtaacaatattcaatgctgagaattgatacaactaattatctttttctgtgaagccatgtaccctcttttgaggaaataatgtttccatttagaaaataaagattatttatatattctaaataacacaataatactgatatctgagggaagtaaaataaaaataagatgtgatcacaaaattcagatggtaaattcctaagaaggtaggggatggtgcatccttatgtatagatgtggttcagtttgctactgctgactttctttgagtttgaaagaccatcagtatcattcttgtactgatgtacatgtaccacagtttgttgggatggtcttgtccaaatgtgtgacaagcaccacttcagcccctacatcagctgccactgttctctgtagtgccagtggcactctgttgttgctggttaatgggctaagttctgtctgactctttgcaaccccatggactgcagcataccaggcttccctgtccttcactgtctccaggagtttgctataactcacgtccattgagttggtgttgccatccaaccatctcatcttctgtcatccccttctcttcctgccctcagtctttcccagcatcaggactataagttggctttttgcattaggtggccaaagtactggaacttcaacttcatccaaaagtccttccaataaatatttaaggttgatttcctttagaatctattggtttgatctccttgcagtctaagggactctcaagtggcactgtagctagccatactgaatgaatacccaagagttgctttttttttaaccagtgtactgtgatgtgcttagctgctcagtcacgtctgactctttgcgaccccatggactgcagcctgttcctctgtccatggggatttttgaggcaagaatactggagtgggtttccatgccctcctccaggggatcttcccaactcagggatggaacccaggtcttccgccttgcaggcagattctttaccatctgagccaccagggaagccctttttaaccaatatcatttctttaacctctgaaggtgtttgtgcaaggaacattcacttgagtaagttgaccttatatcatattacaaaaactccctttgattaggaagcagccttgaaagactgttcttggaacttgtatttggccccagcattgtgcagggacctgagaatatggagggacatagttttcttctgctaatgacctggcaacagcatttggtcttccctggtcttcactcagggtggtaatgcctcctgatagtgaaagagctgggatttaacagctctttatcttgtctagagatggagaactaaagaatagttgcagcctgagccttgaaaagcttacagaagagtactttatcattattaggtcttatgggagaagtgcttttaatatgaaaggtttcatatgccttttgaaataagttagactttattctgaaaaccttagggagccattgaagaattttaactaagtggaatgaaatatcttgtcaacaggaaggcagatggattataaacaaagcctgatgctgataaatcagttgcgagattattgagattattgatggaatccaggtagtgcagaatgaagagtctgtggtggcagcagaatagagatgaaataaggatttcaaaattatttgggggatagaagagataggttaccctttagccgggggcaataaagagaaaggggggatggcattcatgattctagctttggatggaattacaaaacacaggagagtgagatattctgagtagacgagaggactgagaatgtcattttggacatattgtgattgagggctgtattggacatcgaggtagctcatcaagtgtagagaattggatatgcaagcctggaaagtaggaaggatgggagctgcagagagttggctgggtgggggctggggagagggcattcatcacacgacagtggaagttctgattatagatgaattcacctaatgaaaacttggaaagtagtcaaccatagagctaaaaacggaacctggaatacagtagttaaaagggtggatggagagagcataaagaatggggtagcaaataatatagttaaataccctgattcatggaaggtcaaaggcattgaggttttgaagagaggatggttcaaatgatggatcagactggctaaagacaatgggtaaagaaaggaacccaagggaagattgacacagtaacctaaaaaataaattagtgagagttctctgtgaggttgtgctccaagactgccactcctgtagcataaaatttaaatatttacccctggattcttggaggaggaaatggcaactcactccagtattcttgccaggataatcccatgtacagaggagcctagtaggctacagttcatggggttgctaagaataggacatgactaaaaaacaacaataagcaactaagcaacaacaacaactctggattgtacaatacactggatatatcctatgaacgttctttaggcacatcaagaacaattccaaagggtaatattcacagaatattttatggaaatgggagcgttggcgcacaagtaataaaaactgttgactgagcagtgcagcagcattgacactgggaactgctgagcatgcgtccgtggtaaatgtggacagtgtggtgggggggtggtgaactgtggagggacagtgtcaaagaggcagggaaaggaaagctagtctcgtggagaccagttagggagttcagttcatgtctaagtaagtgttcgtcacttagtcgtgcccggctctttgcgaccccatggactgcagcccaccaggctcctctgtccatgagattttccaggcaaggatactggagtgggttgccatttccttctccaggggatcttcccaacccagggatcgaacccgggcagatt

SEQ ID NO: 26557 - DNA, 802 bp, Bovine  19866880744592
  misc_feature (1)..(1): n is a, c, g, or t
nccccaaactactccaaggtataagcaaatatttagcattcttatttaaatcagaaaagatatattgtttgagttataataaggctaaaatttctaatgggatcttgagtgtaattagcagttactctgattagaggagcttcccaggtgatgctagtggtaaagaacccacctggccagtgaaggagaccaagattcaatccctgggtggagaagatcccctagaggagagcatggcacccatgctccagtattcttgcctggaaaatcccaaggacagaggaacctagtgggctacaatccacaaggtgacagagagttggacacaactgaagtgacttaacacacacacactctgattggaagctagatgttttctaatgtggtcttgaaattaattgccagagtcaggatccacctgtggcaactgatctccatgttctaaatgaagcagtggttaccactactgattggatacctctttagcaaagttttgagataccagaagtttaagaatttggaatcatctccatcatcagaatcttctctgtgtgttcatcgctcactcgtgtccgactctatgcaaccccacggactgtagcccaccaggctcctctgtccaaaggattctccaggcaagaatactagagtgggttgccatgcctcctccaggggatcttcccgacccagggatttaacccaagtctcctgcgttgcaggcggactctttaccatctgagccacaagggaagcctaggctactcaaatatgagggctaataatgaatgtaatatttttccag

SEQ ID NO: 26558 - DNA, 788 bp, Bovine  19866880765911
  misc_feature (1)..(1): n is a, c, g, or t
ncttggggcagagaagcttaaaaaaaaaaaaatttgaggatttttagcaaaagagaattcaaatatttcaagatgtctggaaccttaatagcaaactgtcaagtagctcagcagcaggtggggacagaatgggtataagtgcattcttcaccaaatccacccatgaccgctgccccagagactctgagggccatcattccacagtgggaacagaagggcaggctaaatgtagtcagtctaaagacccccatcccctccccacttttactgttctgcatgcctcatatactttcctccatcactttgacttgttgagtttattgggatcagtcttgtgattaagagccttgtaaataaatacaaaacatttcaccagttcactcaaatgttttactgcctgacctcctgcttggaggttacacatggagccgatgaaaagaatgtcataagcattcttttctacccacctagactaaattgttatttaccccaggccagtgtctccttaaaggagctaaaatgccttccttgctttatgtaacacaagggaaaaataaaacagattcacagtggctgctgggtccacattccatttcacagaaggaattttagggaaagagagtcatttgttttcctaagtagagaataaaatttatctttgcaagtggcagtttaaagaaaaagagagagataaatgcatgtttgtttcaagtttttggtgaaaaggcatgaattagtacaaggtccatgacacatacgacatgttaacagagtaaataaaaagacct

SEQ ID NO: 26559 - DNA, 1408 bp, Bovine  19866880790097
  misc_feature (1)..(1): n is a, c, g, or t
nctctggacctggtctattttcctctatgacttgtcaaccggatcttatttgagactcaactggcttatcaggtacttcagggttaggactagtatataaagttttcatgctctatgcaatgagatgggaatggcaactcacgccagtattcttgcctgcaaatcacatggatagaggattatggcaggctacagtccacagggtcacacagagtcagatacaacaactaaaccaccacctatatgcaactcagctcatagtgtaacaagtattgttagcttaaggaaaaaaaaatttaatgtcttgactgtctatttacaagactgtgaacaattctctacaattatataaatggaagacatgctgagtattacctgtaacaaggtccacctgggaaaagatcaagatgctttcatacaatggaatattactcagccataaaaaggagcaaaattgggtcatttgtagagacatggatggacggagatagtgtcatacaaaatgaagtgagaaaaataaataccgtatattaacacatatatgtggaatagagaaaaattgtatagatgatcttatttgcaaagtcaaaatagaaacacaaacatagagaatatacagataccgagtgggaaggtgggaaggggtggcaggaactgggagactgggactgacatatgcacactattgataccgtggataaaacaggtaactaatgaaaacatactgtctagctcagggaactcttagtgctctgcggtgatccaaatggaaaggaagttcaaaaaggagggattatgtgtatatacatagctgattcattttactgtacagaagaatagtacattgtaaagcaaatatactccagtaaaaaattaatagaaaagaaaaaaaaaggatgctttcaaggacccagggaaccacccagccagacctactgagtggaatcttccaataactgtaggcagccaatgaagttgatggcctggtattagtaatatctcctctgggtcatgcccttgagcacatggcagccttgggatgacttatgataaggatattgcgccagaccacacccccgagcaactgaagaaacaggagcaaagacaggatatcactttcagtagatgaatactaagcagcttcatattactgaagcattacccagcaatacaggccacctagctaaggacaattttaaaatataaatgttagtatttgtcaaagtgtatacataaatctgaactgaaagtcaacagcaaattatcttttacaagttcatgtcctggaaaactgctttaccctgattcgaggacacaagcacttgttccagagtttttggaattgatatggcttagaatgcctgcgtatttacaaaactctgtcatccataaatagcggaaaacacca

SEQ ID NO: 26560 - DNA, 707 bp, Bovine  19866880881627
  misc_feature (1)..(1): n is a, c, g, or t
natcagcaataattatgtgttgtttaattttatctgcatataaaatatttctatcttctgggagcaaatatacctgacatcacctactgcaacaaggtttgcctcatgtctttttacttatttattttagcttacagttgagtctctgagcctccccagtaaggacaagcctagggcaacggctggtttctgggaccctttgttgttcagtcgctcagtcacatctgagtctttgccacctcagggactgcagcacgccaggcttccctgtccttcacgatcgcccagagcttgttcaaattcatgtccattgagtcatctcaccctctgtcttccccttctcctcctgccttcaatctttcccagcatcagggtcttttccaatgagtcagctcttcacatcaggtggccaaagtattggagctccagcttcagcatcagtctttccaatgaatattcagggctgatttactttaggactgattggttggatctccttgcaggccaaaggactcttaagagtcttctccaacacccagttcataagcatcaattcttcgacactcagcctttttttacagtccaactctcacatccatccatgactagtggaaaaaccatagctttgactagacagaactttgttggcaaagtaatgtctctgctttttaatatgctgtctgggactctacctattttgaatacag

SEQ ID NO: 26561 - DNA, 1454 bp, Bovine  19866880898871
  misc_feature (1)..(1): n is a, c, g, or t
natcaacgactggagcatgaaacaaaacgcagttagtagaaggggcagctatgggagtggcttggattaaagtgatgactgtatataaattcaagacacattcagggcacgggtcaatatggcttgataataggtgggtatggagttgaaggagagaagacaacatcaaagatgacttgcccaaccagatggatggggatgccatttgcagaaatagatgacactaaagaggtccaggtctggggaaagatgatgagagtcttcgctatgttgaagtgcttttgagaagtggagaaatccacttctggagttagctagatgaatatggaactcagagagaatccaagtccgagagggcaaagaaaaagaataaagaccaggcagtgagttttctgtcaatgcaccaaagtatcaataatttggaaaagaatgacagataaaaggaaaaaaaaaagttgtaaactgagaagcataaaacagtgaacgtattttgtaagattaatcttaggaaaataaacgttttatgaatcttcgatatataataagaggtggggcctagtgaataaatggtgttgagtcaaacaaaagagcagagtcaaaagtcctggtcattggaactaatccctgtcttttaagaaggggtagctgagatttgggtggggaagtaccatgtgtgacaaaagctgtataaacctttgaggtagggtgggatgaatgtggctcctggagttatgaagctttcctcttattaagataaccataataagttactctcaaaagttccaacccaaagtaaccaggttactccatgccatcttggaaccaacacatgagcatatgcaaaaccggtaagtttctctggaaaagacccttttaagtaaagtcatgctgaagcaaaaatcatatattaattttaatgcagttatgagtattcaaatagagacatcttttactttatacaaaagcaaatttatactcacactttgataaggaacgcaaaccacaaataagttatgatttttactagaacagcaaacattttttaaaggaaaacaaaagttgatctaggcctccagttcttaggcataaatagctatctcaaatcttcagaatgtctacatttcttttttctggtgttccatgtaaagtttttcttgatctctttgaactcctagccttcagaatcaaagcattctatggaattttttatatatagtgaggtgggatttagttcttcaatcatgtgttccttagaatctgagaaagaaaccaagccttatagcctgttatttttttgaaggtcatgacatattattcaattccctcttggctttagaagtttcactttttcctatattgcaagaatgaaatattattggaaaaaaaagactgtgtgacatgaactatggtagtagagtacagagatttatgtaacaaattaaaagaactccaaa

SEQ ID NO: 26562 - DNA, 1277 bp, Bovine  19866880946683
  misc_feature (1)..(1): n is a, c, g, or t
naaaaagagaaaaggctgttcaatcagcatctccaaggactaagatgatgtcaaccagactctcgataatacttcatcagtggagagttgagttgagttgagttgagttagacaatcagcttcttgagggcaataaaaagagactatcttatgagctttctctatcagcacctgggatagttcctggtccaaggaaattgtccagtaactgcaaatgtgttttatttcacctgcatggggttaaaaaatagtttttaaaaaggagatttccaatggacagaaaactcactggactggttcacagtggcatgcctgctcaggcttaccacagtctgcaccgctctctgttatatctccgtagagtccatttcactccacctccgtggccagtgtctgttttgatcgataaatgtcgctcccataacagtgaaacatcattaatagcacctctacatgtaggtcacctgccaattccccacaggcctttgagactgccacctctcccaaacattagccatctctccatctcatccacaggtgctcatctgagcttctgtgccctatgtatcttcttcttcctctgccccatatatctcaaaatatttggcttgttgacacccttatgtcacctgtagaacatggcttttttaatagcctcattcccctggaaagccctaagtaatttgtccagccttgaagcttaatcacacctcctagtcatcttcattgttggttagtttccatgatgtcttcgcagaaaaccccgcttttgctcacttctctggggctccgtctacccctatggttgccgtttattactggatttgaattctaaatgtttgggtactatttgtttacctaaaattcaggcaaaataaaacaagaagacaaagttttattgcagaaaaatatcctatagatcaaaaaaattactttcctaaagaaacttgaataatcagcagataagaaagaaaatcagaagcgtaaatttttggaccaattttctaagggttctgtgtaggccaagaaaatatctaaagtactaggagctccatcttaacactgaactcctgtggtggccagaatttggctgcatttcaaaataataagcatttggttcagaaggctgtttaaaggaaataaaaaggcataaaatctcagtcattcaatatggtttgtattagaataaattgattacccaaaacctaacgtgattagagctctgccaagaggctggcaagcaaccactgtgacatagtccaaattctaatcagtta

SEQ ID NO: 26563 - DNA, 1061 bp, Bovine  19866880955865
  misc_feature (1)..(1): n is a, c, g, or t
nttggctggctctgagtcaaaagggattgcagagcagtccacagagaacatagtccattcttgaatgcagagcacagatgctatgcaatcagcagttttgtgtcaaatattttaactgacactgcaaccgcctttagaggttgactcatctgcagaatattatcctcatctggtgtaacactggaaggcactgaaaattgataatgactgaatctcaattagacttgagaaaactggtttgtttgcccaaaacctcacagctagcaagtagctagcttcctaccatatgatgtcaattcacttctagcgacagagacttcctcacttcataaacaagagacttccgctaagtgggtcagtctttttgtttatattaagtcccagggctctcatttgtctacacagttgtataagggaggctctgaagggttaactagcttccccagtatcatacagttatttagaagcagagtcacatctggtataatcataaagaataatgtctttaaaagcaaataggcctaggttcagattctgatcttgccattgaactaggagtatgacttagggcaagctatggagcctgtctaaccatctgctttgtcatctgtaaaatgaaagtagtaactgtgctttctttataggtttaaatgttaaaggtaattgcaaatattatgtagcctcaattacatgccttgcaacaagtcttacaggtagacagagtattattttcctaactaataaaaggcagatataggttaaataagttgcccaccatcctataacagtaagtgaggagttcaaattcaaaaccagactggttcagaagcctgtgaccactataatactctgatataaagtagttagcacaggaactacaatatattaaacaattaactcagagctccttcaattacaccatgcatatccttccccatttctaaaactgtccaaagaatgacattccatactgttctgcaaagtggcacagccagattgctcagtcccgtgttaatcgtgatgtgctgcataaaatcagctcttccagaagaaaacaatga

SEQ ID NO: 26564 - DNA, 1524 bp, Bovine  19866880977078
  misc_feature (1)..(1): n is a, c, g, or t
nccaaggaggattcccagcccatcattgtgaacagaaagaaacctcacaatcaatgacacatcattctcttacaacacttattttagactagagattcccatggctggagggtattgccttggtttgacttgtcacttgccttttgccagtgtagaatctttgattatttctcgagtctagtggtggtgtgtgaaagttggatagactagcacttttcatttataagaaatgaagaaagcctcctctttatgttgtcctgctctgaagataggaaactgagttggagaagatattgatagaatcctggtactcagtggtctcccctttctcctctatccatactgagtttcctggtcaccagtaatgattagatcctatgggtcaaaccatgggacttaatactgggtggaaacttctgtttttatcatagtttctcagaaagtgtaattgattagttagttactttcattccatcattcattcaccaaacatttattaagcccatagtcagaatgtccttctcatttctggggcattacctcgttgactgaactggtttcttttgacagttgctgtggaaatgtggagctacctttaattaaggattctatccctaactatgttatatttcctcctcccactgcagtcactgatcttttggccattttcataggtttgcctttttgagaatgtcatgtagttggaatcagacagtatatacccctccacactggcttcttttgtcgagtgacatgcattgaagtttcctccgtatcttctcatgacttgatagcctagccacagggatgatcctcttgccagcctcctgttcgttgatttttactcattttctccttcaaaccaggcatattgctaacagcagtactgcttttccatctgctagctccccaacgtttgaaggatgttatgcaaactctttagccacaaagctggctctttcccaggaagacagatctctgggcagttgactcacccaggttccaggtgtaattgaagcactctttgtcccacagtgttgttgtaggtggtattacgaacatctgattttctttttcccacagtgttgttgtaggtgatattacgaacatctgattttctttttcccacagtgttgttgtaggtgatattacgaacatctgattttcggggcaggcagatgtgtagttggcgctgacgagtcaagacatatttattgctagtgttacggggctgcgactcccactctacagcagtggtgtagacgagccatttgcccgtgtcgagtgctcattcgaatggactttgttcctccttgatttgtgctgcttttgccaccaggaggatttacttcatcctgttgttgatcatagactgtgattcatccccaaattctttctttgcctcttggtagctcagaaagcagcgtaaataatttgcaggtaaacaaaggattcacatgctgaaagagtatttatttatttttattaagtctatttttttaagcagttttaggttaaacaaaa

SEQ ID NO: 26565 - DNA, 1490 bp, Bovine  19866881031834
  misc_feature (1)..(1): n is a, c, g, or t
ntgacttcactttcacttttcactttcatgcattggagaaggaaatggcaacccactccagtgttcttgcctggagaatcccagggacgggggagcctggtgggctgccgtgtatggggtcgcacagagtcggacacgactgaagagacttagcagcagcagcagcagcagcttgtgaaaacagaagtatattcaagttagagggattcccaggtggcagtgggaaagaatccatctgcaatgcaggagaccctggaaatgccagttcaatccctgggtcagaaagaccctctggagaaggaaatggcaacccattccagtattcctgccaggaaaagcccatgaacagaggagccggctgtgctgcagtccatggggtggcaaagagttggatacaactgagcatgcacacatattcaagttagagtgatttttttgtgtgacccaattcaattgacaaagattaaagagcagtcaagacacagattgacgctccttagctttattgtatgggcaaaatgcacacacttagctccacatttgatttttacattcttacagatagtctcaaaatgaaataattaattactatctaatttatactttgtttttctttgggtacaaaaagcaggcatgttttcatttttccaacattatctgtccaacctaatttctaccctaactgaaatataaattctcatatatgatagcataatttcttccatggcaacaataaaagatgtgagagtattcctcgctgcaggtgaaaataatcataacatattgataagccatcttaagatgccattttcatgtaaatggccttataaccgaagagagaaaggagagaaatagaagcaaacgaagtggcattcagcaagcagaaatgcttggaacacaacatttttcagtggtttcaggaatgttgaggaagggtcaaattgaaagaaaatgtcagatcgtgatgcctcctgattagaatttttaaataaataatatttctttaaaatttactgaggaaaaaaggaaaagagctccctattccaagagtacaattaactgatttggcttctgtgtccctttgcaaattctttggggacaaaatgaaatatacagagttaaaaataagaagtgactctggagcttgactatagtactagaaatgctgtgggaatatttagatagtcttctagacaatgtttacgaactttaaggaataaaatttggaccctgaaatggaaatttggacaccttaacatataccaacttcattcacttttcaactcttatgctaccctaccatctcctgaaggaccagaagctgtcagtaccagcaagcaaaatataattaaagagcatgagtcaatgagtcataaatctgttccatttgaggcctgactcaaaggacatcactcatgggccctacatcaaggaactaagtgagggtggatccaggagaaggcttgatgttaagcccctggaaggcttcc

SEQ ID NO: 26566 - DNA, 1232 bp, Bovine  19866881111145
  misc_feature (1)..(1): n is a, c, g, or t
ntatcgttctacacatagaaaatgtcagcatcctgatgtttggttttgcattattttacatgataggtatgtgggagtgagatgtgtgcagcgtatgaaaatggaatgacaatcaacatactttgatagtgtattaaatgcaaaaaataatctcagattcttcatgaggtctcaattagtatagaattgatgttatcagtggttgtttaaattttaatttgaatgacatagggtaggcagtgaatattctcttaaggaaaaagaagttgaaatctttcagttaatctttttgacaaaaagcaactgtgtagaaagaaatgagtacctgtaataatccgtgcttcccctctcctaagactcacttcagaattgttttcctttgtaatagcttctcttccctatgagtgttgattttcaactgattgttgctctcttaaacgttagctcctggcattactttacagtactcagactcagccaagagtacaaactcaatcccttcctagaggacattgtgacacatttctctgagatttataactgtacgttaaatttttatatttaccgtgtgcggtagttgctctccatgtatgttccctagtgaacaagggaggctctttgagagtaactccagaattctatctaggttcattctatctaggtttcatgcattccctctttaattagaatgaatataaaagagacagttaagcacacacaataaaagaaaccaatgactgtgttttgtgctgcttttccttttatctcccttctgtgtatagtcaatgctccattgttgttgtttggttgctatgttgtgtctctttgcaaccccgtggactgccacatgccaggcttccctgttcttcactagctcttgcagtttgctcaggtcgtgtccattgagtcagtggtgccatctaatgatctcatcctcttctgccccattctccctttgccctcaatcttttccagcatcagagtcttttccagtgagtcagctcttcacatcaggtggctaaagtattggagcttcagcatcagtccttccaatgaatattcagagttgatttcctttaggaataattggtttgatctccttgctctccaagggactctcaagagtcttctccagtaccacagttctaaagcatcagttcgttggtgctcagccttctttatgttccatctctcacatctgtacatgactactggaaaaatcttagctttga

SEQ ID NO: 26567 - DNA, 2619 bp, Bovine  19866881189778
  misc_feature (1)..(1): n is a, c, g, or t
ntttggtatgaatatggatatttaaagatactagaatgttgatagcagaagaaaggttataggagataaggaagaatgagtttccccttttatagaatttaagtccatgtaaacaagtattacctttcatggatcactgccagtagtcatgtagggatgtgcgagttggaccataaagaagactgagcaccaaagaattgatgcttttgaattatggagttggagaagactcgtaaaagtacagtggactgcaaggagatccaatcaatccatcctaaaggaaatcaaccctgaatattcattgcaaggactgataaactgaagctgaagctccaatatttagccacctgatgtgaagagccaactccttggataagaccctaatgttgggaaagactgagggcaggaggagaatggggcaacaaaggatgagatggttagctagcttccgactcaatgaacatgaatttgagcaaactctggaagacagtggaagacagagaagcctggtgtgctgccgtccatggggtcgcaaacagtcagacacaacttaatgaccggacaacaacaaagcaagtattaatgcacactactcaatacttcagtattaactattcaaactcatttaagatcagcatcttagttaacattttttctgaaagattctataaaggaaattttaacccggaagctctttctctctcgcttgctaagtctattcttgtagacagcgcctggttagtgctgatggtacagtttgtactttcggtaagaagagctccctgctgtttaatttttaactttttcattgctcctacattcaactacttttttataaagtgattcctgttggtatcaaatccttaccagctggtcctgccagacatttattcgaggcagcagcacagatgaaaatcaaatacaactatgaggaaaataaaataagtttatggcaggctgtattcaataaacaaggagcaaagctagcattttcctgccctcttaaagcaataacagtattactacaaacacaaaaagggcacgctttagaacaaattctactttctacattggccatcctacattccactggcatcctggaatgtggaaacttggtttgagggcaaaattcaactcaactggcaataagaaagtctctgactcagaactcctgaaatgttcatgggagattttttgtaacttctggttgtctttgggtatgtaaaaagacaaggttgttttggaaatacccaaggcttggaaactatttttttatgtaatagtctggggtgagaaacatgagtgtagctactgcccaagcagtcagccagtccttagaactcataaaaaccagaccatttaagcgtgagtgccttttaggggatagtacaagtggttttgcaaggtttgctggtcatttacagcagacgctgttgtcaacctttcttctttgagggcagagtcctggttttgttcttaaaagggaacaactgaccatggcatgggttgtagaatcttctatttagccatattcaaaagcagaaatcataagtcagaggagcttttacttgttgtgtatgaaggagccataagaaccaaaagagcactttcaaataataacaatttcagtattatctttgccattacatgtcaaatatttggctaggtattttacatatctcgtttgtttctcttatgactattgtaacatcagttcagttcagtcgctcagttgtgtctgactctttgcgaccccatgaatcgcagcacgccaggcctccctgttcatcaccaactcccagagttcactcacactcaggtccattgagtcagtgatgccatccagccatctcatcctctgtcatccccttctcctcctgcccccaatccctcccagcatcagagtcttttccaatgagtcaactcttcacacaaggtggccaaagtactggagtttcagttttagcatcattccttccaaagaacacaggtatctaataattcctcattttcggatgagagtcacaaacacagtaatttcactaggcacacagtgagtataataacagtaataatgaatacctatcttgcgtgtgcgtgctgctaagctgcttcagtcatgtctgactctctgtgaccccagggtgctctgtccatgggattccccaggcaagaatcctggaggggttgccatgcccttctccaggggatcttccagacccagggattgaacccttgtctcaggcatttcctgcattgacaagtgggatctttaccactagcactatctaggaagccctatttattttgcacttactgtatatcaggatttcctaagcactttttgtgtatagcattagctcattcatcattactttaactctgtggagagactacttttattttcattgttttgccaatagggaaaagagcacagaaaatatgagcaaattttctaaagtcacactgagtaagcaatggtgtgtaactgcaaatcccacacccttacccttcccctcacaccaaggccgtgagccacagtctaggtgtgtccaaattctaggcctatgtttttccctccacgttgggtaaggatgacaaaatacgtttggttacctg

SEQ ID NO: 26568 - DNA, 1363 bp, Bovine  19866881191050
  misc_feature (1)..(1): n is a, c, g, or t
nactgagcgaagaagatgaagccaggaatatgataacctttgaacttgtggcctcagccaggcctgaaggcagcactgtagattttccagttgtttgagccaactaaattccttcgcttaaaatagtttgaattggattcctggcagttttatccaaagaatccttattcatagactcctttggttttccaatttgtaaaacggtaatgagattcagtacatcatagagtaaggtttaaataaaatgatgtgtgccaactacacagcacacattacatccttcaacaaatgaactctgaattcacagcaggcaagctctctgatttccttccctaggaagaaatttctctctgcagtttctctctgcctggctcccagctgagagccgttgttcttgccttctccgggatgggtcacttgactgaggggctgcctgttcccgagtccagttggtcagagaggcttgcccggctcttggtgggcagatgttcttcagagggtgaagaaggaaaggtttctcccctgaggcgcgctggaactgagagagatctcacctagagaagacagcagctctcacaggaatgcccgaggagaccacatttaaggcccggatgagctgattttggtcctcgttcaggaacatctggaggaacagctgtgggtgacaagaacgtgtttatctctttcaaaaagaaaagtagtgaaaaggcagggactgcagctcgaccaaatagagatgtgctcccatcatcaaacttggggtggagaataatggaagaaaaacacagcttgttttttaatcaaatagtttaaaggggaatgagttgagggggtggaagagagaattaaagtcttcaagccttgatgcttcctagctgctgctaatggtagtaggaagaatctagaaaatacatcaacatctgacttcaaattttctccactggcaaaacctaaacgtcttcctgactattggaagattaactcccttgggattttatttgggagctagtattattgatgtcctgaaaaagtccctaaaatttactatactttcacaagtcagaattttctttctttcttttggcagcattaaaaagactactatgactttttcacgaacaaattcaatagtttgggcttcaaccttacaaatttatgatcatggcttttaaaagaattttgttttctaaaaaagtgcctgcctcatatttcccataactaggaaaaataaaatttaagcatttatgatacttggaaaaaagtagactagttgcagttttatggtctaaactctgactataataaccacttttttttttttgcagccaagttaccgagggttttttctctctccttataagca

SEQ ID NO: 26569 - DNA, 959 bp, Bovine  19866881686491
  misc_feature (1)..(1): n is a, c, g, or t
ngaacacttctcgaaaggcatttgttaagtgctctgatggcccgaactgacattgaaattacagagtctcttaggtctgtgtcagtgccctcaccaagggcatctgatatcctttggatgttgaccaagggaccttgtacaaatagataaaataaatttatcagaatatttcagagaaaggacctcatggtagactcattctcacagtgatttgacatgttcctggttccatctaaagcttctgttgcaataatcacagctctgtgataactatttacaacccacacattgccagacattactgtctctaagtctacatatgcttcttttggatttaaataatttgtggaacttatccaactgtctgggtgatgctgcgaaccttgtcatcgacaagcaaaagaataaactaaaatgatgatgctggctatggatgttatattgtcagttgttggaggacttatctggcttctagggaataaaataattaattttacttaattaggtggaatctacaagacatgtcttatcttttttcaattatatcacccatgtttttacttccctgttgtctccccattgcctagcaccataaacaattggtaaatatttttgaataaatgaatatgttgaagatatactttttaattaaagtacagttaacatacaatattatattcatttcagttgtaaatcataatgattcaacatttaaatatattacagaataatcatcctgataaatctagtaacctcctgttctatacaaaattattagagtgttactgactgtattccttttgctatatattacatccttgtgacatttattttataaggaagtttttgctgtatattacatcctggtgacttatttattttataaagaagtttgtactcttagtccccttcatttacttcactcagctccctgcccttccccctctaacaaccactag

SEQ ID NO: 26570 - DNA, 1556 bp, Bovine  19866880123709
  misc_feature (1)..(1): n is a, c, g, or t
natggagtattactcagccattaaaaagaatacatttgaatcagttctaatgaggtggatgaaactggagcctattatacagagtgaagtaagccagaaggaaaaacccccaatacagtatactaacgcatatatatggaatttagaaagatggtaacgataaccctgtatacgagacagcaaaagagacactgatgtatagaacaggcttatggactctgtgggagagggagagggtgggaagatttgggagaatggcattgaaacatgtgaaatgtcatgtatgaaacgagatgccagtccaggttcaatgcacgatgctggatgcttggggctggtgcactgggacaacccagagggatggtatggggagggaggagggaggagggttcaggatggggaacacatgtatacctgtggtggatgaaaaaatttttagaagaaaaaaaaaaaagaaaaaaaaaaacctacaagtgtacataattatatattgactctgtgtatgaatttcatacatagaatatgaaggacttttttcttctttcgtcactaaaatagtatggttagtcattatagaatgagaagattgcactagaaatctgaaaattgggttcctatagttaatggaacatgccaggctgttttgggtcagttcctttgcagaaactactccctgtccaaaacatcctttccaaaaacctgctctggactacctgtaaattcctctgtaactttccaatttgattacttctatatggcacgaggatcctctttttccattgcagcagcaggagagaggggagaattaggtgcaggtaagtttgcagacagagtgcagaatactgaggaagtacctgttttctactttgtatttacaccatcaagaaagaggtgaaggcagctcctcagtaagatgaggggagggtatctggaaggggtaagtactgaaatggtcatcgtgtggcatgaaaaggacagcaggcaccatgcacacagaacaatgcgacgaatgaatgaacaatgggggaaaggaagaaagatggtatttttttattttaaaagtgggcacctaatggtgacataaatttcagtgggtactaaccacagaccacttgagagactgaaacaagacttaattattttcatcatattttatataaaatatacatttacataaattttattttggaaagacctaggcaaagtgtacataatcagacttagataggagaaatcctttatgggagatatatttctaactggcacagcaaaagtaacaaaagagtacatttatatataactgatcaaagcaatcttaaaaacatgatacaagtatttccatctaataaaaggaaggatgggtgagtcacagcaagtcagctgatttccacattataaaagcaggccatggtttctacagatactttaatgtctttggaggaaattttaatttttttttctttttcccagaaacacaacaaaatcgctaattttttacgtggtaaaagtggttagtcactcagtcatgtccagctcttttgtgatcccatggactg

SEQ ID NO: 26571 - DNA, 987 bp, Bovine  19866880362878
  misc_feature (1)..(1): n is a, c, g, or t
ntaaaaagaaataatattctttatttaaatctgaaaaccaacgctgtggcatttaaatgaacttggttacaatcaatgcatttcgtctagaattttattatgggaaacttgaacatatttaaaatgatgatcaaactgtatactctgagtttctaaagcagccttctttggagaaactcaagcatgttcctatctatttcactgtttatcctgcaaccatggtttggtgtctttgtaatttgaggcagggtttatctggtctaaggcagtgctatgaaacattgtaacattcatgatggcacctctgaactgctaactaaaccaggatctgttatctgtcattggattaggaagtcctaatagagtcaatcgagaaggcaatggcaccccactccagtactcttgcctggaaaaacccatggacggaagagcctggtaggctgcagtctatggggtccctcagagtcggacacgactgagcgacttcactttcacttttcactttcatgcattggagaaggaaatggcaacccactccagtgttcttgcctggagaatcccagggatgggggagcctggtgggctgccatctatgggtcacacagagttggacacgactgaagtgagttagcagtagcagcagcaatggagtcaatgaaaaggtgaaatttgaaagattataaaagaagcaacaatgaggttgcaaatcactagcagttaagtgattgcaaatatctaaaacaataaaatgcttctgatgctaagcaacagccatataaacccagaggaaactactggaaaagtcaaaagccagctaatctaatctgaacttttggtgacactattaacatatataaagtcatttgaagagttcaaagtttaaccttatgtctgaaattcaaggataaagccaaagcagagaatatatttcctttcatctacatgtcaaaataagaaaccaccttctaccgacaaggaaagtgagga

SEQ ID NO: 26572 - DNA, 1052 bp, Bovine  19866880397163
  misc_feature (1)..(1): n is a, c, g, or t
ncttctacctgtatatatacacgcaaaggtatactaacgtgcagtgatcaattttaacagattttaggggttactgggattttgcgtgctttttctatctttctgctaattcttaactttttttttcttataataagtacctatcatttaaataagtcatttttatttttctgaaagttttcttaaaaggcagttcaagcatttctgtccaatctagcagggagaaaggtatataaaactctaccaaagcacatgaagacttcaaaaattcagtgcaagtaactgaatttcaaaatcaggaaacaatttctgttcactacagattctttacctgggtggtctcttgatatgatacagaaaaactttctggccatttccatttataaaactacaatctatggggacttccccaggggtccagtggctaagactccacactcccagtgcagggggcccgggttcaatccccggtcaggaaactagatcccacgtgctacaactaggagcctgcatttgcaactgaaaaaatgatcccaagtgccacagccaagacctggcacagccaaaacatcccaactactcaaatttatcaacttccccaagaaacacacacagcattgttttagagccattttattgagacaactaaaaacaattagatgttcagaagcagtgtacaataaaagagaaatcaaactgttactttatcatgtattccctcttctttataactaaagcaaaaaaaaaaaaaaaaaaaaccagctttctgcttttaagggacaagtcagaaaaataggccaatatattttccctcttcataataacataaacagctacaagaaatctaattgtaataagagaaattggatgttggcttacacatattcattaaaaagacaacagatcatcacattataagagcataactccacctgcttttagcggatactcttgtgttctcattcataggtatcaccaagtaggttagttccagcactggagctaattcatattcctcattatttactgctcatgttgctgtaagcagagag

SEQ ID NO: 26573 - DNA, 1286 bp, Bovine  19866880454558
  misc_feature (1)..(1): n is a, c, g, or t
ncacaacaaacacatttacaattgctccttagtgtaaaattctgtttaaaaaaacaatttttaaaaaccactttctctctcaagactctcaactctaacagtttactgcatgtacaataatccttgacaccgtcttccttaaaacatttaggtgtctgctaagtcacaaacattaggaagtagaggtaccaaggttatataagatatgatacacatgagcagatgggaaagtgggtcattggcaagtcagcttaataatatattcaaaaggcaaaaatcagagtaagtaaggtccattctggcaacaatgagtgtaaccagactggggggcatggggtgtgcagtgcagatgatgatggtgaattaggatgggccaaagtgttaaagaggcaacaactgaaatttaacctttaggccgatgattaaaggctgcacatcagaatcacctagaagaacttctggcagggaaataaactgttgttggggactttaccgcccacctcccccctccacccccggaccaatatgtatatgagtattttaaaagcttctaataatgtacacccaaggtcatggatcactgacaaagcacaggtaagacaggaaaagcattagctagagaagtgacctgatatttgtgttcaggaagacaactgacagcaccagggagaatgaacagatgggaaacgactagtggtagggacctgaactaagatggcagtggcgtaagaaataatggcatcagcagacattctgctggtggaatcaacaaagatgatgataatctagatgcaaggggacaatcaacaatttagatttcacccttacacagaatgaagtcatttgagtctctgtgaacagtttgagaaccatttaagagaaagaagcaagaaggatcaggccggaattctggtgagatcaaacacggggtgttccatatggtagtaagaatttcacgagtaacctttaacgacgttttgatcatttcagagcacaatccacagagaactccgaaggtggccatttctggctgcacttacgctgtgaaatctgcagcggctgtcgctgccttggtggcatctttattcaatgttgcgccccaaacggcacccttatgacccaaaaatgttccaatccagtctcctgtatctccctggcgaagcataggcttaccatctaaaaaatattgaagacgacatgtgacttagaagttcggaggacttaaaatctaagactcaaacataaaacgatcatatgaaaaacaaagggaaacagtttttgttgcc

SEQ ID NO: 26574 - DNA, 3123 bp, Bovine  19866880478704
  misc_feature (1)..(1): n is a, c, g, or t
nctgaaactccaatactttggccacctgatgtgaaaagctgactcatttgaaaagacccggatgctgggaaagatcgagggcaggaggagaaggtgatgacagaggatgagatggttggattgcatcaccaactcaatggacctgggtttgggtggactcccgggagttggtgatggacagggaggcctggcgtgctgcggttcatggggtagcaaagagtcggacatgactgagtgactgaactgaactgaatgacaaaagtaacagaaaattaactgtaataacatcaataaccataatcataatgcctcattattgaggcatatatatttatgttattattaaaatgtcttaaaaaacacttttgaatctactaactcatttcatttcataaaatcctatgaggaaggcagggaatcattatttttctaatgacatcaacaatattagttgcatcatttcagttacattatggtggaaggggcatttgtaggataatcataatttatttatagcagtggtgtctgaagaaatgtgactcaggctgtaactggaacctcaggaaatcaggatatttccttgagctgcaaatccagtggtgaacaagagactccagcaggggctggcaaaaaaactgttttcttcccagtctaccaaagtaatctggccttatctagaaacatctagaaacaggacacggaagcctggtgtgctgcagtccatcgcgtctcagggtcagacacgactaagcaactgaacaacaacaaagaaacactgataagcttcagaaatagtatcagtggggacatccatggtggttcagtgggtaagacgctgccttccaatgcaggggttcaatccctagtcggagagctaagacctcacatgcttcagggccaacaaaaacaaaatataaatcaagcaatattgtaagtaaaattcaataaagactttaagaaaagaaatattatcaataaagtccttggactcttttgtttattttcaaaaatatttttaagaagcaaaaattaaataaaatgcaattgtaagaatggtactaataatgaatcctagtcatagaaagcaagtgcaggtcgctcagttgtatccaactccatgtgaccccacggactgtagccaggctcctctgtccatgaaattctccaagcaagaatactggaatgggttgccatttccttctcagggcatctccccaacacagggattgaaccctcatatcttgtgtctcctgcatttgcaggcagattctttactgtctctatacagataaagctctgtgaaatgaccaaggtcttttctccttttccagaattccttcttgaatttttcatatacctccaacttcatttgaggactgaaaacttaccataacagctataaatgacgctaccattattgagataaggagtaattaatactataatacaatccaggcacaaaagcgtaagtaccagcagatgcaatggatgtatttcaacttaaataagaccttggatgctcatgtctgtcttatagatgtcaggaaatggctaaaaagtaaaaggtactaaaactaattaaagcaaatctcagtagaagtatttctagttatcaaaaattactaaatacagtacatgaactacactagtttaatctaactcagatcctctcacttcccctataatgctcatgccagagctattttaatacttaaatagtctggtacgaaatggactccattcttgaattttagcaagtaatttaaagctttaatactaccaataaaatggcattggtagcatagcaattacagagtaaaaaaaaaatgatgtaaatgttaagtaagagtgaggatagttactgtttccacaaagtaactcctgcaagggaagggacagctgggcatttcatcccagacctgagggggcccgggggaaggccagagccaacagttcacccaccaagctgccatctggcttgggaccaagcagaacaacagagcctggcaagagagtcgctgtgttgtgtctccaactgggcattagcttcatcccagtggacactgtttggagacacagtttcacaccattcttctcctctgagttctctccctgtgccaggggggatgaggggaagattctgtcacagtaggtgttggcctgacctcaattaagacacttgtcccatttggaaaaagagagtttcaatgactctgttctataaactcccagagagtccagaactcaaaccaaaattgctggcagatgaaggaaaggatggagctggcagggatcatgagcttggccggaaaaagaagagcaggaatggaaatcctgaacctcttcacatcacaacattataaatctgaaataacaggggaaaacactcagggaggatgactcatgtaatagcacagtcctgtttcatttagttgctggtttgggaatagagcagttggcatggcttggtaatcaatgaggaatacatgagtagctactcctctcaaggtcctgggcagagtaatgtatgttagcagaggtaaagacatccaaataactctcaaactcttcttccataactgaagatgatttcctttccctgaacatccagtcccaagttttccaagaaaactgtctataaaaatttttttagctaaaaaatgtgaatgaaatatggggaaaaaatctcccattccacttcctgcaaagaaaaagaaatctctacaagcaacaatattaacttttttccccaagtgatagaggcagagatgcaggctggctgagcagctgatcatgtgatgctgtgatgtgacaatgccaggcaacctgccactcagtcactttttacttcgcctctcccaggtgtgacgggaaggagtctggcttcccctcggaagcctaagcctttggaaccgagttcctccctttgctgtcccctcgacccagataccacatgggtctgatgtgggcacaggcagaaaactgtcctgaggtcaagtctgctagatcctagaaggcaaagatgtcaggagaacagcttcgacaaatgctgtctatcaaaggtacaggtggacggcattactcacacatgagcacgttcagagccttttagggcctgcaagc

SEQ ID NO: 26575 - DNA, 2172 bp, Bovine  19866880486651
  misc_feature (1)..(1): n is a, c, g, or t
ncatggcgtggccaaaaaaataaaataaaatccttcttgagtataagaaatcttaaattcacttgaaatatgagcactttctcttggacaattctccagtctcacctatttgaaagcatgtctattcttaaagaagtgtatgtgtttttctggagggaggaaagttagctagaattatctgatatattatttgatgttaatgaactaaatattccctgtgaaggttggtaacagacttaggtgggcaggaagaaaaggaaaaaaactagattcacctaaaacatctgagctatatccttctgagtacaaattactgaattcaattgtttctaagccagactccattcatttgttcatttacatacttgctcacttatttgcataatattttgctctggggaaataaagaggtgtgatgatatgtatcttttaaactagatgtttgcttaagttttccatatcctgcttgtgattatggaagattaataagttttatcaggacatagaagcataaacctagagtactttttgatagtgatttacataactgaattaatctaacattaaaattcactttcgctttgaacctaagtgccttgaaaatgtgagtgaagtatgtaagtatataaattatgaacaaacaaatatttatgaattcctcatttgaacctaggcaccttcctatgcatatcccacttaatctcatgataaatcatgatttactaggtcaaggatctcaaaaataatgtcttatttgaattcagaccttctaattgtaaggccattgttttattatttgttattattattccacttactagctatctatagttcctttttattggagtataattgttttacaatgttgtgttagtttcagctgtacaataacgtgaatcagtcatatgtatacatatatactctctctcgagtctccctcccataccccgattcctaccctgattccacccctctaggtcatcacagagcaccaagctgagctccctgtgctatatagcagcttcctactagatatctgtttcacacatggtagtgtatatatgggagaagaaaatggcaacccactccagtgttcttccctggagaatcccagggacgagggagcctggtgggctgccatctctggggtcgcacagagtcggacacgactgaagtgacttagcagcagcagcagcagcagcatgcccagaatggagttgctggatcatatgatagttctatttttagttttttagagaacctccttactgtattccataatggctgcaccctttttcccccatccttgccaacatttgagaagtctttctaaatttcttcaggcagaagtaggtgtaccttcttttattccccctggttaatgttacagtcctaacctcattttggtaataccattaagaggtctgctcccctctgcatttggctataaactccttcacagtacctggctcccttttagaggatttcatccattctcagccctgggatttgggtggggtgcgctcttatccccagttatcccttagctactcagcacactggccacagtgactggttcaggcacgggttgttgttcagtcgctaagtcatgtccgactctttgtgaccccatggactgcatgccaggctcctctgtcctctaccatctcccagagtttgtttaaattcatgtccactgagtcggtgatgttatctaaccatctcatcctctgctgccctcctctccttttgccttcaatctttcccagcatccaaggttttttccagtgagtcagctctttgcaccaggtggccaacgttttggaactttagcttcagcatcagtccttccaatgaatattcagggctgatttcctttaggattgactggtttgatcttgcagtccaagggactctcaaggatcttcttcagcaccacaatttgaaagcatcaattcttcagtgctcagccttgtttctgatccaaatcccagttctgtacatgactactggaaaaaccagtacagtccatagagtcacaaacagtccgacactactgagcaactgagcatataggaggcactcagggatgggtatttgatccatttcaagtgaatgagagagtatgagtctcaggacttataaagcagtcactagtatgaggatgtgagt

SEQ ID NO: 26576 - DNA, 1578 bp, Bovine  19866880512526
  misc_feature (1)..(1): n is a, c, g, or t
ngagagtgaaaaagctggcttaaaactcaacattcagaaaactaagatcatggcatctggtcccatcatttcatggcaaatagatggggaaacaatggaaacagtggctgactttatttttttgggctccaaaatcactgcagatggtgactgcagccatgaaatgaaaggatgcttgctccttagaagaaaagctgtgaccaagctggacagtgtattaaaaagcagagatattactctgccaacaaaggtctggctagtcagagctatggtttttccagtagtcatgtatggatgtgagagttggactataaagaaagctgagcactgaagaattaatgtttttgaactgtggtgttggagaagactcttgagaatctcttggactacaagatcaaaccagtcaatcctaaaggaaatcagtcctgaatattctttggaaggactgatgcggaagctgaaatgccaatactctggccacctgatgcgaagagctgactcattggaaaagaccctgatgcttggagggattgaaggcaggagaaaaaaggggatgacagaggatgaggtggttggatggcatcaccgactcgatggacatgagtttgagcaagctttgggagttggtgatggacagggaagcctggcatgctgcagtccatggggtctcaaagtgtcagatgtgactgagtgactgaactgaactgagatatatttggtatataatcccagctagtgggttctactggcatccaattagtagaggccagggatgctgcaaactatcctacaatactcggggcagccacttagacctttactgttgttcagtcactaagtctcatcctactctgtaactccatggactacagcacaccatgcttccctgtccatgggattctccagacaataatactggagtgggttgccatttcctactccagaggattttcccaacctaggggtcaaaccaacatctcttgcgtctcctgcattgtaggcagattctttaccactagcaccacctgacaagcccccaggttgggtattaggaacacttagaatttggatgcttgattggaagcaggcaaatttgaatttctttttctgtagcgttgactttatcaggggagacatttcctcacttgggtaatggagtccctataataattagcattaattgaaatccaggtaggcagctttactggaaaagctgacaactaaatcactcatggtggtgatgacctagggaactagtcctgtaggtccttgtttattggcatgaatgaaaaagtgggaggcaggactgagtgaggttattaagttagttttcatgaagcgtattcattataaataatcagcaaacaatttgagctaaatgccatgaaccaaacacacacacacacacacttctctcaaggtatatctgatttctaattgtggacagggatcagcgtcagcaagattattctttgaataatgtatagatcctgtctagtagcctggggacaagatcgcatgtgtcccagtcatgtccctagagtgtcttaatgtgactctgaacttttcttttatttt

SEQ ID NO: 26577 - DNA, 1573 bp, Bovine  19866880537152
  misc_feature (1)..(1): n is a, c, g, or t
ncactcaccttggagaagatcaacaggaacacagtgcaaacacttttaaaggaccgccccttgacaaagggtgggatgtcttagttttagaggcattttattgagacaaggcacaacaattagaagtagtgtacaatgaaagagatgtcaaacccgttgctttctcatgtattccctcttctttacaattaaagcaaacaaacaaacccaactttctgctttaagagaagagtcagaaaaataaaccaatacatttcccctcttcataataacagaaacagctaccagaaatctaactgtaataagagaaattgaatgttggcttacatatattcattaaaaagacaacagaccatcagactacacgagtataactccatctgtcttaatctaatactcttatgttttcactcatgggtatcaccgagttggtaagttctagcactggagcttcttcatattcctcattatttactgctcatgtttgccttaagcagagagtaactcggaggctgatgcttctctctgcttgttttagtctgtaagttgtgtactatctgtggcatctgtctgacgctcaggccataacttcaggagttgaactctagatggaatctgaattctctgaagcaatttcttctatctcttcttctgttgtctctgaaaaactgatcctcagctttgccagctcatgactatcttcaggaagcacaccttttcaaagactataggttttcctaccataatctgccacagtctctatgttccatcttcagaaccactggcatagagttctccatcagacctaaacctcacagtgaatgggaccaaagtgtcctttgtaggattctaattcatcttcactatcataatcatatttataaggtttaaaaccttcacatgctgctacaagaaattctcagggcaaagagatgcagaattgatggctgcaggagcttcatacgatttgagtccaaactcaccgcaccatgaaaagcaacagatggtccatacatcattaccaggcactccctgggactacatcccatactactgaagacatcaaaacttagagagttcacctctgtcatagtagtgtgatcccgaagtagaacggttttatcgcccgctgaaaggatctgtttatcaccacagagcctttttaataccagaggtatgaccattgatttccttaggttctgtctggaagaccatcttgtcatcgtccttggacctgaagaacatggacacgaacagcactccgcaggcatcctgaatgcggaacaccggcctgctgcatcatatgtctgccagcataccagccaactcagttaccctcaggggctcaaggggcttggtgctcagtggccctgccagttccatctccacctttctcagtcactgcctccaagcccaaagggtgggatttctgcagtgcctacttcttgttggtgtaatgctctcaggtccaagtcaactctttatgacttctcccaggacacttgcaaatgtggtgccctgtatcagtcaagtcatagtttaaaacagtcattatatagccaatcatgaatat

SEQ ID NO: 26578 - DNA, 3953 bp, Bovine  19866880570459
  misc_feature (1)..(1): n is a, c, g, or t
nactgtagcctgccaggctcctctgtccatagaattcccccaggccagaatactggcaagggtaactcttaccttctccaggggatcttcccaatccagggattaaacccaggtctcctgcatggagagaactgtctgtctactcgtgtgcatgttaagttgctttagtcatgtctgatactttgtgacccaacagcttgctaggctcctctgtccatgggattctccagacaagaatactggagtgggttgccatgccctcttccagaggaatcttccacgacccatggatcaaacccatggttcttaagtctcctgcattagcaggtgggttctttaccactagtgccacctgggaaaccctgtctgtctacttagtttatccctttgtttcttcctatcctcagctctggttctttacagaatgatcatgctctgaaatattcattgggtggtaaccaatgggattctccaggcaagaatactggagtgggttgccatgctctcctccaggggatcttcccaacccagggatcgaacccacatctcttatgtctcttgtattagcaggcgggtcctttaccactagcgccacctggggaaccctgtaactatgtgggtagactagtgatgtatatttaaatcagcaatagttagtttatatgtgtgactttgtacatcggtatattactcatggtttatggatggttatgcattgcaagtatatctatgtatacacacatacacatatatgactgaaatagctaatttatagcatattagatccaaggtactatcatgattttagaaagctgaagcagtaatttccttactgttctattatgtcatataaatatatacatttggtgtgggaaagacaaaaatgttgtacaggcaaaagattgtgtatgagaaagacagaatatttgaaagagacttaaattccatgactaaacgagagaaggaaatgacatttcaaatacaatgcccttgtcaggatatgctagaaaaaaatttatgtcactgacaagccaaagaaggaggcatttgtatgctactgacagttggtgcaatgtgtatgtggaagtacatttaagtgtgggggaaaaaaggaaaaagacaactggaaaaaaatagaccatagcgaaaaagcaattgaaacaaatgtttagccatatgtgatggacagcaaggagatcaaatcagtcagtcctagaagagatcaaccgtgaatatttattggaaggactgatgctgaagctgaagcttcaatattttggccacctgatttgaagagccgactcattggaaaaaagtcggctgggatgatgggaaatattagggcaggaggaaaagagggcgacagaggatgaaatggttggatggcatcacaaactcaatggacatgagtttgagcaaactctgggagataataaggatagggaagcctggtgtgtgaaagaccatgggctcacaaagagttggacatgacttagtgacagaacaacaaactgttcttaaatataattgcctaagattctcagtgatggatctatgctgacatgctgtctgagatttcagaccaagtactcaggttcactttgggttaaaatctttaccctagacttgaaccaacagctcacctccatcagggcaactcagctattagcatcatggaatatgagagtgtaagttgatcaggaagaaatcctggtttcaggataaaatggcaaagatataaagccctcatggagataatgctgtagtcagcattgaaaacataggctgaataggtggctccgacagagtttcatgcaaagaatctggataaatgctattaggagttaactaaatcaaggatatctaaaaatgtttcatgaagttgtagtatggcaattaatttattatactaccacccacagatgcccaggttcttaagacattgctcttcttgggaagttgtgggggaaatgaatcccctctaggatttatgtgactctacagcttgcagtgaggtaggctttgaatcagtggtaggaagaacttcctcccagaatccagaggaattcaagaaagatcagagactatgagtcatgtttggcagatacaaacagtgctgctggggaggtgggttttggaggccgaggcattaaggagattaagtgagagtctacatattccagcattggggattatttggctaacatacactgagctcaagcaagcttttcataaatattagatggatgaactcattgtttcaatactttctaagtattttgaatccctcgtgaactgtggaaactaaaactggatttggtatgttaatgtcattactatttatgtgttgtaaccctgagcaaaccagtgagtaacttttgttggtaagacatcagactcttttctaattgatagggataaaagaaatataagaaatgaccctgtcattaaaggcttatactttgggagacaagacatacccatgaagggagaactactaaagcaagaaagtaccagattagttgtgactacatttgtttcctcactctttccagagacttgaaaagcaaagctttagccctttgaacgagtttctctttttccttatggctcttctccaccccttttcaaccccaagtgttgagttggaaaatttagatcatctgtgagttcctatcagaatttaatttgagaaacacagtagaggcagtaaccgtggagggtggcagttactgggccctttgcagaaggtgtgtgcgtgctcagtcactcagtcgtgtccgactcctcgtgaccccatggactgtagcccaccaggctcctctgtccatggacttttccaggcaagaatatttgagtgcattaccatttcctactccagggggtattccaacccagggacccaacttgtgtctcttgcatctactgtattggtgggtgggtctttccccactagcaccacctgggaaatgtttacaagagtgaaaagtgaaaagaaagtgaaattgctcagttgtgtctgactctttgcaatccgtggactgttgcccacaaagctcctccatccatgggattctccaggcaagaatactggagtgggttgccatttccttctccagaggatctttcccaacccagggatcgaacccaagtctcccgcattgcaggcacactctttaacctctgagccaccagggaagcccactctcactcttacaagagtgagactcagataattagaaatgtggggtatggatattgcaggagggaggaagagcctgaaggggccacctttgaggaatgaatgaatacatctgttttactgaaatgggtagggcaggatattctgggagagaaaaaaaaaaaaaaaaaaacttggagagagatggggcagtatgcagattgtaaaagttctttaatagggactaatgtaatctataagtaatgaaaagtcaatgcaggtttgtacaattgtgtgtaatttatacaaaataggatttaagaagcattctagacagatgcatagtatggattgaagaagtgaggatataagaggtagacaagctatccagtggctttaaaatggctagaaataatggaaataatcatcttctaatgtgagagtgtgtgtatgtgtgtgttgcgtaaagggtcatgaagtttggcatcgagatatccttaggtcataagctaattaatagcagagacagactagaaaccaagtatccctcctcacaatttaggactatgtccattgtatcatggttaggcatctattgcaacacccagagctaataaatgaaggcctgaactggatactgccactagaaattgagatgaaaaggacatttgagaggaagcgtaaagtaagaaccagtggagacgtgatcggtggctggagagtgtatttgttacctcttgctgctctaacaaattaccccagacttgagggt

SEQ ID NO: 26579 - DNA, 2795 bp, Bovine  19866880579108
  misc_feature (1)..(1): n is a, c, g, or t
nctctgttttagtctttcagattaattagttgccttagtggatgaaaactgttcttgaacattctgtgactttcttagattagaaggttgctgtgtaattttatattaagtgttttactgtacatataattatcttaagagtgattttcaggccactcttgcacagtgttgaacatctttctggtactcaaaaaataattgcttagatatgttcgttaacaattatttttaagtgcctttgaatagcaggaaatataaagggaaatctactttatggcttttagatgggcgatacagtctttaaacacttgggttcttaacttcaatcataatttctatacatgaaagctttactaacagttttctgtgtctatgtgcttttgtgctcagtctctcagtcgtgtccaattcttggcaaccccatgggctgtagcctgccaggcttctctgtccatgggatttcccaggaaagaatactgcagtattggcagaaatggcagtttcctcttccaggggattttccagacccagggttcgaacctgtgtctcctgcattgacaggcagattctttaccactgagccatttggctagcccttttctaagtctacagtagtactttttccagaaagcttaacaggttgccagcagcctcaagatgaagaatctgttttccttttaggtaggagctggagaggaagaagagacttttagatggacaaaagttgaattcttgagatgcaagttcctgctggcacagggagccagcggccaccttgttttggatgctctttaaaaccaatgcagctctttaaaacctccgtccccttgggtcagcatccgagcctttcccagagtggctgaattatctaaatcctaccatggaccactcccactggctcagccccacttgtttctcccgctggcagggacaagcagaaggtcaggttatgacctccaatgtctcctcctcagtgcggcagcagtaggagggacaaggggggacagacaaggagaccacgcctctgctggttgtgccgttgtattgattaagcatctgcaatgtaatccatcttgggtttctagtacacccacttttgctactcctgaaaacctcattataagtcaaaacatttattatcaggtttcttaatgtgacatcactctgccagccaccgcttctggtgtgtgcattttgttaaattttgcattattctgagtaatttgagtaaaagtcgtggtatttgaattccattttcatttgtcagtcatcttttataatagctttccaaattattatttttctgatacatgcaagaattgttcttttttttttaaatggggaattttcagtttctgtaatgtttgaatttttaacagtgaatgtgtattatgagaatgtgagcagaaaaattaataaatgctttagggaacaaggtcatgatatattcagagatttaaccataaaggggtttactgaagtattgtttttaagagcaaataatgtgaaactttgactatccagtaagtagatggttgaatacattgtttagtgaccatgcagtggaagattatgcagccattaaaaattgttctacagacatgaatttggaaagatgtctatgatataccaaagggaagaaaagcaggttacaaaataatatgtaccgtatgtaatcacacattaaaaaaaaaacaaaacagtagaatagttggtaggttcaaaagccctcccgtgagaaaactacctggatgctaaataaactatcaacagtatagcaaatgtatcgtttttaacttttattttttaataatttacaacttacagaaagtttacaaaaatagcacacaaaactcccatttattcttcactcagattccccagttataaaattctaccccatttaaatttttgccttccctctttctctctctgtctatacatgtatgcagagagagagataaatatagatatattttttctgaattatttgagaattaagttgctgacctattgatatattactattaagtacttcagtgtgaatttcctaaaaacaaggacactcatatgaagccacagtaaaccatcaaaatcaggaaattaacattattgtcattaatgttaccattaaatctcctgcatcttctgcactggcaggcagattctttaccactgagtcacctgggaagctcacatgtctctttaggcttcttcaatcgggaatagtcctcaatcttttctcgtgtttgaagaattgaggtctattttgtcaagtgtacctcagtctgggtgtgttaaatgttttttcatggttagattcacattaggtttttttttttcccatcacattaggtatttttgataggaccaccctaaagttttgctctgttcttctcaatgtcctctgctttcaggagtcccgaaatgttgatctgttccatgattgatggtgttacacttttacttggctaagatggtttctgtcaagtttctccattgtaaaattaataaatattttgtattttagtaagtatttaacatccattatgaatggagatatggttaatatcctgttcttcatctaacttttactcagtagttttaagtgttcattggtaattcttcagttatactctgatagttggcaaatggtgattttttctgattccatcatttcttttatactcactagttagcattaccttcttctccctccctttcttcttctcttcaagaactcagtagatgcctgtttttttccaattggttagtaatccattactatcattatt

SEQ ID NO: 26580 - DNA, 923 bp, Bovine  19866880583162
  misc_feature (1)..(1): n is a, c, g, or t
nggagctgcctgtgaacggctgaggcgggcggagaagagatacaactgcaaacacgcacatgacacacaccaaaagttaactgaaacatttcaaagtgccttttcatgcctttaactcaaagatgaacacatttcaaggtgacccaatcctccagtgacaggcagtgttttaaaagggccgacgctctccacttaaacaatttctagtgacacgtctaaaccgcattcctccggggctctctgcgctgtctctctgactagtctttctttcctggcagaggcatcccgtttcacatgagcgcttgaagtctgtcttcccttctaacaattaaaactcacagagctcagatgctttattttttttaacttagcaggcaccatgcaggactgttaactatttaattataccacagacacaaatgattcccttatagtgctttctagttactaaaatcatgaatcacatgcgcttcctcagtcgtgtctgactctttgtgaccccatggactgtagcccaccaggttcctctgtccatgagatttttcaggccagaatcctggagtgggttgccatttcctcctccaggggatctttccaatctgggtatcaaacccacgtgttctgcgtcacttacattggcaggcagattctttaccactgagccacgtgggaagccgtttatcaaaatagtatcagaataataaaagatagccttatcactcgtgcttataagcaaaggataaaagacttttaaggtaaaatcaaagttcaagttcagaaaaggaggtcccatttaaaatctaaaagtatggaaattctctggtggtgcagtgggtaacactctgagctcccaatgcaggggacctgagttcagtccctggtcagggaactagattccactcccacagccatgagtccacatg

SEQ ID NO: 26581 - DNA, 1358 bp, Bovine  19866880614431
  misc_feature (1)..(1): n is a, c, g, or t
ngtaaacttggaaatgtctttctgcccaatcaatggggcgctttgctttcaacacatgaagcgcatttctgatgtctaaatttaagggctgaccattatatatattagacataatacataggcacattataattttcataattttttctgatgaaaaaacacgttctttataaaatttttcaaagactctaagacctcgattgggcttccctcatggctcagtggtaaagaacccactgccaatgcagaagatgtgggtttgatccctgggtcagaacgatcccccggaaaaggaaatggcaacccactccagtattcttgccttggaaattgcatggacagaggagcctggtgggctacagtccagcagttgcaaaagtgttggacacgacttagtgactaaacaacaacaggtgctcaaataaggaaaattaaaattgctcataattttcccacccaggaaagtatcttatcagtgtctattctaactacatatatatatatatatgtatatatatatacattttgtatttggggaagtctaggatctctgcactttcatcactttccctagtgaaattttattatgtggcattctattgctatgctgaatgatttaaaacagtaacaaaaatatagtctgttttggtcttgaactggatgtcagcctatatttaaaagcaaaccacttttgtaaattatcaacattttattttctttgcctgatgtttaaggttaaatattcttcttcatttctatgaacacttggggcttacaaatgaactctgaggcatgtactgtagctatttgaatcgatctttcttaggatagcagaaactctgaatgccgttcttaccattccacaattttctgtagggcctcagcaagttaattatcttctttgtgtgcttaatcctcttggagtgcagccctcatcacttctgcgtgccatgccattctgtgcggatgaatgtttccctttatcctctgcatatagaaatggagaaaaaaaagaaaattaaaataagcgaacagggagcctcagttttgcattaacctaagaaatatggattcagtatccatggaactgataatgcctgcttcaatcctttaggacatttcagaacataatttgaattttaaaataagttgagaaaaaaaagaaaagaagtcaatattcaagaggaatattggtttctttcaattactttcctcttttattcaaataaacatctaaaaataacaccatctgtgcctattaattgctatttgatgtaagtgcaaagtgaatttcttaataaatggagctttaaatttctttcaaaatgttttcatattgattaattcaaagaacatat

SEQ ID NO: 26582 - DNA, 1401 bp, Bovine  19866880635259
  misc_feature (1)..(1): n is a, c, g, or t
natctctttagtaatcaacatataacagaacacaaaggttcttctttattacaaatctttttgcagaaattaagtgaatcttgtctgctctgtactttaaaagagaaataaaggtgatgaaggatggtaaatatcatgtacctggattcattttaataattagccatagtgacacctgggtggtcagtcatctgctgctttatgctgcaaccagctccaattacagaaacagtggaagaattttaacttcacaaactgaagagaaatagtttgtttactcaacgcaccaacagtttgtgctccaaccatcatttattaagccagttatttgtgatgtaagagcacaatttgccttaaaaacaatgttgagaatggtggttaattttcctgttcactcacagaaaaccatttaaaccaggcagtaattgagttaaataaacactgtttctctctttgttatgattccatgggtcaagtcaagcagcagagaacattgttataagtgtttgagatcccagttccaaattttgagagaagaggtttctcttctttctcaggatgccctgtggagaaacaggatttgtatagacttccttgctctggtggggatggacaacaagatcacatgaatccttcatagcagtagctagcaaagaagcaggatgaagggttctattaactgtttatttagaacttgaagtatgaaatcatgtttcatgggcagttttgggacctttgtgcaggggtggctgggagtcaggcatgtgacctcttggagaaggaaaagtcacgtggtgggatctaaaagcactgaatcaaatgttatcaactggaagactaggatgaagccacacaaatgaaaaaggaagatgagagaagtgttcatatgagaagagagttgaaggacaatatatgcagctttgtcagcaggggattgaaattccacagatgaaggcttattttcatatacttacactgtgggggctgaagcccctcaggagaggccctaaatgtgtccttccagaaagacgactctagtgtggaccaacatctttagtgtctctgatgggtaatataatagaggtgggaaagatataggtttcatggaaccaaaagcgtaaacagtttgttggcaatttagggggaaaaaaggcaaacttaaaaaatataaaattaggtataaatatatatttatttagataagaaagtaaataaaaacaatatatccacttttaaaagtagatgtccatcaacagatgaatggataacaatgttgtggtatataggtgtatatatatatatatatatatatatatatatatatatatatatatatacagtgaaatatcactcagtcataaaaggaatgaattttgtcagttgtagtttgccaacaaaggt

SEQ ID NO: 26583 - DNA, 1563 bp, Bovine  19866880646789
  misc_feature (1)..(1): n is a, c, g, or t
ntgtaaaaattatctatgtgattgctaaaattatttaatgaaaaaatgggggaatagataacttcccccctgcccttaaaatttccattgaattttgcttaaagaatgaatggaaaaaaaccaactaatctacacatggtccccatttcaggcatatctgaaatgatctgaattactatatctccagggttaattttgcaaaggttttctcttaaagaactctgaagtaaaatgttaatgatagctttgataatgttaaattctaagggagcaaatattgacttgcccaagaaccactatgtggcaaaagaaaatgaagcaccccggaacttcccttgctcttccaaactacttcaggactaatttcctaatcactcagcacgaatttcctgccatgataatttgtctttaattttcacaacagaaatgctcttttactaattgttttgctaatgaaatatctgtcattttatatgaaactatggatatcattgaatatttttaatgaaaacattcctatcgtttattaaaaaaactttaaattgtagtaatacgtagggaaaagttaatctattaaacttaaaaagagattttatccatgactttctaagtctctctagtacagtccttgtgtctttgtctagatagagcacctgtgtacattattaacaagtaccacttacgtcttatattctgaaactttttcctgggagagtgaacaggaaagaaacagcagaccctaacatagtacttagtatgtgtgaagctctttatgtatatcaatttactttagcctttatttaatctcttggtatagtaaggttaatatagtaaggttttgaatcctcacaacagtcagtattgatgctatcatccttttatgcagattagggactgagagcttaagcaacttgccaaaggtcacagagctcagaattagcagaggcaagaatcaatcccaggcagacagtatggctcctgagtctgtgctgtcaccacaggtacgtaaaactgtcccccggcactcagagacgcatagccagagcccgcagtcagctgtggggaacagtaatctgctttgggggctactggttcgtttactcattgtctctctcagcgcccctccttccacctttgtagaaattaagttttcttaaatggtgattttcatggagagcatctttttttcctccctaaacaagtctccagctactcataagtggagaacactggactgggaatcggttttggttttgtcttttcatttgctgaattctaagcccacctcttcctctttctagctttgtgaccttagtcctgtctgttcacatgcctgagcctcagtttcttcatctgtaaggttaaaggagttggtgcaggtgataccaagatttgttcagacctcaaattatattaccctaaagataatgataacaggtctaaaataatggtttatggctataaagagaaaacacttctgtagcaacttaaattagaatttgcctctcagaagtcaattaggcacgtcactcaaagcacttctccaactgtgaatgacctgat

SEQ ID NO: 26584 - DNA, 1381 bp, Bovine  19866880668023
  misc_feature (1)..(1): n is a, c, g, or t
ntttttctttgtctttaggcccaaaaaagcctaatgacatatttttgctttcttttcataagttaggaaagggtcagggtcatctgggttcatatcctttttctttattaccttttcccttttgtaccctactcctccttccacaggcaaaagttaatttaagtgtaagcagttagagacaagacataatgtttctttcacaatatgtcttaaacgatgtaatcattagtgttgtttcctgcaattctttctccattaacaattccttgaaacctttcctttcccccaattttctttcttttaggctaaacttttcctttcctcctcctctataagcaactggagtgtacacatactataaacatacacattctggaattcataatcccagaaatgatcctagactcgccttttccctctattctcaccacacagagccctttcagtgacacacattcctatctttttcatgcctttgcccagcttttctctctctgctgctgacaagtgctcagtcgtgtcaaactctttgcaacctaaggactgtagcctgtcagggtcctctgtccatgggatttttccaggcaagaatattgtagtgggttgccattcccttctccagggaatcttcccaacccaaggatcaaactcatgtctcctgcatctcctgcgttgaccaacggattttttaccaacttgtgccacctgggaagcctcttctatctctagttgctccttttctgatccacatgatatcagttttcagtgatctactagcagggctatgaggatggggaaagacgttggctatggaaaacacaagactcacttcttttctggctttgggatgtgttttcacacttacccaaattggtatatacccgattttggaaaatcataacacttcaaacaaagtaaagctctacttggaagacatgtctcaaaaggaattatgaagctatccactcagctaatctttgctcattttgattctgggcatgcctccagacaatggatgaatagcgttatctcttagacaaatgcaaataatcttcccagagagatcttcattttcccctctaaaacatgatatcttcctagctctcaattccctggagcaaggtgataattaaagtgtttcaggttcaaaggcagtctctctgaaattcctgatgagcgagcttcagagaggaggaagaataaacagaggggggggtgatatcataagtgaaacaggttacaatgttaataacatgttgaaaataagacgtgtctgcctagtatcaataattgactctgttcacattttcctgacacatgtgaatccaaatcccatcgttcataatagtctctattttggcaggcgtatgcaccaagcaaa

SEQ ID NO: 26585 - DNA, 1699 bp, Bovine  19866880706843
  misc_feature (1)..(1): n is a, c, g, or t
ntatgtgacactgggctttattataggataaattttgaggtcaagaatgagaggactccagggcattccaggcagagagataaatacatgtgacgtgtgcagaatgggttggcatgacaggagcgatggggaattctgcacgttctcacagatggagcccccaggattattagaaagaactgaataaccagttacttttcatttttatgagtaacaatacaaaagagtagtcattacagtggagtaggagaaactcaaggtaccaaacctgctagaagaattgcatgaatgccttctgctaatcatgtgatttctgaatgtagtcctttatgtagcagataaattcttgtgttccttttcagccctgtgacactcaagtgattttactaagaaagaacacttgtgtgtttgggtgaaatcagaagtcctgtctcaaaccattctttttgtaaaaaactttttattttatattggagtatagctgattaacaatgtaatagtttcagatcgttcttttctttagtttacaatataagtttatacagcagagtgattcagttatatctgtatatatgtgtgtatatatatatatatagagagagagagagagagagagagacatacacacacacagatgaattatatatatgtatatacacacacacatatttttccattatggtttattagcaaagcattcttatatttagtagcatgaaagtgttagtgctcagtcatgcctgactttttgccaccctatggactaaagcctgccaggttcctctgtccatagaattctccaggcaagaatactggagtgggctgccatacccttctccaggggatcttcctaacccagggatcgaacctaggtctcatgcattgcaggcagattctttatcatcagggaagtcctatatttagtagcatagcaacataagaatctaatatcctaatgaagtgggatctagtcctgtttgagccaatccaaaattctaagaaccatgaacagttttttaccagaaccaaacacaatacttaggaatgtgctaaagtaatttgttcagtgaatcaattatgaattgataagaggtcagagttctgtagttgaaaaattgtgattttaatataaggagaaagaaaagaacatgaagctcaatagaaggaagagaagtttatatttaaatagagggaaaaagatatttttcaaagtcttctattaaaggctagtgatatgaatttcattttatttagaaagttttttattagcacaattagagtattacttctctatcaccattagaatatcattccttttcctagaaatatatgcatgttattgatatagtaaaccaatagtgacatattggtttaatgcaacaatagagtgtttcagtgtctgaaatataacatttgtgatcactgaatactctgatttttctgcagattctaatatttgtaatgttttataatattgtaattgtttctaatacttttcattaggaaataaatgtttaaaaaatataagcagcagaacaaattcataaagaaatacgtggatgaagtgcattacttttgagaagacattgaacatgatttaattttctacaataattttgacattttgagttaatggtaatcttagacatcaacacataataagatgattgtaagtatattgacttttaaaggagaaaga

SEQ ID NO: 26586 - DNA, 1018 bp, Bovine  19866880771730
  misc_feature (1)..(1): n is a, c, g, or t
ntattaaataaaggtaaggaactggggattatttagcctaaggagaagactgaaaagtaattgaggtctaacagtcccaggaaaagattccatatgggatcttagtaaccaagagtcctggaaaggatcatttggtggtggttgtaaaaatatctattttcctttgagaagcaagactcttgagcatgatgaggaaagcaaatgcagaaatggatttcacctcctacatttttttctagtgctccaaagggcataacgtttcatttctcctcagtgaagaagtgagtttgtgctgcatgtgaagttaagttagttctagaaaagaactcctttaacgccctgaaatgtgtaattgagaaggtacaacttgctattccatcctcagaatttaattctcctctgattggagtggttgtcgttgtgctgccaaagaaggtggttctcaaacacatagaacaagaacaccaggagagtttataacacagaattctggaccccaccctgagaatttccaattcagtataattttcatttccaagaaattttcaagtcatgttgatgctctgatcctggaacccattttgagaaccactgtactcagcacctagattccaaagtaaatgtatccattcagcagcagaccatctttatcacaagatgccaggataaatgtgtattttttactgcttttcatagcggagaacaaaagggagaatggaataacattatctgttaatcctttcacagtaggcagtgaactggatcaaactttgggcttataagtaagctttggagcctagcataaacattttagatgagtgtagaatcatccacaaaatcttggaaaggatttcagcaagccaagatagtaagacttggtatttgaatttacctctttagaatgctttaacttctggtgattcttggataattgcacttaaaagcaagatgtattttaacagaatccattctttaatattgaaacagataccatgttctagaagagggacatttcaca

SEQ ID NO: 26587 - DNA, 2650 bp, Bovine  19866880847124
  misc_feature (1)..(1): n is a, c, g, or t
ntcagcattaccaaccagcactttgtcatcccccagactcttcatgtggctatttttttctcatgttgttacccttcctgtccaccccagctaagacctagagaagtctcgttagtcccattcgagacctaaagccttcactttgtctccttttgcaaggatgctcctgatttcaatcagctactagaaatgtcagatgaaaaatggcacaaatgtgaattacgacaataaaagtttataagctactaaaataaagttatagtacctaagagctgagtcaactgacaatgttaaatggaacattttacaaccagtcctgggataatgataaaaaaaaaaaaaaaggcacacagaacatgaagaaatatctgacaggagatgggctcaagatcaggctcaggctccatgagtttgtatgagcacctctcaagtgaggcgcaagaaaggatagcctaatgcttatggggttaccctctctgtgtccaaccctcaacatctattatctctttttcttttcataccagctcagtgagagggggtactgctatcattttagagaggagaaaccaaggctgaagccatccatttgggcaaatcctcaacaatcaaactattaaataatagacttcaaaagtctctctgattccagcaatgcttttctatatttttttctatatctttctataggcaatgctagctctaaagaggagaaggcaatggcaccccactccagtactcttgcctggaaaatcccatggacatggatggaggagcttggtaggctgcagtccatgaggtctctaagagtcagacacgactgagcaacttcactttcatgcattagagaaggaaatggcaacccactccagtgttcttgcctggagaatcccagggacgggggagcctggtgggctaccatctatggggtgcacagagttggacacaattgaagtgacttagaagcagctctaaagagcatacatagacatgtaatctcatatataaagcaaagttaagcttcacaaagaatctctctctccaacttgatactagtgcttgctccatgtaatcaattcaggtgatggttttcttgaccttgaagcacaccatgtaaattagctacacaatcaaaggcttccctgggggttcagatggtaaagaatctgcctgcaatgcaggagacccgggttccatctcagagttgggaagatcccctagagaaggaaaggcaaaactatggaaccagaatgagatcagcatcaggaagaaagatgaacattaaaaatcatattttagaaagaatactcctatatataaaatagaaaagtaataagaacctactgtatagcacagggaactctactcaatactctataatggcctgtttaggaagagaatctaaaaaacgagtagatacatgcatatgtataaccgattcactttcctgttcagcagaagctaagaaacattgtaaatcaactataccccaataaaaattttaaaagaataaaggagtattatcaggagcttgactaggtggtgtggttctcttttattttttaaataattccagtcacaaaatatcttgtgttatttgcaaatttccactgcctttctctaacttttcaagtactacatcctcctgtcagccccatgcatataataccaggtgacactgtttctcttgtgtgcccaccccagcacccccaatgagagagatgcacgcacactaaccccacaccgggcgcgtgtgtgcatgctcagtctctcagttgtgtcgaactctttgtgaccttatgaactatagcccgccaggcacctctgtccatgggattctccaggcaagaatactggagtaggttcccatgcccttcctcctccaggggatcttcctgacccagggatcccagggatcaaacccctgtctcttatctctcctgtactggcaggcagattctttaccattagcgccatctaggaagccctgatagtctggtatttgctgtaattgtacaatttcttagaaatattatgttttacctttaaagatcttacaaaatttatattcttctccctcatctgactttgttatggaataaagatagtcttttcaattacttattacggagtaaaattcatgctccaagaagaattaatgtcatgttaattctgaggctttgcctactctgtgcaaactcctcttactctagccagagaaacacggtgataaaatggtataatcgcatgacatgcaaagtgctgatgtgaaatgaaaaggacagaaatatgattgggatattaattcgcgagaaataaggaaatgggactgtttgaataggcttagcaggatggtttagttcttcctgaaagtaagtgtgatgctatctcaacttaccttgacctctaccctgactcccccattcaggtacaatcaaatgtttagtttctaaacacacacacacacacacacacatgcattaaaagggttacaaaatacccaatagacagacacagacattcagtgaaacttctcctaaatatcagataaaggcagcatgccaatgtagcaataaaaccataaatttctattgtaatggaacacaaattaataaaatggggggaagtagaacttacaaaatagctttaaact

SEQ ID NO: 26588 - DNA, 1445 bp, Bovine  19866880852903
  misc_feature (1)..(1): n is a, c, g, or t
ncaggcaaacactttgactatgtgccagcagcaaggtcatcaatttccaccaaacccatttcctatctcttttattgggggacaaagatcaatggctgtctagcccaagacatgggagacttctctcttctcacatctccagctgtcactggctgtctgattctcaattatggttgggggatttacttagtgaataaatgattgacatggtaaatatatattcccttcagggaatacaccattcccaactgctgctctcatgatcgcaagagcatggtcacaaaatttagtctcatccaagtactataattaaaatggagtttgattctttccaaaaatatttatttatttatttggcagtgtctggtctttgttgcgctgtgtggggtctttgctgcctcatgtgggatcttttcattgcagtgcatgaaatctctggctgtggagcatgggctcagtagttgtggcacacaggcttagttctgaggtatgtgggatcttagttgccaacccgggatcgaacctgcatcccccgcactggaaggtgggttcttaaccagtggaccaccagggaagtccctggagattctatgtgattctgatgtgattcttagcttctcctcactaagggacaaaagaaacattgtcaaatgtggttaaagaattatttctgttttagtgcaataggtaagagcttgggtttccaagtcagactttaagacctggctctgtcacttactagactatgtgacttcggtaatttaattaacttccctaagacacaggttcttcatcagtaaatgggataaacaataatatctacactgaggattgttctgagactagaatgagataaaatatatagagttccagcacagtgcttgccatgtaataatcaataaacagtaatgattattattattattattattactgttatttataattttgtttcttccttttctactgattattttgtgtgtttcacattattccacattatgactttcataatataaacacttctaaacaatagcaaataaatttcattatgttgtgcctccgcaattgtttagaatgtttattatttccatttgttttttttctaatcatgttttctgaaaaatttctggctttgattgttacataggaaagcatctgatactacttatttaaacctgacagactgaattttttttttattgtgactggatttcaaagtgttactttatctgagtatttaattttaagccttttctctctcagagtaaaatgcagttctgtctcttaacacaacttcagaaattaataagcattctctatttagtgtggcttatcttcacattttttcttccacttatactacataacttaatcagtaggttttgtagaagttctgcaactatatgctgcggtaagaagtcagtttccctcaaagaactcat

SEQ ID NO: 26589 - DNA, 984 bp, Bovine  19866880860133
  misc_feature (1)..(1): n is a, c, g, or t
ntgtgctgctgctgttaagtccttcgtcgtgtccaactctgtgtgaccccatagacggcctcccaccaggctcccctgtccctgggattctccaggcaagaacactggagtgggttgccatttccttctccaatgcatgaaagtgaaagtgaagtcgctcagttgtgtccaactcttggcgatcccatggatggcagcctaccaggctcctccatccatgggattttccaggcaagagtactggagtggggtgccattgtcttctccaagcatgtgctacagaaagcttatatatgcatgctaaaaaaataacacatagaattttagtgaccaaagtggatactattagcaatagaaatgtcctccatgatcgacacagatgaccgaccacgtgacacaaatgactcccatctaaagaaaatttgatacaaaatagaaacaaatttagaaaatacagaattggaataaaattttttttaaagaatttatttagcagaatttctacagtcacaattagataagaccctcagtgttgactgagcagaaacaccaatgaaagcctgctgctggcatgggcatgtacaagcgattttaacatctgatctgaaaagcagaagtttgggtaaaagtgcgcctatttatatcaaggaggttcagaactgactcagaggaaaaagtataatcctctgactaaacaagaccacttcctgaaacacccaatgtttttcttggaagcaaggatatacaagtgccatttctctcaaacactgattaaacaaaattgaagtctaacacaaaacagaagacatatattttccaaagccaaccaggtttcaaagtggagaccattccataaacatatattatctggtcatgaaagggaggactttaaatacagtcaagaatggataattcaaggtatactataatgaataaaccactaagtacctacacatatccctctttataccaaaatctcttaat

SEQ ID NO: 26590 - DNA, 742 bp, Bovine  19866880910428
  misc_feature (1)..(1): n is a, c, g, or t
nttaaatgcacaaattgaaagagaactcacaaaagtgaatctctgaggcatatattattaaatggataaatttccttctttaagatctgaggactgtaagcaaaaaatttctatgatttgaaaatactcagctgtaactatagcaacagcaagtatatcataatttcatgactgattacatttttttttcctccagaaaagttaccctttacgaggagggaaaattcattgtgatgaggtctgaactataaaatacagctagggacatatgtctgctaaccagggccaagaactgtgaggtcatctttttaatcacgcaattagagggaaaggcagttacagaattcaccccaaccattatctgcagccagagaaaaaagcagagtagaaaaagattattttcagagtagtatatttgctttatttgtaaaatttcagaatttaaccattctaacactatgtctattgtccaaagaattgattttaagaaatttaacttatataaatgtttctccctaaaagtgaggatttactttgatttgctatttcattccttgatatcaaagttgccacactgtaaatacccacagggatctgagaaaattaaggaattcaataaaggagatgaacaggacttcgaggaggatctagccatgaattttgtgtttctccttccaactagacctcatctgtctaactccttgggttccaatcacgctatttgatttggttccactttaaa

SEQ ID NO: 26591 - DNA, 1382 bp, Bovine  19866880931535
  misc_feature (1)..(1): n is a, c, g, or t
naatctggataaaaggtagaatcataaaaatagaagaaacataaatggacacttcttgtgaataaatacacacaggactaacaatattcattcttcacgtaagtcatttagaagaatgagatcataattcaatttcaggtttataaacagcttgtgctgtttatgcttagtcgtttagtcgtgtctgactctttgcgaccccatggactgtagcccaccaggctcctctgtccgtggggattctccaggcaagaatactggagtggattgccatgccctcctccaggggatcttcccaacccagggatcaaacccaggtctgccacattgcaggtggattcttcaccagctaagctaccagggaagcccatagacagcttaagtctctcttattataagatagaaaatactgatttgagaacaatgaactcattattactgtaaaataatataatggcatgtaagtgaacaaaatagcagttctgccttaaattggcaaagttttaggtatatacttgggaaacatcacacaaacttacctgattatggattttagtgtcattttcaacctaggaatcactgtagggttccaatgagtcatgcttttatttgacaatttcaattgaaaggccaacaaaattttgaaaaacatggtgaaaacaaaagaaaaaaaggatttctcatttctattcgtgtcctacaaccaaagagaagttggaaagtgtggtgacctcagctcaaagaaactgatcgcttgtgtttatgccctcactctgccactgaatagctctgtacctcagggagtaacctaacctccctctgctccatttcctcacccgtaaaaggagatcaatgagacccgtttgtaaactctcattcacgtctattctagaacatttacctaattcaaacttaaaaagagaaaatctactttattagatttgggctaagacgggttgcaaagaatcagtcacaactgagtgaactgaagacacagcaattggcagtttcactcttttcaacagaaaatggtaaattttcagaaaaataaaattaccaaggataaaagtgtgtgaaagtgttagttgcttagtcgtgtccaactctttgtgaccccatgaactgcagagcccaccaggctcctctgtccatggaattctccaggcaagaatattggagtgagttgccgtttcctcctctaagggatcttcctgacccagggatggaacccaggttgacaaatcaggaaaaaaaaggtgtcagttgccatgaggacagctataaattcacctcagaaattataaagaaatacttttacagagcctccgacttctgctgaaaaattcccatttgcacatacagactccgccaaaacacaatag

SEQ ID NO: 26592 - DNA, 809 bp, Bovine  19866880957911
  misc_feature (1)..(1): n is a, c, g, or t
naaattatttattgaggaatgaactacataaataagtgaaacagatcttttttgcttaaaatataaaacaattaaaaccaccaaaacaaattaaaataagcaagaaattaaatataaaatttccaacttacttcatttgagatggattcattccaaaaccactgggatgactggaaatatgaccattcatcgtgattttaatgcttgtgttctgaaaagagaaaggttcatggactgaaggcagtaaaaaggttgagacatctcagctttaaagttattcattcaacaaaatacgtgtcacttccaggatgacgctagaaatataaatatctccaccctttgaaagctcaggctccagaattaaatatggacatacaaacaaagattaaattgccatttaaaaattgttttcctaatatttatttacttatttagctgccccgggtcttagttgcaccatgtgggatctttggttgcagcacatgggatctagctccctgatcagggatcaaaccccaggtgagtaaaagaaaaattgtaaatatagttctgaaccctcaaactagataaacataattctatattttactcaattttatgaaatgttattttagtatttcattatgaaagtaatataaactcattaaattaaaaaaaaaaaacttgaaaaatacagaaaagcacaaaatacaaaatagactgaggggaaaagtatcacccaaccccatcatttaaagataaccatttaacagtcctgtcagtttcttccagtctttttttttttttctggatctagcttttcttccttc

SEQ ID NO: 26593 - DNA, 1416 bp, Bovine  19866880960608
  misc_feature (1)..(1): n is a, c, g, or t
ntctccagtgtttaattcattgcccagaactgatgttaacttctgaatggcagaacaaggatgcaaaccctgatctgcttaagctcttatcatgacccaggcatggattagcctatttattctactgtttgaacgttttatacaattagtatttgtttttctcagggcctgctttgtgccaaacacaatgctgagagctagaaagggaggtgtgctgaccgggagtagaatgcagccttcccatcactcaagagctgccgcggaagcctgagccatcctgactgtggattgagagattaatgcttgtttttctcccaaaggctgatgagatgcaggatgtgatgcattttaactacaccgcatggcctgatcacggggtgccaacagccaatgctgcagaaagcatcctgcagtttgtacacaaggtccgacagcaggctatgaagagcaaaggccccatgatcgtgcactgcaggtaacctcctcaaaggcgctggctgttagaaatcatggaaggaatttcccatcattccataaacctctgatcagattgaattaactggccaatgagttataatttttaaaaatttaaacagtggagagggaggtggaaggggcattcaggatagggggtacacatgtatacctgtagctggttcatgttgatgtatggcaaaaactatcacgatattgcaattatcctcgtttaaaaaataattttaaaaaatttaaaaaattatgatgaacgaagtcttactaaatacatgatttacatataatatgactatcttagggcttccccggtggctcagaagtaaagaacccacctgccaatgcaggagacacgaatttgatccctgagttgggaagagtccctggggaaggaaatggcaacccactccagtattcttgcctggaaaattccatggacagaagagcccggcaggctgcagttcatgcagcctgcagaccctgcagttttgcagggtcacaaaagagtcatatacttagcaactaaacagcaacaacattgtttatcagaggtagcaatgagacaaagatgtcagaggaggcattggtagccaataagcctggacctagcactttgggctttgtgagatagaatgactaagtgtgtgtgtgtgtgtgtgtgtgtgtgtgtgtgtgtgtgtgtcaggtggaggggtggggggtgggggtggtagtggcagtatgtgtctccctggaaagaaaaatgcttcataagctaccaagtttctgactaaggaggctgcacttgctgtcagtcattcccaggccaaaaagctttgcttcacaggatgaggttacctagtctcaacatgtttccttccaagagcagaaaataaagctgctcaacccggtcaaacacgggcctcctttcatgcagggagcagg

SEQ ID NO: 26594 - DNA, 1621 bp, Bovine  19866880976583
  misc_feature (1)..(1): n is a, c, g, or t
nttggctaatcttaggaaaagtgggggaaatgtttgccaaaagaagagaaaagagccagattaaacaaaaaaagaaacactagctctctcagttctttccttcaatttgaagaatgagctctggaaatactgggttggccaatattcaggtttttccataacatctatgggatctcaaagagtagctataagatgttatggaaaaatccaaatgaactttttggtcaactcaatctttttcatttggtccagcccatcatgtgaaaaaagcaacagagcaacacagttaagcagtaaggcatgttcgagcagaatggcaatcagaaagcaatcacagtctcagagttagaaaatatctcaaataccccaaggggaagattagttcatgataaccatattccttgcagttgccttcccctcaataaaaattaaaatgtggccatttaaaacaatgccaaacagtgtgattcaaatgaaatgcaaggtagaaactctaactccataatccttgataattgacagtaatgtccctgggaaaatattctacgcagttatgccaaccatacaaagatatgtgttagaacggcatgacacaaacaagagtcctcaagttatgtctaatatgcccgaagtttcctttcatttctaaaacttaagattctttggaatgagttttagaactggaataacattagagatgagttaccaatcgatgcaaataatatctattttatagtggatctaaactgtgtaatttttcaaacgactttaaataatttagttttgcttttccaatttgataaaaggattgtttaactcaaatgtttacaaggtcatatcatcagtatttggggctacgataggcaatgggatacagcagaatgccttctaaactgagctctaaacctcctctgaggttttattattattttattatttatttaattatttatttattattattaattattaatgctcctgaggatgtagccatgtacagtcaacagttcagaaatgggctccctcaaatcatgctctcatagttcccacctcttcgcttccttctctgtcttctgagtaaagttgccaaggaaggagagtgaggggtaagtgagccctagatttgtcactaaaacaaaaggttctgaaattagatcactgggagtggttgcacaacttcatgaatatactatacatcccctgaactgcaccctctcaaagtgaatttcaccttataggaattacatttcaatttaaaagaaaaaggaaaaaatgaagttcacgcatgagggagaaagcaggagagaaaggaaaactaggaaaactaactctaggttgttgggggccggcgtgaggcactccgcccgtggcaaaggtcatgaggaaggaggctcgacacacacaaaggtgggatcgagcctcaggagtccccctggaaattctcaagcatctacccccataaccagagcctgcctactttactactttgtgctctcacctacacctctgactttacgggggggctgtcccccaccacctcttttggagaaggagttaacttagagctccagttaataataattcctgggcgtgataggagtgttccaacctacaaactcct

SEQ ID NO: 26595 - DNA, 1164 bp, Bovine  19866881006501
  misc_feature (1)..(1): n is a, c, g, or t
nttcccaattttcttccttcttgcttgtagaacctggagtgtttacccagtagatatttctacgtatttacaaaacacttccagcaacttaatacctaggagcaagaaattatatttctagaactcagcttttttgcaaatctgaaatataaagtataggttgcttctgaaatctaaaggaattttttttaatgaatctgaaatttttatcattatcttttcatttaagggaaagtaattaaacaaattaggcatgtttaataaaaatttaatataatagaggtgcctgatatacaataattatttaaagctccctaagcttaatcatatgttaatcaattctttagcccagataaatttgcttctcttttttttaattctcaggagtaaaaatggcttaaagaagaggaaactgactaagtaagtttttcttactatttcatttaaaaatattcttcataatgatcttcactttccaaattgaaaagattgtgtgtctttaatagaaggaagcttaagaaagaggcaaatgcatattatgtgttgctgttatgtgctggtgtgtttacacatatggatgtcagtgaccaccaagaaagtgtaccaacagaacacttttcaagaataaggaaaactctcactgcgtgaaatctgaggaagaatgggttgttaggaattatagaagtcttacagaaggatgtctactcttctacatctataaaaaatatataatgtttagctgcatcaaagtagtacaaaaacctttgccattttgtagcttcaaatttcacgcttattgcaggaaaaaggcttttattctatttgatgttataacaaatactttgataaatgctgtctcaggaaatctttataataaatcaaaaaggataattgctttagcttgcctgtggtttcacttagctactgcatggttaagtcataagaattataattctgaggggtgaaaatgaactatcagttgatttcaaaagcctaattagagtatcacctctaggcctttagttgaaaactctacacataaagagtcgatcgtttctataaatagactttattcttgatacttgcctgggacagaatattggtgaattcattaaggagccaattaagccaatttccatcagttcaatggtatctgtgctaatg

SEQ ID NO: 26596 - DNA, 804 bp, Bovine  19866881145630
  misc_feature (1)..(1): n is a, c, g, or t
nattttacccccatttcattgttattgtcactaatgtattctgattttgtatctcttgccttgatgattgcagtagactcctcattgactccttgattccaatctcttctcttgaccagtaaccctccacattgccaatagacttgtctttctaaagggatatctggtcactttcttttctgatccaaaaaatttggatgcctcattgccattataatgcaattcaaatttcatagtatgatattcatggctttgatctgaaattagtcattaaataagtgttcaaaacattcaatatacatttccttctgctttacaccccttttgtttcttactactcactataggcactgctactctggctgcacgagttctttcctacatatgcaccatgattccctgtatccatagttttataacacacattcattttgattggaatagtcactcattctactcttttgtgtcaaaaattctattcttggcaaaattcaaatgaccattctgttaaaaattgttccagttgaaattagatagttcttccctgtgtgttcttttaattgtttttccccctcttatatcaaataaattaaatacttatttaaaatgcttatcgatgtttcttctattatatttgtatgaagtttgccaggtcaaatacaggttattttatctccctcagcccttaatcccctgtttaactagataattcctgctcatctcctgaggctttgtctaagtgtctctttataaatgagagtctcccctgaattcttagaaaatgtgatcttccaaaaaacattt

SEQ ID NO: 26597 - DNA, 2999 bp, Bovine  19866881169843
  misc_feature (1)..(1): n is a, c, g, or t
ncagtagatgaataaaaatagaagtgaaccttgcaagatagtacaggcagaccttggagatagtgcaggtgcagttttagagcaccgaaataaagcaagtatcgcgataaaatgagtgacaggaattttttggtttcctggtgcatataaaagttacggttaccctgtattgcagtcaatattaagtgtgcaataccattatctttaaaagtacgtaccttaatttaaaatttaaggtacgtactttttaaaaacataatgccagataattacaatggtaacgtcaaagatcactgatcacagatggccaaaaagagtattacaataacaaaaaagtgtgcattactgagacaattatcaaaatgtgacagagacaagaagtcagcaaatgctgttggaaaagcaatgcccacagacttactcaatgcagggttgccacaaaccttcaatatgtaaaacacagagtctttgccaagtgcaataacacaaggtatgcgtgcactgcaaaatgacatgtcactaatcctagtctctcttctgcagaaaataataaaatctggatctggagccctcagtttgaggaataagctcttaaattaaaaaatcaaagagacactattaaacggtagcataagactcatataaagctgctgctttgaagtgttataaatggtaggtgttttatcgtcagtgtaaaagaaacatactaaatactttctaaatgctatgcagctgtttatatctataagtcatctattaacacaaactatttgtgaaaaaaatacctgcattgggtcaatgcagcattagttgcattcattagagacaggcacctaagaaccaggaaagatccctgcatggtttagatctggctcctaaaactagcccattgaggaatgaggcacactgtcctctcaccctccaggtctcagttttcacatttagaaacaagggcattcactctcaaagtctcctgcatttctaaaatgttgaggttctaaacttatggcaacttaagaaagtcctttctttcatgtacatgaagagagtgaatataacattttttttcaaaagatctaacccagtatacaagccggcaatatttcccatttgtattttattctcaaaagcatttcatttactcacagaaaatactttatgtatgagatgtgattattaagtaatgagactggcttttttacacgtggctagggaatcagaatcatagtatttgagtcactagacagaaaatttccaaaactgaagaactggaacaaaaaataaagaaactcaatacttgcaactttaatccatgatgggaaagaactgacctaaaaatgagactcagattctctctctgctgtttttcagagaagaatctcaattattactctgcatacacaattctatcacagattttattgttactatcattttcagcatccaaatcttaagtcttcttagattcagtgattgctactgtaaaaaaggtaaacaccagacagactatacacattacctttatcatgcatatttaaagcttttaagaggtcttcccggattggatacttggctttataacacagcctttgaatgttggaagctgtgtcatcacctgaaagtgtagtaagatctatacaggtaacagccttcaggagccatgcagcctggtttgaagaaaagtaaaaacaaggcttaaaaaaaaataattaatctccaatacagttagttagtagaaaaccattaggtacataagggtgctaaaatctcatgtctagggacttccctggtagtctggtggttaaaacttcaccttctaagggaagaaggggttctagttcaatccctggttggagagctaagatcccatatgccttggggtcaaaaaaccaaaacattaaaaaaaaaaaaaaagcaatactgtaacaaggtcaaaaaagaccaaaagaaaaaaaaaaggtccacatcaaaaaaatttttaaaacaaactgctttaaataaaataaaatctcccgtctatgctgttccgaggcatacattctgatgtgttcaagcttaaccaaaaagacgaatgttacacagagtaaaataaaaggggaaaaaatagcttataaactttttttcttccacagataccccaaatggaaattcctaatagaacaagtctccccacgtgtgacttttgcatctcaacacaaggagactcagaggtgggttgccatttccttctccagaggatcttcctgactcagggatggaacccacgtctcttgcatgtcctgcattggtaggtaggttctttaccattgagcgacctgggaaggttctaccctgataagggagaactcgggaacaaaagtttccatcttgtattagacctccagccctgggacctggaatgagacacgataaagagtctactttcttttttttttttcccagtttaatccaatttcaattttaaaacaatattcacatttcacaactcattcaaataaattccttttatcttttcaatcagattatttctaagaatgagcaaaatgcaacctgctaccctaaaggattcaatcacgatattttgcctcacttgtggaatgaactctgaattcctttcagtcctgagatgtatagcatgtctttggttagtacatactgaagaatatgctgaccactagtactctacaaaacaccattttgcaaattttgaaagataatttgggaaaattaattgtacattaaacatgtggagaaggcaatggcaccccattccagtactcttgtctggaaaatcccatggacagaggagcctggtgggctgcagtccatggggtcactgagtcagacatgacagcgacttcactttcacttttcactttcatgcattggagaaggaaatggcaacccactccagtgttcttgcctggagaatcccagggacgggggagcctggtgggctgccgtctatggggtcgcacagagtcaatcacactacgcga

SEQ ID NO: 26598 - DNA, 1340 bp, Bovine  19866881182729
  misc_feature (1)..(1): n is a, c, g, or t
nttattgtgagtcttgactctctgaagccacaactttgtatccacctatctctccagtcttgagggcagcgattttccctgtgaacttgtcttatggatccaagaagagttgttgactttcagtattttcagttttccacctcttgttaagagggagtagcaacttccaagcttctatcatgtcaaactggacatgggaatataaaggataaaaaaaaaataagaatggctgcattaaattttatgattcaaattgctgttagtagatttaaggaaaactgaagacatctgtattgtttatagtgtatctaactattttgcaccgatgttagtttcttggtttagataatgtactacagttaatataagatgttatcagtgcacgaagcttgatggagggttcccgcactctgtactatcttttacaacttcttgagaatctctaaccatttaaaaatagaggcttttcttaagtaaatgaaactagaaaaaacatttgcaacataagaaggaaaaaaaaaaaagcctcaatgtatagaaagctaaccaatcaataaaaaatacatcctagcagagaagtaggtaaaagacataaataggtactttgcaaatcatgggtacctaatttatgaaaatttgtttagactcactcacagccgagacacagcagatagaagacatatcactttctatttattatcctggtaataattaacaatgaacacaataataccaaccactgccaaagctgtcagtaattgggtgctccatctactgctcatagaagggttaattggcacaatttcataggaaaccagtttgataacacataaagtagcgaatagttgcagtttcatatacaggagtttattcttaggaaagcaggatgtacacagatgcatctatagacatattcatcaagcattatttattgtaaaaatcttaaggaacaataataggaaaatgattaaataactacagcagaatatcattgttgtagaagaatattaaatggcatgggaaaatgattccaagtatcaaaaatctaattaaaaaacaatatgaaaagatatgtacaatatgatgccagttctgtttccaaaggttatatgtgaaggaaaaaacatggaaataacaaaatagcaataatcagatatcccgggggtagtggggtcctgtatgatttattttcttctttgtgattgtcttagtttttcatcttttaatgttgatcatgtattacttttataaacaaagcaataaataaaatagatcttaataaaatctgtcagccaaatttattaaactcccattattccaggttatacaggaaaaatact

SEQ ID NO: 26599 - DNA, 1427 bp, Bovine  19866881182870
  misc_feature (1)..(1): n is a, c, g, or t
nttcctatgtttttcctattgcattattcgaattaagttaagaattctttttattgtgtcttaatgtttctgggatgtgaacagatcaatatttctagcctgtgcacactctacctaagggctgtgagtcatatctgctttgaaagaaatagcacttaaggactgtcagtcaagtcagttgtaagaaacatagaactctttaagaattactctgcctcctcctcacatctaaatataaccaactggttggagtgtctaaggcagatagctaagctgtatttttaaaatggtacaatcgcaattaatctacacaaataaaaagctcaatgtcttattacctatgtatagcaaatatataatctttgttaagctaaaaaccaaataacaatatgagtaaggaatataagtaagaaaatgacccagtttcctaaagtcgtttggacgtcaatattacagtatattgttttactaggtccttatacccaggttggaaaagcactggggcagggtatgtgaagatgagatttctagtctctgtttggtcactgcttaactgcgtgacctttataaactactgccttcaactcttccttcccaaggtctgagtctcctttcagactgcaggttaaggactacatattaagaatggactgtgtattttcagattcacttgctgcgtctttgtgagaacttggagttcatatcaatcagcttgatatagaagaaatccccctttaacactcaaaccggcttgcctcattaggatttgttcactgttcctggaagtaagtaaaagcaaaattgttcctctggtatcgaatatactaataacataacaagtatttattcagtgatgacttaccttaagctcatctctgtgctaggtctgtagttaattgtctctctgtatgagcttccatttaccaaccacataatttatatttgcaaagtgatatttggattcttctggcacattattgccaagagcgccgataaaggaatcatactatgccctaatatccctgattatatttgtatcagtgtcatagaggttgtatcagcagacagaacaatggactgtaccattaaattagcacaattttgcagcaccgtctggcagaagctcacacttaatccaagaggttattcaaccctatccaatatgattactctataaatatttgcccaagctcagcaccagccgttatatcactaatcacacacaggttggttatagcgaagacccccagtgtcagcaatttgaaaaacaaagctaattagttttgatttagggatgggaagacttattaagttgaaagtggagagttcgcacagtatagtggctatttagagcacataggaatatgaaggagatttactcttatttgcataggattttgagaaggaatggaaggactgccaagcta

SEQ ID NO: 26600 - DNA, 1297 bp, Bovine  19866881191822
  misc_feature (1)..(1): n is a, c, g, or t
nctaggcttccagtaccaacactgatccaaatatgtgaccttggctattctctagctttaccttcttgatctactaaatgagagatttggactagataatctctgaggtcatttccatcactataattagatattttatgcttctaagtgttgagagactaaaagacattcctgcactgatctttgtatgtaatcagctgacactacaatttaggatgtcagactatccttattttattgctgatttgattttggttagaggctgatgtgtctctagtgtacataattacaattgacattgatgggtatagagcagttcacaaggtttattaaagccagccatagaatttgaatgttctgggttcccttcagccttctcataaactataaatcatcctaatattgaaacttgaccttcctcagtatgaataaaggcttctggatttcaaaggcatttgtgagtttgcagtgtccctgaatacaatgttatcctctgagtcacacactgaaaacccagttctaaatagatcttattggggtgtttggtttaaaggtgaactcaagcaaatctattattgaaaatctcgttcctggtgcccagtaccaggttgtgatgtacctaagaaaaggccctttgattggaccaccttcagatcctgtgacatttgctattggtaagttgccagccacaagaaaaatacctttatcagagtactgtttggaggggtgccatgtctaagttctagtcattatcatcagttatgggaggtccatacttgttctcccaatattcaatcctcagagtaattaatgaccacaattgtatacctggaagacatccttagcattcattacttaggaaaaagaaaatctcaggcaaatatggttagttttcaatgattgcatcaaaaaagtgaaatacctagtcagtcagtaagtagagatgtgaagccattgttaagatattaaacattccttcttgactttcttttttcactcccctcccttcttcttagttccaactggaataaaagacttgatgctctatcccctgggtcctacagcagtggttttgagctggaccaggccttacttaggagtgttcagaaaatatgtggtcgaaatgttttatttcaaccctacaacaatgacatcagaatggacaacctactatgaaatagcagcaactgtctccttaactgcctcagtggtaattttccttaaccagctgtcacattttcctgtgtcaacatgcattcacatactaactgtgtctgaaaaaattattatgtctgta

SEQ ID NO: 26601 - DNA, 1484 bp, Bovine  19866881202350
  misc_feature (1)..(1): n is a, c, g, or t
ngcctttaggagaaggtcatctttaaaatgagccgctccttgatttatcgtctatttcttcaagtcaaaaatgcccctagaaatgacaagcctagttaatataatgaatttcagtagtggcttttgaaaaagcaacataccacttgaatccataaccacttgaaggttgcatccagttccggtttcagcacagatgtcagatgttcatagttacgggacccttaatgagatgtgtcattgcatctctaccacctaacgatcatgtgaaatagtgtagacctggaagtctcaggcactgaaagcaccacttccgagtggagctgccaaatgtaggtgagaaaacctctcccagccaacatcaccatctggtactggattatcctcaaatatgtacctcattgaaagaataaagctaagctccctgaaatcaagaggcacagtaatctgccaacttctgctcgtgccatcacccagaactgaacctggctctttcagtattttccaaacgctgaggtgtacaattaagagttaccatactggagatcatatgagtaaatacacctgtgcagaatcttttccggaagcaaactgaatggtgaataattaaagtctgttcatgaccgtaatttaaatcctaccacagttaaacttaaatcttgctccctcacatctctacttggggtttccctggtggctcagatggtacagaatctgtccacaatgcaagagacctaggttctatctctgggtcgggaagatcccctggagaagggaatagcagcccactccagtattcttgcctggagaattccatggacagagaagcctggtgggctacagtttatgagatcgcaaaagaatcggacatgactgagcgactaacactcactcatatctttgcttacttcacctgataatttgcatcccgtctgcatatcatagtctgttgtgaaccagttaccagagtgaattctacatgctgtaaaggctcaaataggatattggtaaatttcttgtaaaagtctagagactgaattattccatccctgaaattttgattatctggtactcagtttgactctacataatatatgtctcctactaaactgttctgatttaaaatacttgctcaaatttaatattttttatcttaggaaaatactagaggtaaaaaatcattatcccacagcctttttttttcaaacctgttgtaatattttactaaagtattgtctgagagaaagtgaaagttagtcacttagttgtgtctgactctttgtaaccccatggactgtagcccaccagactcttctgtccatgggattctccaggcaagaatactggaatgggttgccattcccttctccagggcatcttcccaacccagggatcaaacctgggtctcctgcatttcaggtggattctttaccagctaagccaccagggagtattagagtattgtccgaaagaagtgattctcaaac

SEQ ID NO: 26602 - DNA, 1156 bp, Bovine  19866881244593
  misc_feature (1)..(1): n is a, c, g, or t
naaaagaaaaatccctcaaatcttgacattcaacttaaactcctttgtaaaccagttaatatcctagttctatcacagccatagtctactagctaaatattggcataaaggcaaaaattgttaggaaaaaaaaataattcaaaggtcatagccaccactgtaaagaaaaattatagtttgcacaaaatatcttgatttaaatcaacttaactttttctgttaatattttttctctaaaaaatgaaagccaatgacccaatgatgactatttcacttaccacatctctatcaatgcgggctgccatcatctcaggtgtttcttcctgctggtaataatttctctgtttctcaactaaagaaaagaaaatcatacatctttcaacctattgcttaagtgataccaatatagataagcagacatgcaagctgtctagaaaagagtgtcactggcaaaagtaaacacttgcaatggatacaaaaatcaaagctgtgctcatcacctctggcctgcaccctcgccactagcacctctgacacacatcttcaccaccctcaccctcacctctgacattcattcccaccaccacacttgacagagctgaagtaccagccttccatctgcatggtattgatttactctgtaatgtcccctctattctctctcttctaacgtcagatgcctgtggaaacaagcccaacttagtgccctttaattcctacagaagaaaaaatttacacgttttttaagcaccaatttcttaaaaggggccaactaagttctaagttttaaagctcctcattctcatactttctaacatcgtgataatagtaaagctttgggtcttctgatagtaaagggcttctaatattccacttgtaattaagcttaaagcccacaatgttgggctcattctcatttgaagctatatgctttaaaagcagaaatacctacaagaatttgcaaactgaagaacaaaagtcgcgagatattatgttagctcagctgactagggcatgataatcagtatcattatctgaactccttccagctacaagactgttaacactttcaattaacacagatactcattccaagatttctcagtagagaaagaaagaaaaagggaggaggaacaggagaactgcatcattacta

SEQ ID NO: 26603 - DNA, 1983 bp, Bovine  19866881245235
  misc_feature (1)..(1): n is a, c, g, or t
nggcttaattaataaggaaatggaggcactctagcaaatacaattatcaaatggataaaatcaattcagtgtggtgtgaagctgaaagctctgcctgttacatctcgattctaatcaattccaaacagtggtgcataaatcaaggtcagtgactcaggataaaaagaaatcaaggacagtaactcagagaaaaattgtattttaatttttaaaggctatcatttaaacaaatcataaactttcagaatcaagtatatcatcttccatgaacggagaaggaaatggcaccccactccagtactcttgcctggaaaaccccatggacggaggagcctggtgggctgcccatctatgggatcccacagaatcggacatgactgagcggcttccctttcacttttccctttcatgcattggagaaggaaatgacaactcactccagtattcttgcctggagaatcccagggacagaggagcctggtgggctgccttctatggggtcgcacagagtcggacacgactgaagcgacttagcagcagcagaagcagcgtcttccatgaaagtgatgttcaattggtcctgggtgaaggactggcattttctggagatgagccccttcagaactccctcaaaataggcatctgttctcatgggaccacttcccacacactcacctgttatgaagcttatagtggagctgtcacagcagctgagttctgggtctccccacgttaccatggtaactcgaaagttgtagtaccatgctggcaacagattcgctatcctctaaaaaaagcaagaagaaaaaggcccagaaggaaaatcatatttttggaatagagttatatatttctcttaggctatgaaaaaatgagtaatttttaatttcctttctgtgcctttgggaggcctccctggtggctcagtggtaaagagtccggctgtcaatgcaggaaatgcggcttcaatccccgggttgggaagatcctctggagaaggaaatggcaacccgctccagtattgctgcctgggaaatcccatggacagaggaaacttactgtctacagttgattttgtacttctcaaattttccattaaaatattctttttggaattaagtgagatgtaaataaaatgatacacataaatttaacacaatttaaaaaattatttgaagatatagatagtttgaaaatgggttttcatttgcagtttcttaaattacacaagtgaactggcacttatttgtaagtgactggacggacacatcttcctatttctaaaacatgatctttcacaattctacattctctcatcttggactgttagcatgtgttcatactgggtgacaatcatgagagttgtcaactgagtagtggacagttgtttgctttctgtgtgacctgtagataacctgtacttctaaaattattccagtctcagaaagagaaatctttacctgctcatttgaagaacattgctaatggtctgacattgcaggtatttaactgatttgttgatattaagaatagtcatcactcaagaagtatccactcactactgaataactaaaggaaaacatgttttctgttttaggagcagaaaggaacaataagcatgtgatgtgcttagttgctcagtcatgtctgactctttgtgaccccatggactatatagcccaccaggctcctctgtccagggggattctccaggcaaagagtattggagtgggttgccatgccctcctccaggggatcttccccacccagggatccaacacaggtctcccacgttgcaggcagattctttaccagctgagccaccaaagaagcaagcatgtgacaggtctaaattggggattagcaaatacactcaattaagagtgaaagccagtttcacacagttttctctttctctcaaaatacaaaaataaaattaagagctaaaacaatcccaaacttgaaagtagcaagttacctgca

SEQ ID NO: 26604 - DNA, 2781 bp, Bovine  19866881262779
  misc_feature (1)..(1): n is a, c, g, or t
nctgaaactgatggattctgcaagcaagcgttgctctcctgtaatgcaacccaacacgtatggaggcatccaggtaggcccacctgagttatcctgtggaaactggggggtgtgagaaactgacacaagcgaagagaaagctcatgttggctgctgtgcccggagtaataaagtccttagtctttgaccccagtctcaggtctcctgccagcatccagacacaataacaggcttgcttattaacctgaaaactgagtaagatcccaacccttcctcaggtcaactcccaccacccagaatagtacccagcgaagaggggttgtatgatttgttaaatgagtcccttacttaatgaatatctgaatttgctttatcttactattaacctcacttataagcattaaattaattgacatatagttgtgaaatcatgaggcctattatttattcctgattaaaatatcatgctaaggagacatctctggtgttccagtagttaagaatccaccttctaatgcaagggacttgggtttgatccctggtcagagaattaagatcccacatactgtggggcaattaaacctgcatgccacaactactgagcccacgagccataactaagacccgacacagccaaataatttttttttaaatgatcattcaaggtgcttactacttaagttcaaataaaatggagttggtgaaattccctttaagaaatgcaggcagcccaagcaatttgaaggtatactgtttgcgtttgtgcatctccaaggaattataaccttctgagggcaagaactgtgtcttttcacccttggatccccaacacttagtatgtgcctggcacatttaaagggcataataataatgatgataagataataacaactatcatttgttgagtacctactgcatgccaggccatgtgctcaacacttcatatttaatcctcagaaccataacttaagtaatattattatatctatttgaaaaatgaggatccaccagggactgagcccatttctcctgcattggtgggtgaattctttactgctgagccaccaggaaaccctagaggggaaggatggagtggaaggtgggagggaggctcaagagggaggggacatatgtatacctatgatggattcacattgttttatggcagaaaccaacacaacattgtaaagcaattatcctccatttaaaagtaaataaatttaaactaaaaaaaaccaacaacaacaaaaaacaaaaacgaggctccagaggcacagagaggggaggaagcttgcccatagacatacatctagtaagtggtgcatgtgatgggttgaacactgatgcccaaagatctccacatcctaattcttggaccctgcaaatgttactaaagagactctgcaggagtgattaatttagagatctcaacacggaagattatgcaagtttgtctggatgcatcctgaatgccattacaagtgtccttgtaagaggaagactgaaggagatttcacagacaagggagaagaaagcaacgtgatcactgatgcagatgctgcacagctggctttgaaaatggaggaagggatcacaagccaaggagtgcagctgtcctctagaagatgaacgaggcaaggaatggattctcccttaaagctcctggagggagcacagctgtgccaacaccttaatttcagcccagtgatgctggtttcagactttcagcctccagaactatgagagaataaatttctgttgttttcagccaagaaaaataaagaaaaaagaaatgctgccaataattcccaatgatatgtcaattcatgggctaatcatttataacatatttgagagaaagcatcaaaatcttagttacattacatatcatatattttaattttgtgtttaatatttttaagtgcattttatgaaaatagtgaataccaattaataaggaaatgaaaaaagacctcttgctattaattttacccagaccagaaatccagatcaagaagcctaacaaaaataaacagcctaatttttcccttcccccttaagaaagtcactggtttcagatcctctgaagctattgacattaagacctcatagataatcctctcacttctatctagaattgatttatcaatacataaataaccactgattaatgatatctgccaacagaatcttttccaattatatactaaaaaataaaacaattgagacttcaattctgtgcagcaaggcgtatgtggtgtgccagtctctgctgtgtactttcacatacacagcgatgcataatttctgagcaacacctggcaggtacgaagtctctgtaactggctcattgtatttttctcaataggttgcaacccttttttgcatgtgggctccacacctttctaaacacttggtaatttatgggagaggcaactttcttttcctggtgagaggctgtcgaatttgttttagctgaaatggagaacttcctttatattttaaaccgcgtccaactgtaaactaccagcagggacacaagaaacactggaacaaaacttcagtgtgcaaaatgggtcatcagtgtttgttcaagtctttaaatatggcggtcgcctaatcttctctagatgtctaaaaataaattgaagctgaaaagtactttattatgaacagaataaaatggggccatgagagtaagctcattacacttttttttttaccaccactctttcatctttcttcaaacaattcactcacgtaggattccagagccttatg

SEQ ID NO: 26605 - DNA, 1656 bp, Bovine  19866881265031
  misc_feature (1)..(1): n is a, c, g, or t
ngatcttagaatccactctctcttgagtctcctgtattggcaggcaggttttttttttttttttttttaaccactagcaccacctgagaagcctctctggagataggatagtgaacaaaattgaagtccttctttcacagagcttaccttttaatttttaatagttgtaattgttgtaattgatttcacctatatttaaagttacgatttgagctttttcttcataataccaaacattttcaagaaaattacagtattttcacttttttctccatatgtccctaacaccctcaatatttggagactttggaagtactgatttctctcctggtttattaagcttttgcattgtactagttagggtaccaactaaacaattgaaataaaaaaattttttaagattgtggtttaaaaaatatcaacatctatatctctctcaaggtgcccaggactaaaagggtacctctgccatgagagattattcaagagtccagatttgttctattttgctgctccatctgccactgcgtatagtcatcacctgcataggttaactccactcacctttacagccacattccagcctgcgggaagggaaaaagagaggatgtggaggcccagcacttaaaaggtgtgaacaaaactctaagttgaccatgagacttcctctaacaatccattgattggaattgggtcacatggtccccactatcaatattagaaactggaaaatgtagtctttagttaagaagccaggtgtctgtggatatggctaagtttcctctgagcttctcagcttgggctgagcaatgttcctatttttgcaacccagtaattgctttttctaaaatttgctgtgaatgcaagagggacaaaaaaaatcgtagtaatacgtactccaaacaaaggaattaatcacaaaaaattgttctgatctgtgttgtgcttatttagagctaccttgtatttggctcagttgaggaatttgtatcattttcagaggaaataacatatccataaggtttaatcagctgtagactgcagcacagaacagagatgggagcctgtgatagccctacagcttgattttggtgatcttgcaggtaacgcgcaatgtcatgactgcagttctcagcttgcctcctggagatatctacaatctctctgtaactgcttgcacagagagaggaagtaacacctcccatgctccgtcttgtcaagctaggtaagaagagaacacaggtgtgtgtgtgcaagtaatcatgctggaggactagtgtttgtatctcttggtttagcatggtcttctcaactcaaagaaatggaaaaaattggctcagtgtcttttataaatgcaaaaaagactttacactatcaaaaaaagtacattcaacatatgtttctgtgaggacaatgtctactgtgttgggagaagggagttcattgttcataataagattagaagaaccacagagtcgggattttagagatggaaggaccttagctattatctagtgcgatattctcaaccctatcagatactgtttcccttttacataaataaagctgaacttcatacataaaataatccacatattatttttcaaatttgatgtagcatcctaactctaagataaaatcaagataaaaggacaa

SEQ ID NO: 26606 - DNA, 1763 bp, Bovine  19866881285946
  misc_feature (1)..(1): n is a, c, g, or t
natttgtgacaattctatgtgaaatgtgatgtttatttgcttcacaattaaaatgaaatgtgctaaaaaggtgttttgaagttcatgtagaataactgagaaacattttcatgaaaaaagtgatcttttaattagtcatatagtaattaagattgcatttgatacatgatttccatgttatgagctatggttacctgctaaaaaaatgagtgaatttaacactatcctgtgctactttacataacaaaaaaagaaatatatccttaaaatttggggagcaaagtgattgcaagcaatattggtaaaatatcaagtttgtttgataaggtatagagaccaagttgatgaacagtttagaaatttagactgtgaagttcaacatggtcttctagacacaaaggagttactgaagatgagatgaacacgtttgggaaatcttccaataaacaatcacagtgagaggttagagaaaacagaaaatctctggatgctggtctagttgatggagaagtatcaattcaggaaagagcataaaacaacaacaacaaaaaacctcatcgactaaataagagcacaaatatgagggaaggacagaaattaactccaagttgagctgagaaacttaggaaggtagttcatcaaaaccaaccaatgcagcagaaatgcagttttgggtgagaagaaagatgatgaggaagtgatgggtagcagatactcagcctatgtacatttatatcagatggccaagtaccattcactaaatcgatcagagtgtgattcaaacttgtaaactgcttcagttctgtgaaacataaactaagtcactgcatggcaaatactcattcaccattccacaaatgtttctcattgactactaggcattgttccagattctggaatgtaatagagaagaaggcagtctcttttcttatgaagctaactttctcaaatgggacacgagaaaatcaagaaatagctattttgttgggtggtaatgcacaatgatgaaaaataaagctgggggagtggacaggacagactagatagtgacaagcctgctcttctgtatcagggaatattttctgatgaggaggcatttaagcatgatttactcttttttacttggtaacagactacatagcagtgtacatacacatcagtgccaatcacctttgcagataagatcatctatatcatttttctagattccacatgtatgtattgatatacggtatttgtttctctctttctgacttacttcaccctgtatgatagtctctaggttcatatgtgcctctacaaatgacccaacttcattcctttttatggctgagtaatactccattgtatattgtgtaccacatgttctttatccgttcctctgttgatggacatcaggaaattaaaaaaaacaggggatatatgtatatgtatgtgtagacgtagagctgattcactttgctatacagtggaaactaacacaatattgtaaagtaactatactccaacaaaaaatttaaaaaagaaaaatataagcaattcacgttaaaaaaaaaaaccaaaagttttctttaacaggcttctgagttgcttaagatcatagcgttttctgtctctattgattaagaacaaataaccgttgtgaaagatggttttctctgaggggtgggagtgcagacatctttattatctcacatcaggtgtttctgaattgttttaattttgtttaaaggacttgatttgttctcccccaaacccttctc

SEQ ID NO: 26607 - DNA, 1534 bp, Bovine  19866881343290
  misc_feature (1)..(1): n is a, c, g, or t
nacccttaatgtggtctttcctttcattcttgttccctttgggatgatgtggagagtgtttcacccaagtggctgggaatcatctgctgttggtgactattatgagtgtcttttgtagaaggggctggcactttaaaaacagacagaccaagtgcacatcttgagacatccactatctctgtgactcgattattcgcaatgtctcagagctgcaatgtctcctgtacgaaacgggcttgccaaaatgtgtctatttcccagggcggtgccaaccaaatgtgatgatacatgtgacagcagcttgtaaactgtaaagggtgacacagatatgagttgttattatgagtggttcctctaatttccctgttctctacaagcagacctgaatgttagcagcacctgcgtgctgtcatcactcagctgttgatttcatttaaggaccttgtttataagtctgtggctggtgattgtatgtcagcttttctagcagtggtgatgggctatgcccaccaccggactggttcaaggtgctaaggctgaagctgttttgtcatacagcaaagggatcctgtggtttttaggagtctccctccttcaatttgtaaatcatgtaatattaataggaagcattttggaatcatgagctgttttttggtgatactgttactctgatagtcgataaaacactttcagaaaccaagagaattagattttggccagggtggaatgaatgctataaatcaagattacctaaaagggatatgaggaagtattaagctgagtccaagagataatgaggggagggacttccctggtagtccagtggctaagacttaaggggcccaggttcaatccctggcagggcaactagactccacataccgcaactaaaaatctggcatgatgcaactaaaaacatcacgggtgaagcaactaatacctgattgattaattaattaacaattaattaataaaaaagagagagacaatgaggggaaatatccaagaagcttgaaaaagttcaccagcttccaggagcagatttctaactgttatctaaaaagtcactctgatgggaacattttcactggcagattcacatcataagacagtggttttcttaattttgtatacagttcaatgcagggacttttggctgcattggattgaagtgttacaagaagaaaagaaagaggaaagagatgtagctgtcagttgtggacagtcagctgttgtcagatgtgtgctctgcaggtcacaggaaacattttcaagtacctcatctttcaggtctcggtggtggacagaaataaagcacagacggtgattcttaggaaagacttcatcttcccgatgttttacagctgaaaaatggagcaaacgagtgtctgagttcagacccttggcaacaagtgactgggagtcagtgcaacactgcggggacacagaactttgcctgccactgagcatattactggagaaatactgtacagaacccagcaggcttctgcaaacaacacatccctttaagtta

SEQ ID NO: 26608 - DNA, 997 bp, Bovine  19866881352415
  misc_feature (1)..(1): n is a, c, g, or t
natatttgcctgttgagaggtcaatgcaattgcacagtttcacaaaaaacaaatcattgacaaggggaagatacttggaatttaacagaggatgcttgcaagtagctcatgctgcctgtgtatagcagagacagttctctcatgatgtagaggttactataaagaagtaattattttgatttgaaaaatacatttgggagatgtcagtgcttatggtcccctagacagaaaccatggtcttagctcatcctctttgttgagggacaggggctgtgctctgaaagtgggtggacaggaagctttttcctaaggggtaaaaacagaaccagatttactttgcctacaccagtcttgtggtacatgattttgatgtcaataagcctcatatctcaatctcaaaaactctctatagtcctttcttcaatagtttaaaggagaaaaaaaattttcagacatgctgattctgtgtgcatttcttacattaaagtcattaaaatccctccttaaagctttccaggtacttaagcggatttaaaaggaaaatgcaggacagtttgaatttcaagaattacattatacttggttggcttagtccatgttttgttttgttttgttttttttccaaacttgaaatggcccccagttccacttggaaaataatagtaatgctggcaggcacagcagtctcccattttttcagactgtaggattcctcgttacacacggctaagataatgttctacatggatacactgagagctccacaaacgtcatggcatttatgcaatacatccttttattggtgaggaaagagaaatttcagggtgggatcaggacagcaagagattggtctttgaagtgctatgacattatttcaccaactgcacatctccatccaaagatatttcacactatagatgctaaatttcaccccacttttttttttaagttatctgctaaggtgcatttccttttattcctataacattcgcattaa

SEQ ID NO: 26609 - DNA, 1581 bp, Bovine  19866881388971
  misc_feature (1)..(1): n is a, c, g, or t
naaccttgagcccagtgatcattctgccttttatgaatcacactcagcattgcccagtgagcagaggattgatgcaggtacaagtctgccagttccaatgcccccagagggcaggaaatactttatctactcacctcaaactgaagagaaaatttatagtcagagtctttggccatgtccttgatgtacgcatcaaaatcatccagttgaaccgggctttgtcaaacacaaagaaaagtacattttaaaaatcctgctgataggtgtcacacaatgtttaacgccttacttctcaaacatgaacaatttccttgcagaaaacagacgttttacttctcacaggttagcactcatatttttttagggttaaaattaccaatccctatataattaaaaaagagagccctatgtgcttaacttccttgagataggaaaaatctctagattttccattgacttttactttagcagcaacatatttcacacacacatattcatatacacacaggtatatgtgttgtttctagaaaactccaatttatagggaaaaacaaaggattagcctgaagacctgtttgaattatagttttactttatttacttaactctcctgagatttaacatgctcatctatgaaatatcgtagggacacttacatcgcaaggttgacatttgtatatcatagacacttgtaaatttaaacggtttgacaaaggcagggaattttgtctccccagagaaaaggctggaagcacatctccagggagttcccagtgcctcgctcagagagggctgtgttcagagccttgcacatctctagaagtctcaaaactgttcgtaaataaaataaggtagcacatccgactttacatttctgcatatgccacagaagttcccgccttgtttttgttttgtggaataagaattcagttctattttctgtagttgtctctagctgcttatctcttctagggcttacctgtcccaatctgttcttggagcttctgcaggacacagcactctgtcacctaatccaagcctttccaccttaccagggtccacagagttagcctttctctcagtcttgctgcaacttactcagcttatgtcatccacctgtagtcttatttcttattagtaaatacatagcatataatagatatttgttcaaagttgttaattagctcctctgatttatttatgttaagattttagtagattttaagggtattatgcctcctagataatgcaaattgtaatggttttatttaataataataacactgactggtacccttaagtgtgtgtgtgtgtgtgtgtgtgtgtgtatgtgaaaatcgcaccagggaagctctgtacccttaaaacatactataaactgtaaatatgcttatgcgttatcttgcttggttgatggttgaggttagacatggagaacgttagcctcatgcttgggctttccttggtggctcagatggtaaagactctgtctgtagtgcaggagatgtgggtttgatccctcagtcgggaagatcccctggggaggaatggctacccactccggtattcttgcctggagaa

SEQ ID NO: 26610 - DNA, 1242 bp, Bovine  19866881417205
  misc_feature (1)..(1): n is a, c, g, or t
nctagcatcacctggaaggttgatgagattcaattcacttgacatgcttagagtagaatacattttgctatgctatgctatgctaagtcgcttcagttgtgtccgactctgtgtgaccccatagacggcagcccaccaggctcccccatccctgggattctccaggcaagagtactggagtagggtgccatcaccttctccaagagtacattttacctattattattattattattgtctcttgttattgtatgggtcaactcctaacacctgttatatcagtgatcatgagagtcaatacaattcagccactcctttttttactgaataatttccttttatcctacatgaaaaatctagtgttccatagatttgggggcaaatatgttgaaggattacaggataagaggaatgtgagggtcaattcttttaaaaacacatcattttaagtcactaacatttctccatactcttaaggcataaatgaaacttttggtggttgataaacaatggaaagtttttggattccaagaaggaacaaatagaaaaatgagccttgggcagtgatccttaaggcagttggagctactgtaatggaactgaccagtcaattatttccagcaactaatttcactggcttttccatttaattgactggtagcttgaccactgtacagaaacgctctggaatgcaggcattattgaacaaagcaaaacaaagtgacctattaaagtagattgcaatgaaaggaacagggctttgctgagagctggttttaaataagctgccccattttgaataacggaggccttcttttcaaatcttcattattcgaagctatttcgcaatttctagtgtaaatgtaatcctggcactcttctctgttgctcggaacaatctcctctccatttctaagcttctgcgtaacatagttgtcgctgctgtccagtggttaaagtcgtgtccaaatctgcaaccccatggactgcagcacaccaggcttccctgtccttcactatctcctggagtttgctcaagctcaggtcggttgaatcgatgatgccatccaatcgtctcatcctctgtcgccacctctcctgccctcaatcttttccagcatctctgtgttttttaatgaatcagttcctcacatcaggtagccaaagtattggaacttcagcttcagcatcagtcctgctaatgaatattcagggctgatttaggatttttggatttaggat

SEQ ID NO: 26611 - DNA, 2450 bp, Bovine  19866881448446
  misc_feature (1)..(1): n is a, c, g, or t
natgtacatttatgtcttgagtccctttgctgttccctaaaactatatataacgttgtttttgtttttacatagcattgttaattggctgtaccccaatacaaaataaagtttttttaaaatatacctattcttactcttataataagtttatagtaaattaattaacaaattaagaagttttatttgtcttgaacttaatccataccttcctttgcaatgtagataacgagacaaaggtttcctaaaaattaacacttagtcataacgttttcatagatatttggttaatgaattgaagtcattgcttgaatcagtgaaatcaacatataatttaaattaccacaattggaaattatcatcagtctcttttaattttatgacacatggtaacattgatcattatcctggccctttcatggtagaaatgttggtttacaaaacaatatccaatattttggatattggatttaatggacaaagaattcaaagatttgcattctagatttggctttgcactaactagctttgtgattttgcattatttatttttaccctggccatagtttgttcattttaatggtaaaatcgccaaagtttcttttagttctcatattctataaggtataataaaatacatactatctaaataacttgtccaaatggtttctggtagaaattggcttgccttagcattttacttctgtttttcttaggaaaagctagtggggtgatcatgttttttctttctttttgtagaaattatgatctacaacccaagaaatatgccaagtccaagtatgactttgtggcaagaaacaacagtgagctctcagttcaaaaggatgatatcttataggtaatagaattttacctttttatactcttaataaagtcaacttgttttccttttccagtgtatatctaaaccttcctcaaatgctgaggtcaagaaattattcttcggtatattttacctttccaagatacagcatattatagatacctgtgtctgtttaggaaggggtatctgatgtgtttgttttgtggggaacgtggttggatttcttgacttactttgccctcttccttcttctggactttattttttctggaattaaggctgattatcacttcagatgtagctgcaccataatttttgtttttgtttcaattggaatataattgctttacaatgttgtgttagtttctgctgtacaacaaagtgaatcagctatatgtgtgtgtgtgtgtgtgtatatctcctccctcttgagcctacctcctaccgccccatcccacccctctaggtcatcgtagagcaccaagctgagctcccagtgtactgtaatctgtacactgtatctgtaatccactggttgtctgtttcacacatggtagtgtgtatgtgtcaatgctgctctctcaatttgtcctaccctccccttcccacgctgtgtccacatgcccattctctacatctgcatctccattcctgccctgcaaataagttcattagtatcatccttctagattccatatttatgcattactatatgatattttttctctttctgacttatttcactgtttgacagactcttaagttcatctgcgtcattagaaatgacccagtttcattccttcttacggccaagtaatattccgttgtatatacatatcacatattctttatccattcatctctcagtggagatttaggttgcttctgtatcctggctattgttaatggtgctgcaatgaacactggggtgcatgtatctttttgaattatggttttctcagggtatattcccagtagtgagacaccatcttattttaataagagaaaacatttcctccttcctgttttagtacgcttgcacaaatatacccagcagtgagtgtgttaatggtttagggaataatccaccatgaccaaaatccctttctttagttataactgagacatcatcttttttaatatataatgtggccaggtcataatagttattgtaaaaagaagttttttaatatatttcctgtctgttctaacagtggaaacaatagacctttcccaagtgactcgtcttaaacacttctgataccacaaatagttaaacattcttgggaagcaatatggacctggggtggaatggtaccatacctgttctatattagtcattataattcttagtgtaattcctgagaatcatttaacccacgtatgttagggttgagtcagtgtattagaagtgaaaccatttgcttggtctaagaataaagattgaacttccttcatagattagtttggtacagaaatgacatctttattttcttgcatgatgacagatccttgatgataggaagcaatggtggaaagttcgaaatgcaagtggagactctggatttgtgccaaataacattttggatattgtgagacccccagaa

SEQ ID NO: 26612 - DNA, 1328 bp, Bovine  19866881451665
  misc_feature (1)..(1): n is a, c, g, or t
naaggaaattccattagtgaagggatattcaagtgtagagaccttaaaactgtcaatatttagccagaaaaagaattttttaaaggagtaaactgaatatctcagttatcttcgggggtccagtctctcaactgggcttattattaacagaagctgaatagttaatagacacctggatctttgatgttgctaagaaaatttgtcatcattcttgcaaaaactgaaagttttctggtctgaaatgtaatgcagagatttggagtttgttttttataattattattaaactcttactacatgccagaaatgcagtaaatagcatatgaagtatattcactcttcagtgaaattatagtgccttttagggaaagcactttttgaattcagagccctcacctttgagggattatagtttgctgctattcaaaagcaattcgtggctttttttagaagtctcatctcattaccttctctgtgtctgctctatatcaggtgtgtatttctatatgcagactgtatcaggtgtgtatctattacttcaagtcagaaacagagaccatacattttgatacatgctggatctcttaagaagcattggtacatctaaaaaattgcaaagtgtgattttcagattgatgactatggtcagtgtcttacccgtgtttaatctatagagagcaagaaactataaaccatgaagatttgtaaattctaaagcactttgtaagtgcacgctggcagttacttctaagacgtacaaaatagcaaagactgtcctgcaggccccactgtgactcagtattacagatgatctaggtgggcaacaagctgaatggccacttcacagggaaagaaagaccaagcatctttagttccttcctgctttttctcttacagaaatatatgaggaaacgtgggaatgtaaatagaggagaagattagggagtaaaattaattttaaaataaagtttttatttcattattgcaatgaaaatactagtatattgttgacatgtctcattttattatattatataaaagcattttaaaattaccttgttaaatctgctaaatatcatttaatgattaaaggaagtgtttggtttttaaagaaagtttccttttaaaaaaatatacatgttcttgatagttggggagtttgggatggacatgtacgcactgctatatttgaaacagataaccaacaataacctactgtatagctcattgaactcggctggatgctatgtggcagcctggataggaggggagtttgagggagaatggatacatggtacatttatgtcttgagtccctttgctgttcac

SEQ ID NO: 26613 - DNA, 1281 bp, Bovine  19866881460150
  misc_feature (1)..(1): n is a, c, g, or t
ntccctggtcgggaaaatctcacatgcctcggagcaactaagcccatgtgccataactactgagctcacgctatagagcctatgctctgcaacaagagaagccaccaaaatgagaagccctcaaagtgcaaccagagtagcccctgcttgctgcaactagaaaaagccttcatgcagcaattaagaccaagtgcagccaataaataaataaatacaaaaaaagaaagaaagaagggtttcagtaggaagaggtgagggcagcatgaatggcctgagcaaaagcacaaagtcatgagagtatcagacaaattttcacaatggtgagaaacaagttatttaggtgtcaggggagaagacagatcgaggtcagatcataagaggcatttcataaatttttaaggaattttcaaattactctgaagaaaatggaatcattgaagatattaaacacaagtgaaaagattagaattggcatttaggatgataactctaagagccaggtgctggttgatagaatgggagtgatactgaagatagctaggaagttaaaggctaaagtacgggcttcccaggtggcacgagatgtaaagaattcgtcttctaaggcaagagacagtcgtgggtttgatctctgggtcgggaggatcccctgaagaaggaaatggcaccccactccagtattcttgtctggaaaattccatggacaaaggagcctggtgggctacagtctgtggggtcacaaagagttggacatgactgagcaactgtacagaaaccgacctatttattaagtacagaaaaataaattatttctttggttttgcaatgacatacatattattattgtttaaaaatgttttttataatcatattattcaacaatattagacaaatgacacctaaagatttaaaaaaatgatttgcctctgggaattatgactgactgaatgtaaagaaagcaacagttggagactgttacttactgttaaaaaactttcaaaactattgattttctcacctaccatgcttccctgaatctaagattaacttagctatatgaggaaacattctttcataccactgagaaaggaaaaaaatgctgccaatctagcataatatgcaacccaatttcacacatacatacaatggactgaattgtgttccttcaaaattcatacatttgaagccataacctccaaagtcattacttgaagacagagcctttaaagaggcgattaaggttaaatgaggttgtaagagtgggacagtagcctaatatgg

SEQ ID NO: 26614 - DNA, 1719 bp, Bovine  19866881464342
  misc_feature (1)..(1): n is a, c, g, or t
nacaaattcagctgtggaggaattcagagatgcagctttgaatctattaacctctgaccccagtaccacatttgccttctagagctccatatagcattcataaagcacctgaattgaaaaaatatatatatttattttatacacatacacacatatataccctcaaagcccattatacccaataaaattgagggggaaacatttcatattcaaagtaacagaatattagcaagcaaaatcagtacagtataatgagtattaaaattctgaaaaattatttaagactgtctattaccaataacaccaagcccttaccctgcatcagggtggctacatctcatttcctgaacttcagttattgctacactaccaggattagggtaataataaacattagggttaagagaagcattttcaatgctaaaatgagagttgtataatccacaggttttctaaagtacttataaaagactaaaaaccagtcttgagtcagaaaaataagtcaaaccactcgagtttttggtgtttttatttttgaggggtgatacgcgccatgccagacagcatgcaagatcttagttccccaaccagggatggaacccacgccccctgcaggggaagcatggagtcctaaccactggacaaccaggcaagtccccaaaccatgaaagataaagatggaacaaaacctgtcttctcaattttagaaaacccaaacttaacttgcagcaccaaggattctatcacaagatgcatgggaaagaacaatgtttgttgctcccaagaggtacccacggttttttctagaaagggcggaatatttttacaaattcctaacagtcagtagttgtgagtatcagaaatgacctgagatgccacactgcccaccttaccctgcgtgtcgcacctaaaccatgagaaaatcatatcacccacacatccaacaacgtgcaagactaggacaaacagagaaagacgatgtggagtaacaatttatattcttttaactcagagactgaatcttggatggaatgacagttcttgaaaatagaaagctgtcctctaagaactagtgacaaggaaacctcttgagctaaatattcaagaatgataatctggagatgagttgtgatctaattaaggattttttagcttcctagtacaatgagcaatctcaagggtcaaacaaatgtggatttaaaactcaactccaacactttctgtgtgaccttaggcaagttatttctcccagcctcagttctagccttaaactatcaataataatatttattttgtaggttatttgaggattaaaagataagatatatacagatagataggtatacacacacacaaaactttgtgcatcacctggcttattgtaagcattcaaaaattttaatcattaagttcagaattctagtaaaatgaatttccactaagtgttgataaaagccaaatcttggttcatggcctgacccaactttttgtactacactgaaattttgttatatgcattaccgcttacattcagtgagccatcagataaggcatgaaaatattttgttacagcatttgtgaaagggaactttggcctgtataacaaaattcttaaaacattgatcctgagcatatttacaagcaaaatcaccagcctttttctaaaatatattatcctttaatattcactgaagttctttacccgacagttaaaattaa

SEQ ID NO: 26615 - DNA, 1268 bp, Bovine  19866881528521
  misc_feature (1)..(1): n is a, c, g, or t
nctgtgaatagtcccagactccttctttactatacctcccatcatccttttcctctcaagcattcttcttcccttgccctgcagggagttgcatgtggctcgccatgttcactgatccccagtaaatccatctttgctggagaaatagctggcagtctacttgcttgaggtcaataaacccaagctagaaacttctagctaaaccggcctcccccattttcctcaccacaccacatccaacgaccaacagtcaagtctcaccaagcccaccctctgaatccctctccatacacacacacactttcctctcaactctccatacacacaaacgctttcctctcaactctccatacacacacccactttcctctcaactgttctaaaccggttccactggtttagttcagacttcgtcagtcctcacgggaacatcagcagaagtcccctaagtttccctgcctcggtcacatgtcacacagctaagcaacagccacacagagattctaactacatctgcctatcactctggagcccaggtgaccttgtaagagtaaggggaggtgagggtgggagaggtaagtggagggaagctatttattgagataaggcaaaaaagaaaaaaaaaatcagtgagctgatattagcatacatgttaatcataggagcattttctgtcaattaggcagtactgcacacagatttttctatataattctgttgtatcagcaagtctatttggcaatgctttgaaacagagtttctagcgtaagtttatcctgtctttttttaagggagagaatatggaaaacataaatctgcaatgaaatcggttataaaatatcaaatctctgcttctcaagagtgacactaatcatggtctggaaggcaacctattacattttaaaacagcccttaaatcaatgatgtggaagcttcacgtctaagggctgcctggacagcttggcaacacttttcaacactaggagaaaatgcccctgatttgcagctacacacatgggtcctttctttgtgaagtcaaatgtgatccagatgaatatgaactgacttctacctgcttctcagtaaaaccaggatgaacttttatcagctaaggaaaggggcaatagagttaaaaagaaaatcatgagagacagcaaactgttcctccctttctaccctgatctagatcattgaacaggtaaaatttttattgaaaaattcttgtgtaagtgttctttcaggaagggacgtgttcacttttaagataa

SEQ ID NO: 26616 - DNA, 773 bp, Bovine  19866881652061
  misc_feature (1)..(1): n is a, c, g, or t
ntgatgtaagtaaatcagtacctttaactcacggtaggttaataagggcctgggtattctggaactcttaaaactaaccctacagagtctgagctaatgggccctaaagtctctacaaaagggatcaaatttggtacctaatatacattcccaaagaaaagtactaaggcatcaaaggtgttggttttaaaacacaaaagcactaaagaaagtatttaaagtgtcaagatgagtatttaaatataattgaggtcattttataatgacagttaaagtgattctacacatgagggagataggaaatcttcaatatccagtttgagcagctcttccttgctccttgctgtagggagaggcttttaagacatggtagctatttgcaggagaaggcaatggcaccccactccagtatttttgcctggaaaatcccatggatagaggagcctgataggctgcagtccatggggtcaagaagagttggacatgactgactgacttcactttcacttttcactttcatgcatcggagaaggaaatggcaacccactccagtgttcttgcctggagaatcccagggatgggggaggctggtgggctgccatctatggggtcacccagagtcagacacgactgaaacgacttagcagcagtagcagcagcagctatttgcacttgtgtcccttcatcaggaaaacaaggcaatcaaagcagggcaaagggaactcaggagcattgagtgtcattgaggagccccgagttttatgtgtgttgat

SEQ ID NO: 26617 - DNA, 1801 bp, Bovine  19866881720018
  misc_feature (1)..(1): n is a, c, g, or t
ngaaatatagcaaaacacttaaagcttgtgtataaatttgttttgtgtgacaattttctatcataaaaaacttcttaacaaagacattttagtaagtttatagaactagatttatgtttactttccaactgtttacatttttaaaggtccttaaataagtgaggatatatatatatatatatatatatatatcaaaatagaggagatggtgatttgtagcatgcttagttgctcagtcgtgtctgactctttgtgaccacataaactgtaacccaccaggctcctctgtccatggggattctccaggcaagaatactggagtgggttgttatgcctttctttaggggatcttcccaacccagggatcaaacccaggtctctggcattgtcggtggattctttaatcatctgagccatgacaggaaatagtagattgtacgttacttctgggcaaggatataatttcttctttcattgtaacttcttcagactccataaatgttgtctggactaactgacattgattctaccctaaatacattagaaattgaacttttccttgaacatataattagtgtgtttcttgagaccggcaggataaacagactgctaggcgtttatagcaatgctgtcatttcgtttttagagaagttgtacaaataggaagagatgacaagccacagtttcacactgcgtgaatctacgcaggtatcaattactatgatgcccctattagtggagatacaattgtgatttgatgtcacaaaacattaccctttcctgacagatgttatgagccaaactgcttttaagaaccagtcagcctgaaaatgacagaagtcctgtatcctcatcagattccacattgggaagcatttcatctttcatctgtcacactcagtcgatgtacatgacatcagttgcaaggcctacatttgtaacaacaaggtatccaggtgttctgttgacatcaaagctcagagagcgcaggctgttgtgttctgggaaaggaagccacagggagaggggaaccagtcactgtgtaggtcatttcagtctgatgtgagacatacaatagtgccaagaggctgctaagttcagtttgaaagtacggtcaatagaaagatgaacatgcgggtgtgcatgctatgttgcttcagtcatgtccgactctatgtgaccctatggactatagcctaccaggctcctctgtccatggtattttccaggcaagaatactggaaagtgaaagtgagagtgaaagttgctcagtcatgtctgacgctatgcaaccccatggactttccatggaattctgcaggctagaatactggagtgggtagcctttcccttctccagggaatcttcccaacccagggattgaacccgcgtctttaacatcttctgtgttggcaggcgagttctttaccactggtgccatctggaaagcccaactaagagatgacacttgcataaactgtctccgaaaatcagccatcagcagaatggttgctgagactaagaacaatctttgagggacttccctggtggtccagtggctaagcctctttgctccgaatgcagggtgcctgcgtttgatccttggttagcaaaccagatcccgcatgccacagctaggacctggtgcagtcatataaacaaataattttttttaaaaaagaacaacctttgaacacaaagtaccctaaaccacccatgactgtttcaaaaaccagtgtagagtgcattcatgagagtctaaaaaggcatctcttttggtagacaaatcagaaaaaggccg

SEQ ID NO: 26618 - DNA, 1488 bp, Bovine  19866881784064
  misc_feature (1)..(1): n is a, c, g, or t
ntctttacttgaaataatgaaaactacaagtagaatcttaggtgttgatgtaaggtgaataaaatattaatatttagctgaaatagtttctttgttttggcctaaagaatgagaatcatgacatcttaaaatttcagattggcagggtctgttggtgatctattataacccattcccaatgtttgtatgaattgtgcctcctcatgcttatcgaatacttaagcatgtttttggggaaaatgtcagttctattggtattggtgatgggtatttagcatgtgtgtatttattttacccatccattctttcaccttcctacccatctgtctatccatccattcatccatctatccatcctatgattaagttaagcactgccaaagttttaggtgtatctgaatcctaatattttcttttaataatcagataatctatactagaacatctcacatctgttcttctgccatatggttattatgtcatattgtagatttactgatgtctacttgattcagttaagttacttacttataacttttggtaatatcacatgctattttattcaaagattaaaaatctgtgatttcattgatatttaaattttttattgagtattttgctcagttcattttacattgatagaaaattcattttagattattgaaatatgtatttttttctgagttctggaacagaattttccttaggatgacagaaagaatatatataacaacaacatataatttaattattttttcactaaatttgatttttcaaatgacttaccagttctatgctgtttgggttcatgactgacaccgctgtactccacaagagtgcttttattaaaatttgcctctgataccagctgaaaggtgatattactatagcatattcctggcagccagtgattaaacactgtttttcccttaaaaaaatctgaggaataaaaacaattatattaaatttttggttttctaaatgccacagacttctagaaagttctgaacaattatgactatctgtcaaataatatttcctgtgacttctagtatagtcagtaataaaaatttgatttaaggcttgagatgaaaattgaaatttttagacacaaaggctttttctgcaagaattagatacaattgtaattaaaattttattataggaacatttgatgtattaagtggaaatggtaacatatagaaattgtagagattaggtttatgctaatcatttactgtaagaacccaaggtattttgccaatttatgacttaggaaaaaataattttacaagaaatgttttcactagactcacttgtaaaatatagcctattttttaaaagaaaatgatttgtcatttggcaaatgggaccttcctgaaaaaagaagaaaattttaaaaattgaattttatttagaaaatgttttttttggaagataataataaacttaaaaacccaatccaagtggaaaggaagagggaaagga

SEQ ID NO: 26619 - DNA, 1018 bp, Bovine  19866881902626
  misc_feature (1)..(1): n is a, c, g, or t
ngactaaaatcccacatgtattgagcccccaaaataaaaataaaacagaagcaatattgtataacacattcaataaagacagaaatagtacacatcaaaaaatatattctttttaaaaactgccaagagttaaggcagaagtggaaccagagagtgtaaccatgagaggggagctgatgactttgaaaaatataagaaaatgtcacagagattggcagctcctagcaaagacaagaaatattaggtgatctaaccaggtaacatgaaattcaaagttgaagattttatagagatgagggaggaataatgctctgaaaatgttaatagcataaagttccgttttctagtcctgccatacttctccacatgttcaaaacaaacccctcaccaaatgcaataaacacattttaactgtttaagaacaagtgaagtaaaagaaatttccaagaatgggtctccagtaccagctgcctgaggaaggtagttatggctctgtagtttgtagattccacataaactgtgatggggcatctctgcaaacacttacagtctccacctggagacacatttcaacttgctctttggcaacaagaccagctttcccgtacactgtatattttttcactatgtcttcacagtaaaatgatcttccctggtggctcaagcagtaaaaaatctgcctgcaatgctggtgactcaggttcgatccctggatctggaagatcccctggagaagggaatggctacctttccaagtattcttgcctggagaattccatggacagaggagcctgttgggctataaagtccatgaggtagcaaagagtcagacacgactgagcgactaaaacttttcacagtaaaattaggattttagaatagtggcagacttgttgattacatctatactacagtatgctaaaagaaatatcatggaacctaaaaaaatcaagtcgatggtcaccgaagtcaaaaaagatcagaacacgcaagtagatgcctgaaatcggagcatcgg

SEQ ID NO: 26620 - DNA, 1237 bp, Bovine  19866882227560
  misc_feature (1)..(1): n is a, c, g, or t
ntacgacaatgcctgtaccttcccatttgctaactattccgtcattcaatcctcttatacttgactgcttcacacatttatattacctggctgacatttgagtttaggcccctttactaagaggccaaagaaatgagggctctgtcttatgaagtcacaaagacagaaatggctgtatctgagcatgttaaaacatgaaaggcagaattggtatgaatgtggactcaggcacctggttagaactgatgtattccaaccgaaaagatacatttaagtgttagtcgctcagtcgtgcccaactctttgcgatcccatgaactgcagcccaccaggctcctctgtccatgggattttccaggcaaggatactggagtaggttgccatttccttctccagtggatcttcccaacccagggattgaatccgggtctcctgcactgcaggcagattcttttaggacccacataaagaagtctggcagtacagagcagattgtaaacatattcacccagaaagccacttagagaatgagcttatggttgccagggggaagggatagttagggagtttgggatcgacatgtacacactgctgatttaaaatggatagccaacaaggaactagtacagggaactctgctcagtgttaagtggcagcctggataggaggggagtatcaggagaatggatacatgtgtatgtgtggctgagttgctctgctgtgcacctgaaactatcgtaacattgttaattggctacaacacaatacaaaataaaaagcttaaagaaaagaacctgctgtatgagctttctactagcacataataaaaactgtataaattaatgttctttattacaatagggtcatcattgttgccattgtcattgctatgattattggtcagacacaattctaggaaggacagagtcacataaggcctgtctttctctttactcacaaattgaatatatccccaatgtcttgcacaattcctgatatatactggttgctcaaaacatttctgaagaataatcagaataaataatggaagattagggagaggccatccttagcctttgagaccaacatccaaattctcctctgacaatttctgaaagacatttgtcaatcattctaggaagttgtcagggcagctctaggactgtgatcttcctgaaggaaatgaaaggaaagactgtgtgtgctcagtcatgtctgactctctgtgaatctatgg

SEQ ID NO: 26621 - DNA, 1770 bp, Bovine  19866880275744
  misc_feature (1)..(1): n is a, c, g, or t
ncagatggtgattgcagcctgaaattaaaagacacttactccttggaaggaaagttatgaccaacctagacagcatattcaaaagcagagacattattttgccaacaaaggtccgtctagtcaaggctatggttttttcagtggtcatgtatggatgtgagagttggactgtgaagaaggctgagcgtcgaagaattgatgcttttgaactgtggtgttggagaagactcttgagagtctcttggactgcaaggaggtccaaccagtccatcctaaaggagatcagtcctgggtgttctttggaaggaatggtgctaaagctgaaactccagaactttggccaccacatgcgaagagttgactcattagaaaagactctgatgctgggagggattgggggcaggagaaaaaggggatgaaagaggatgagatggctggatggcatcaccaactcgatggacatgagtttgagtaaactccaggaattggtgatggacagagaggcctggcatgctgcaattcatggggtcgcaaagagtcagacaggactgagtgactgaattgaactgaactgaataattagtgatgttgagcatcttttcatgtgtctgttggccatcagtatatattctttggagaatatatttaagtgttctgcccattttttgttggatttttttttcaatactaagttacatgagttatttgtatattttgaatattaacctcttattggttgcatcatttgcgaatagtttcttccattctgtaggtttttttttgttaatgttttcttttttctctatgcatgtgttgcttttatcctttttttaattaagtcatacctctctaattaacttcatagcaccttccttgccagacttagcaattctctttatcctctaacatccggcttcagatccttccctggcagaatttcctgaacacccacccatgatacaacactgctgcgcttgccattgatagagtccaggaggaagcatcctgaactccatcaggccaggaattttatcttgttcaccctggtgtatacccagactctggaacactggttggtgcccatctttatccgtcaatgtttccaaatattcgtctaaaaagcaaggttcacaatatgaagataaatgagaactcagattcaggtagaatgtttgttctatgcctctgttctcaagagctaaaggaagtccctaaaagtaagagggcaaattgaggagccttggtttgggcagcaaatcatgtttttctttgtacttattttcttagacacgtcagaaggaacccacgcctttgctttaagttttcttttcactcccctgcatctatctgtctgcccctaccagcagacttttgagctccctgcaagattcagtctgtggttgtctgttcttcccgattcagtcacttctccttggtcctttccttcacccccaaatctgcctcatcactttctcattgaatatgccaaaatttccatgtcccacagtgactgcccttctgaacattgggccagttttctaactggagcccagtctgttctcctgaatgttcttctgtcaatacacccatgacattaaaacaagatttagccttttccctgaagctacccaccccccatgactctcctgctttttggatggcaccaacattctaaatcgctcagccttgaagatgtagaatcaactttgtcatcttctctttctacacctcccacatttaatcagtaacagcagcccttttaattaatat

SEQ ID NO: 26622 - DNA, 1317 bp, Bovine  19866880380965
  misc_feature (1)..(1): n is a, c, g, or t
naccaagcttcccgtccttcactttcctggagcttgctcaaactcatgttcattgagtcagtgatgccacccaactatctcatcctctgtcgcctgcctcctgcctcagtcttttccagcatcagggtcttttccaatgaatcagctctttgcatctggtggccaaagtactggagcttcagcttcagtagcaatcttccaatgaatattcaggactgatttcctttaggattgactggtttgatcttgctgtccaagggactcttaagagtcttctccagcaccacactttgaaagcatcagttcttcagtgctcagccttctttatgagccaactctcacatttgtacctgacttctggaaaaaccacagctttgactatccagatctttgttggcaaagtgatatctatgctttttttattcccactcagtataatacatgttaatatccattcttatttttataatctaaaaagtccgaggaataaggtaaggttactccagggcagccttatttctgatctatattgttgatcaacttggtgtagagggtgagaagcattaagtatagtcacacatgaagaatcacagctcaagatctcatgatggcttctgctaaggtaagttatttcacctgggtccttagaaagaaaactctgaggattgttttctatttcctaatgagggcttctcctcagggaggaagagacaaggatactcccaaggcattgagcccacattcctagttccccaggcttcaactcatccctttggagccagggtcagggccatcagctacatcagctccatgctgatgctggttgcccgcatccctccgacaggatgctctgccctcccctgctcacacaaaagaactttagtctcccaaagaagaaattcacaaggatttatgactcaatcaactcacccaaaaggagcataaatgggattagttttaatattgttaagttgcaaaaaaacaggcatatgtgcgtgccaaagcgaaaatgtacgcaagcaaaggaggaaaacatatgggagcccatatggcgaaaagcacatggctagaccttcacacacttctcatttacaacaagaaccaaagttagtgaacatgaatttgctttgcaaaaatatgagaggaacagcttgtttgcccataactgttccactgagcaagataggggtaaccttgatttctcaactcagacacctctttctcacactccggggattaattaggctcttcacacaacttcagattagaaacaagaatcctggctgcctcgcagagagacagagaagtgggcgcagg

SEQ ID NO: 26623 - DNA, 3693 bp, Bovine  19866880420784
  misc_feature (1)..(1): n is a, c, g, or t
ncttgctggagctactcatgccagttctgaaggtccttgcttgatacactcaagtaaggattgtacacactgctaacccgaatgaaaagggaatactttaaaatattataagccaaggaaatttgcacttctgaaaagataagggagttatgttgaaagacgttctggacagaactggcatcctctactctagtcatttcaggggaccagtgaggatggcctgaattaaggtaatttgctgtgatgatggggaaggtagtacagacttgaatgcttttttcaccagtaaagacccatgggattcagtgactcatatggagagtaaggaaactgaagaaggatgggagaagtccttgattgtggaatagtgtagcataacggtttagcactgagagctgatttggctatgttaaaatcggactgaccatgacatgtgtcttaacctctctgtgtctcaatttttcacctgaaatcagaggtggtaataatagaaatgttatttcacatgcacttccagaaagttattggaaaatctgatactcttccttaaatcttcttaaaggcccatgaatacccgtttaagagcttttagaatatattataaaagggagactgattgggtttggagagaaaggtgattcattcagtatggaacttcacattcactttgtgtcatgtattcacatctaataaaattatttcctaacctgtgaagatgaaagagaataagaatatccttaaggaggatgaaattatccagtagatgttggagatgattagcaagggcatttgggaggcagagagaagttgacagtcatgttaagtcaaacatggcttttaaagaagctactaaacagtgatggattattattaaaggcagagattagccaaaaagtgaagcaggcaacttcaaaggaacaataaaaatggacgaaaatgtgtttaaatctttaaagtaagaggacaaatgatagaaattttatataactgaacagcttcccctaaacaagtagttctgatctgccctggattccaggaatgcaagctctaggtttcccaggccagaggaggaaaaacaaaaaacaaatcttctcataattttccaaaagtgtgtcctgagcagctggacacaaacaaaaggacctgagttcctaatttcttgtaaatctgacacctttatcatcaccaaagtacgagttcacagcaccaccttcatcccctgttctcctttgttgttcagtcgcagtcttgtctgactcttcaagaccccatggactgtagcatgccggccttccctgtccttgatgtctcccggagtttgcttaaactcatgtccattgagtcggtgatgccatccaaccatctcatcctctgtcacccccttctcctgccctcaatctttcccagaatcagggtcttttccaatgagtcagctctttggatcaggtggccaaagtattggagtttcagcgtgagcatcagtccttccagtgcacattcagggctggtttccttttgagttgactactgaattgaatatgggtaaagttctgttatcagatgtctctccgccgttttctgctgctaccagtactgggaaaacatgggcacctttcctggaaagagtttcagaaaaaaagaagaaggagagggagaagggagaaagaagaaggagtgggagaggaaagaaatgatacatttggtcctccactgtatggatatggtttatcatctgatgctataaattaagactacttattttatttgagaatctcagaataagttactcaaaatgaggtaaactcttcctctaaggacaccagtaatttcttagcatcaactcccagggcatcttttcagtattctttcggctgaaattgatgtctttgccaccgctcttttttgatctttttttctcatttttcatgaaacaactctctcctgacattcacctagctttgacccactccatctaagtcccctttgtttaataacctaaatccttctcataaatcaaaaatggggactctcctctgggtttcaactttgagcttcttcccttcgtgtttccccaggtgatgctatcaaccatggcatgagctggagatcctgatgtgggcagacatcagagtgtgcccacctctaaattcccacatgattacaagctgtctagtgaacatcttaacctgtatgtcctgaagacatcttgaactcaacatatttcaaactcttcttattatcttctgtatctagctgggttcttggtctcagtcaacagaaattgactcagtttgacttaacagaagagaaattgattgcaactatgttgtacagctcaggaaattgacagagggctgattaaaaaatgggaaagatgtcaatatgcaggaaaaaaatcacaatacaagaagagtcttgccagggccttgtggccaccatggccaacatagggactgttcttggcactactgtgatccttatgacacctttgagcaccaggcatcccaacaggaatgactcccacactgtccctgcctcttttcatcactcaatatagaggcagagttcttgagaagagcacctagcaagcagaggccaggcaatgtgcccattatccagctactggagtggaagagcacagctctttggtcttaccagatgtcagactagactcacactgtctagggtttctgatatttaggaaaaagcttcagagtccaagtaatagcttgaaagagtgggaaatgcacactgcatgttccgtaagataaatcaacccctctggtatttctcatctcaacaaatgacaccaacatgcatttggtcaacaaagctcagaatcatctgcaactcttttgtaaaaaaataaaaaagaaaaaaagtctcatcatttatttactggctacaccatgaagcatgtgggatcttagttccccaaccaggcatttaacttgtgcttccttctgtggaaacacagagtcctaaccactggaccaccagggaagacccaagtatgtctttctctttatggtatgcagctactttgttggtgttgtttgtttaagtcattaagccttaaaattttattgacaaaatagtccttaaatcattccactctactttttctatttagatcaacctatgccatttctagaggactttaaatgctttcaaccaatgatggggtgaacggtataaaggctgtggatgccgtgtgtacaaatcatacttctgtcagtcactagctgggtgaccttaagcactttccctcaccttgttctgtgttgtgtattgaataatgttaataatagtacttgtcgcctaggattgctgcagtgactggttgaggccgtcttgttaaagcgctgtgaatgcttacaaacaatagtcatgccctacaggtcaggtaaggctgaaagtgaagagtggtggtggtgagttgatgatgatgataataatggtggcagtaatggtagtaacttcctctgactagtactctctccagtatgcagtctttattgctatcagcattatctttccaaagtaagaatttgattttgctattgtcctgcttggaatcctttggtggctcccatttcctacgagataaactccaaacgctttagtgagatttagagattcctgcaaaaggggaccctgaattatttttctacgggaccctgaattattttt

SEQ ID NO: 26624 - DNA, 773 bp, Bovine  19866880425810
  misc_feature (1)..(1): n is a, c, g, or t
nctctttgcaatcccatgaactatggcctgccaggctcctttttccatggaattcttcaggcaagaacactagaatgggttgccattcccttcttcagggtatctcctaacccagggatcgaacctgtgtctcctgcattgcaggcagattcttctgagccaccttcccaggctctccgacattgcctttatataggaggaaatagaagctgaagtcaaggtgagatgtttctctcaagtgtaaggtgatccctctagttcctcctcattgactatagcccctgtgtttctgtccctgggttattctgcccactcccctttgaagacaacaaataaatatttcaacaaaattttaattttccttctacctgtttcgtctccacagtatctcccaaaattgtggagatttcttcagatatctccattaacgaaggcaacaacatcagcctcacctgcatagcaacgggtagaccagagcccacggttacctggagacacatctcccccaaaggtaagagaagcggcttgggacatcatgtcatgcgaggaagtgggagaatcgttggctgtggcagggaggttatggtgctggtggcctggtcacaaggatcccacattcttggtggcctgataacaatatacccgtagctccgcagaggaatatcggtgttctcaatgcaagatgggcataacctctaagattccagaaatcacgctgggaggattgatgcaaccccctgggagagtaatctaccttgtttctgggtgaaagg

SEQ ID NO: 26625 - DNA, 3329 bp, Bovine  19866880490014
  misc_feature (1)..(1): n is a, c, g, or t
ngagaacacatatgtgcttggcactcagaatagccctggcacaaaataggtgctcaagtgatgtttcttaaagaatgaacactgactttagaaagatttagtcgtggagcatgattatttagattgtagtggaagggtctgaacatatgagaaaaaatttcccatacagtaaaggatgtaagatcactgtagattacatcgtacctgaccacacatgttcaggctttgctgaatttgcatgacagttttagaagaacatacatgtggaaggattaaaaagtgctgctctgttcttgaagactaaaccattgcatggaaatctacatgaatggggtgactaaggcagggttcccctgggacacacctggcatattgggatgagcagtcattaactgatcgattccacacatatctctttggccagtggcaggaactgtggtagacaaatatggcaggaatccagttgccaagagcttagcatctactggtgggaaaacaagtaagcattcaaattacagcgtggtgtcatgatgatgaacactattgtgctgatacatacatagggtgatgggaatagagagtgaaatacagtgattagaatttgtccctagtagtcttgtgcctggactgggtttcacatatggggaaatttgagaaaaagaagaaggagtcatttgaaacaaatggatccctacttgtgataacaaaggttcagtaaaaggcaacacaacccctgtagggagaggacagagttgagtgaaagagaagcaaagagaaatattaaacagctttggacaggggccgccctgggaggcagctagacttctcttgtgtgaatgcagggaaggggagtgaatcacagaagcagaatcacatttaagttttaggaacatcctcgcaaaatacatatcacacgtaagaaagaggggagcccaggccattctggaacttctgcaattaatccagacaacaaatgccgagtctagatcaggagctgatgtgacttctgtaaagggttagataggaaacagttcaggatttgcaggactctgcctccagcatgacgactcaactctgctgttgcagctggaaagacccacgctttttttttttttttcaattgagcaaagctttgttcttataaaactgtgtgtttcaggaacacacaataagccagatttggtctgtgggctgtagtttgcaacccaagggtctggatcaaggaaatgatctgttctgggtcaatgtcctataaactactggttgaccaaaaaggttgcttggatttttccataagatggtacggaaaaacccaaactttttggccaacccaatacattactcaccagtgggtgggcctagctagttgattaatcactacccccattaagagacttaagaaaggtgtgatgagtggaaatgctttttttttttttttttaacttcacaatagttttggaaagaatctaaaagacacatgcctgcggaggcaacaaacttatgccctcttccacacttctggctcttgacccagtggtgaaggatcaaggcggggggcagctcctcaaagaccactgctgagaagccaccagggagatcttggtaaacagacttgagaatcattgcttagtatgacttccttttagccaccagtacctcacactcatgctaaattcatctgtcatcttttgtcctgataaagttagcacttgaatttctacaaataggatagaccaccactcaccatgtgttgaggccaccttggttacctggaactgacaaagcaaactccttttgacaacagcttaaggaaatatagtcaggaaggaaaacagattaaagcatcatatttcaaacttacacaacctctaaatacatgtggacgatgatggaggacgaggtcattgccctgactgttctcctgtctgtagacctttgagggattagcttgcagtgaccaagggctctctggcccctggggtgggggtctccaggaagtggataatactgatgctccctgcactctctcacttggacagagccctcttgaaacttctccgtgtatcctattccatacagttgctctgggtgccattcatagacacactgaaagccctctacttgacctccctcccctcttcctctctgccttactattttttctaaacctagtaatgatttgggttcacactgcctttcctcgctcaacctttcttgtcaggaagaccttccctagactggctgagattcaacatggcggactggagggcaccaagccattggctcaatatggacacttaactttgatcccttctatttcatgcttcagaatgctgagagcaatagctccatcactctcactccttcacagtgtcacagaaattaaaagttaattaacgaaaagggcagaacacatttccattaagcatcataacacttaagggcaaatccatttatagaatcctctagagctactgttgatcagggttttcttctcagggtttcagtgaacttccttgaaacagtgcctaagatgctgtggtttacagccaaggatttcactgtatcaacgggctgagatgataccacccaaaaccagttgcaagacaaaccccacactcaggactgttctcctaagtccttctcattgtggctttaaatcattaacgttaaaattcttcctgaagtctattggtcaactctaccagcagtaggtaacttaagtcagaagaggttgggaaaaaaattctttcagttggctagtatgaagtacttttgacctccttctcataaatacctgcttgctcatagccattaagaggaaagaataattttttaaaaacctctcaaataataaagaattaaagcaagattaagaggtggctttctgattctaccaccataccattcacattggacaaaaagtaaatgatagaatcttaggattatatctgccttcatttggctgctgctgctaagtcgcttcagttgtgtccgactctgtgcgaccccatagacggcagcccactaggctcccccgtccctgggattctccaggcaagaacactggagtgggttgccatttccttctccaatgcatgaaagtgaaaagtgaaagtgaagtcattcagtcatgcccgactcttagtgaccccatggactgcagcctttcaggctcctccgtccatgggatattccaggcaagagtactggagtgggttgccattgccttagcattggtcgagttcaatagcttagcatcttctcctaacctgctaaaggggcatgagtcactgggccatagctgatggttgagaagttgctattgg

SEQ ID NO: 26626 - DNA, 1386 bp, Bovine  19866880500382
  misc_feature (1)..(1): n is a, c, g, or t
ntcatcccactaccccaccaacatggatatgtcttctatactccagtctaatgtgagttactcagccaagaattctgaattatcccattactagttttcatttattttgtcacatgcatgagaagtaataaagttgctctggaaaattaataatcagtaaatacagaataaagaagcaaacagtatcctagattaagactgtgtctctatttttaaaaagtttttgaacagatgcccaaagcaactgggaattgactagaggtttttagctggttaggataagtatattggttcacaaccattaaggcagagagcctaatcgtcccagtattttaccccatggcccactggggcctcactgctttcaacaacaagattttcattagctctaagcattttgttagtctgcttggttcattgctcaggtgtggaaccactgaactcaattacagcttcttgcatagagttttgaagtacagcattactaagaagttgcttgttaggaaaaattcaaatgtcttctgaaatattctgtgttttatctgacttgctgcaaggtattatccttatgtttagcaacagaatgatagtaaggataataatataagtcatcctatcctgtccctgcagagaaggcaatgacaccccactccagtactcttgcctggagaataccatggacggaggagcctggtaggctgcagtccatggggtcgcgaagagtcggacacgactgagtgacttcattttcacttttcactttcctgcatcggagaaggaaatggcaacccaccccagtgttcttgcctggagaatcccagggacgggggaatctggtgggattctgtctctggagtcgcacagagtcagacatgactgaagcgacttagcagcagcagcagcagcatcctgtccctcactccactgtgtggcaacatgagtgcacagtaatgcattaacattctggtacttgccaggtggaatcgctaaagctacgaaattgagtcatacggtggccactggattggaatttacttctccaaggccaatggaatcagaatgaaagggagtttctctccatggttctgaaagaaattagtctcccacaggattcgatactgaacaagttcaaaggaatctcttaagttgaattgtgcatttattgtaatgtctctaataaatcaattacttcttggcagcaaaatgtcacagcatttcaaattctgataatcatctccacttttctgagccttaggctgttataacccacacaatctagcgaggaatgcatcaaggagaaggctaagcaacaaggaaacaatagactttagactcatatacttgactaggattcagaaagcctaaatccttcctcactcccagaat

SEQ ID NO: 26627 - DNA, 2193 bp, Bovine  19866880532944
  misc_feature (1)..(1): n is a, c, g, or t
ncttgacagtcatgcttcccaatgcagggtgcccagctgacaacatgcagcaggcgcctaaccctggtggcttccatcgcccaggccagcccttcctcttctctcccgcccagaagacaagaacaaaaaggaggaaattaaaattccttcctctgaaaaggttaagtccttacaaaaggactcaagttcggtcaattgccataaaggatagatattcaaaggtgcttcctcagcacctccctcactcccatgattttctaattaatgtaggtgcttgattaaaattcccagagtaccccaagtagccatcccaggagggaacacataattgctattgcaaaagatattacagcgctcattgatggtgggagaaaaaaaataattgcatcataatggaaagtggtggatgtcctgtcccggggagcaggggtgcatacggtattaggtccaacctgtacagagaaagcagttcattatgatggagataaaccagtggtccatcctcaggtatggggcggagcgatccacaaactcgttaagtaaatggtttaaacacagatcaaggtggcaaagaaggaagtggagacagacatttatagatcactcttttaactctgtaattttctttaactgtaacattatggctacacagatacatttagggtaaaatttgccaatgtcaataagggttttgtaagtttaatatttatgatctggtttaaagcaatattagagccgtgcagcttcctacttcaaagaagagggaaatcataaaaagactagtggggaaattaatgagttcaatgtgcctcaattgagaacatatgaaatcaagcctccgtctagaaaccgagggcaggagtgcacaccacagacgctgtttgtggttttacccaattattttaaaacccttgaaaaatgtagactgagacgtccgctgaatgcaggcactgctaacagcatcctcccccacgctttcccgagtcttgggctatttatgcgggtacttggtgactgttaccatgcagaactgttttgatgaaacgaaaaaggaaacagagaagcagagagattgtattgtcttccccacagatgctagccgccctggctgggttattacaaaggccggttaaaacagcagcccctctaggccaggagaccccatctctgaggaccatacctgacaggcagctctttggggggtacagaagggcctctgcagggcatcgcctcccactacagccatgaaacctcctctccgaggaatcccgtagaccagatgagggcttcacgaatcccatagaccagatgagggcttcacgaatcccatagccaggactcaccaggagctgccaggagagcttggatacagtttgcaatcagattgtcctggccatgaggactttgctgtgttgctttgactttacagctgcttttccatcttgcatcttatcttgacctgtgatgactgctttttccctagagtctgaatggaagggtctctattatccaaccacaataactaagactctgaggatattaaaaaatatgctatccactcttctaaacatgcagcagagtcgtatgaactcttctcaacaacagtgtgagcaggtcctgtgatgagctgctttactgatgagggggccaaggcttggagcatagacaagtgggccaggaaacagggctccaagtggcagagctgaaaccccacccacggccgcagtgtctccagaaggcacgtgcttaaccactgtgctggacagcgccaccctccaagggtggtccctgggccagcagcacaggcgtcacctgcgtcgtaccccagacctcagatgggactcagaaatctgcattttggtaaatccccagggaattgtgatgcaaacttgagagccaccgctgggtgctgtttgctgtgtgccgggcactctgctttacataccttaatatcacttaactcctacagacgcccttacaagcaggcatcatttccattttggcgatgaagaactagagagctgataggaaaactggcccacagatattaaaaaggtgaagttcaactccaaaccttttgacttcaggattcatattctttttaaaaaatctttttaatttgtataatgttgtatttggttttctgctgtacagcaacatgaatcagccacaatataccttatatcccctcca

SEQ ID NO: 26628 - DNA, 867 bp, Bovine  19866880539639
  misc_feature (1)..(1): n is a, c, g, or t
ncataaatcagtctacatgtgcgtactgggccagccacacagcagtctgcacggtgaagacctaggaagacgcttcaaagcctcatcgtctactttgctccaaggacaggaataagaaacctgggaacatctgagcactgcagctgggctcacaatgcggcgacacaaagtgtgaaagttaagtccaaataccaattgataaatctcgactttgtgctctgaagcttgacaggaagactctagctggtgatgccggtgccggagaggaaacgggcccacagcactggcttatcgaagactgttttaatgttttatttgagtaatgggccttgcaaattagcacccctgcggcccgaaatacatatcttttcaaggacacaccggttttcaattcgacaggtgatacggaaaaaatccccaaggggagctttgatttctgtacttttcagacacagttatattttattccagctcggatgatgtggaggatggcggagggctctgagggtgagctgagggcttgcagaggaaatggagcagaaaacagctctcagagcaagatgagggtggtggttcctgggacagcgagtggggagggaggccgctcccatcctagggaggaagggggccagtatccctgcccctggggagggaggggcggacagccagcagacaccatgtcctcaggggggacttttactcccactgcccctctctcatttcctcctcttgctctagtcttcttaatcacaaaacagttaagacgtgagtctagctcaacaactagtttaacttatgcacccacccactgatggagtcaacacatactcactctgaatctattatgtgcaaacaccatgttgaaag

SEQ ID NO: 26629 - DNA, 1187 bp, Bovine  19866880579102
  misc_feature (1)..(1): n is a, c, g, or t
ntatatattctgcactaaatcatcctcgagtacctgagctggacactttcattacccactttatttgcaaagccgcagcctcccacatcccaagacccaaagtggcagagcccctctggcatgctgtgggcaaagtgcaggttcttagtcccctagttcagaacagccacatcagataaacgtgaagtcctgttacccagaaatatccatctaaggacaaaagacgatttgactatcgtgaattctgctccatgttcctcctcctgcctgacagtcacctccctctccagagtaacaatcatctgaacacaaacagacgtgaggcttttcaaaaagtaatgaactcacaggcgtaggagccaaggcgagcatggtttaaatgcggggctccagcaacccagacaggccatcaattatatacccctgccgtcgaggaaacaaaaataatatttcaaagagtcactgtcagaaagagaaaggagaaaatgccatagagatcacaccattctgagcaagcagtttcaaacgcagaaatgagtggataaatcctgccaaggcggccccttccaccaagaggggaaaagagggacacagcgaccaccatcctgctcagccttcatccaacacacctgagttcacgaggtcactttttcagcattgttttccgttaccacttagtgggtgtagaaaagcacattcttcatttgccaacccatctccaaacatttttgagagctcaatgtaatatataagtacaggattgactactttgcattatcagttcacatccatgatgcaattttattctatttgacttagggaatggaccactattacctctatttaacagatcacaagatcaaagcctggagaagttcaatgacttattcaaggtcagccatctgttcagtgcccagctgagggtttagaaagcaggaggccataaataaacatttttttggcaataaagcatgatgagactaaaccgttaagtatctgaaccaaggagttggtagtctagtagccagtggaagcctctatctcacatctctctctgttcaaggcaatctattaagagctgctgctgctgctgctgctaagttgcttcagtcgtgtctgactctgtgctaccccatagacagcaacccaccaagctcccctgtccctggggattctccaggcaagaa

SEQ ID NO: 26630 - DNA, 3812 bp, Bovine  19866880579321
  misc_feature (1)..(1): n is a, c, g, or t
ntgtgcctgtgagcttacagcaacatctcttacagcttcagtttccttgtctgcaaagttgtgtctataattgtcacggcactgctgcgacgtggatgagggcagacactatgggaagaacaggcaagctaccagcttggatgctctgaacagggaggtggccatgcagtgagtctctttctttcactttcagctctgtcttgtcccttctacaaccaccacccccaactaccccacatgatggtcccaacatgtcgggggggaccatcccctaccccacagaacaggaagaatggctctacttagatatcatattctcagagctgtccttagggtcacaggaagtaacacatgaagagcgccaggcaaagcatccagcccctgagtgttaaataatgccactttctcccctctttctcctctgcttccatgtggtcctaggcggatgagcaaactgacttcaaaagcacagaggagttccctggcttccctgatgcctggaccccacagggtgggagatgctttctgggttggctgaggaggaagtcaagctgggcgctacccatggagcctgcttcctttttcactcttggcctcattccctgcaaggcgagcttgcaaggacggttgctctggttacaagaccaaatcactgctgtttctgtctcttcctccgtgaaggtctcgggggaatcagcttattagagaagcagtggctgagtgatggagtcggctaggacagtaaagggactccttggaggtcctcagatacaaagcccccggttcttctcttgatgaagccagagcctccatctcagggctgcctggacaaccctatctgcgactgctcccgtctgctgtcttccacttcatacagcggtgctctggtatcagagtcagtctgcggtttgaatgtgcccgctttgatgtcaatccttactgtagaggcagaagctccattgtccctgcccaactcttccctgcactctctctggtcatgggcagtttcatcgctcttcaatctgcccctctctttctcaaagttcttaccttaagaagctggaaattgctgaggaatagagtaagacgtgacggggatgtgcccagggtgaagatgcacaatcacggtgacatgctcagaagaaagagacactgtggctggcccagtgtgctttgcacagctgtgttatgacaacggcaatgtgtgtacagggaggagtcaggcaggatggagggagaagagcaagggcctaagggagacagcacttaatgtttattgagctcacgcatggacctagcagagctaggagctctcccatgcctaattcatatagtattcaaaccacctcaagcaagatgcaccatctccctggagaccagaggtaggtgctagggatctccatggggctagaagtcagcagggttggaaccacctccaccctgggtccctctggctccataccccacactcttcctggttcagggtccacggccccctgttctcagggctctgttgaccgaaccgagagcagtcacttaagtctgtggacatccaccttccctgtgagcttccagaagggaaagtggggtgacgcatattgagagaaaatggcaccaagtcccaggacgctctcttggctccaagggtcgggtctagaagatgcctgtgctctgcgggttgcccctttccattttgccatcagggagcaagccccagggagaggtggctcatgagtgcctgaccctaaaccaagcacaagtctgagagcctctgagaagcaatacacagagggaattgttgatcctgcatagaaatgaagggaggaaagtatttaattccaggctcccaggacacaggagagggtcatgttttctagtttgaatgaaaaagagagagatcaccaaaaatcactgcctaggacaacagattatggatgatggaaatacagacgctattcagccaaatgtgactccattcaggccattaggaaccactgacttataaatataagtgcctctatctctgtgagaatttctctcttcccccgttgactcctctgtctgtcacagagcttgcttccccagcacctaccacgggtacctggtgcattgaaaacctcagtaactggtgcataagtgactccttggcttttgagttgaggaacctgatctaaacagcccttgagcagaggctgtgtagagatgccctggagacggaaagggggcagtcaacaccagtagggtgaaacgggtgtgaggtccaccttttggtccccagcgttgatgcagtgaggtcaggggttaggaagaatcacccagaagcaaaagacgtcgagacgcgagatttgtcataggactcacctactcactccattgtctaaacgagaacgggtctgaacagaacaagtcgtctcttttcgcctttcttctttttgcttgttttgttttgtttgcttgtctgtctgtttccctttggcaggaatactaatcttgcatttttacaagcgttcatgttttaagcctggatctcaccgctcacatttttcagacaaagcccctacaacccagagcctgtggtgagccccagacctcccagctggtagcacccagacgagatgaaaatggggccgggctcctggcctctggtccctcactgaccctcttcctctgctgaccagctctgttctcattctagaaccaaggtatcttcttcccctactggcttcctagtggaggccaatcttcctcatttgtatattccttttactcataggcaagccttgtgacccccaaagggggacctgtgcccacccttgcttgcactagcttacctggcggcttcctgtcctagttcactgggaaaatgcaagaggagtgaaaagtcaccagcctccatgcccgtgactgagtgtgaggaaggctgagaagggcaatgcgacggggagtggattagatccgggcctttgcacctgtgggctccccacatccattacccagtttgtaatcacatatgatgcgccagaaacacactaagtccaataaaggacccagcgaaattaaatatggtccctatactccagggagtagatagaattaacatgacacacacacacacacacacacacactcacatgattaacatgttaatggtgggactcagaggtcgcatccctctgggggaatctttgcaggtgatccaaccccaggggttactttagatcaaaagatgcctccgtttcctgcacaggctgagaccagccccccagactcctgacctggtccccccagcagcccccagggctccatcatcctggcctcccaacaagaggctcaccacaaggagaaagaggtccacccgggggctgggaacacacagctgccaccgcccccaccccgaccggcgcgtcagtaaacagcaccaccgcaatcagtttggcttttttgatgaagacaaaaccatagaggaaaaccattagaagaggtaataaaggcccttcttgtacagttaatagagagcctcctggatggaacaagcccagctgttgctgctgaaaatttacttctgttttcaagttcaaatagagactaaaacattatcttcgcgggaattgattttacgtctcccaaacacatatgccaccttaattgtgatttgtgtgatagttcagctgctgaaagctttcgtttatctctacctggttaaacaactttaaataataacaagtcaatatatctgtctattgaccagggctcttctcacatcttcagagctccacacaagaagaaaaaagcgttaaccctttgcagcccca

SEQ ID NO: 26631 - DNA, 1799 bp, Bovine  19866880690038
  misc_feature (1)..(1): n is a, c, g, or t
ntctcttctgattgcacacccagtggaccctatcttttgattaattaggtatattattttcccctgttataatatcacaaagatattccatgttcaaaaaaatcccatagttgattataaccataattgagacacacagggattaatttgaattaagcagtaactctacagatgctcaaaacagaactcagaagactgacttgccacttctcactctcagctttaggtaaggccatagaatataaaacacttctagcacatttttacaaaaagtcaattaacatgtacaaaataaagtgaacaccccaaaagaaatgtgattcaggaaatgaactggttagcatttacagtaattactagagattactaccaaattactagccaaattactggtagaatgatcatattattctcttcctgctaataatgctgcataccaatttcaagtgagtgtacataatttccttgccagggtccagacaatatttgaaaccaatacctggtcagggtctccatagctccccctccaacactgtgatgaagctgggttttgctttaacctgcagacaatgctccctgcccccaccagccaacctcagccccttgtaacttttggcgagagtaacatcagggtggaatacaaagtaaacaaaaatagccttgtcataagtctgacctgacagctgtgtggtcattcacgtgacctgatctgaaagaggttcacagagctgtcctcaccactcaggggccatgactgcctgagatgccaccatttaaacacgagctagggtgaagtactgggaagcatttactcctccacctacatggacatttgggagagaaggagatccctagctctagggggagaaaaaacaacttgtaaaatggggggaagcaggtaagggatgaaggtcttataacagatttgggtttgggaagcagtgctgagtggatgagatggtctgacagcatcaacaactcaatggacatgagtttgagcaaacgctgggagatagtggaggacggaagtgcctggcctgctgcagtccattgggttgcaaagcgtcctccacgactgaacgacaacaaagctgaatggaagtctggggtccaagatgttgataaggaacccatgcctgagaaaggaagcagagggaattaggatcaggggcatacattcagcacagttcagctgggacgcaggctcagccgcctggtgggagctcggaaacattaaagcccatcacatcacggctgtctcaccaggtgccgggacggcctgaggttgatactcccacctgcctcagtcactggctacgagctgccttgggaaagaggacatgaagccacaatggagaagtttcactgtagcagggagggccctgacagaggtgactagctgggcaagtaaaccacagtcacatggagaaatcccccataaacatttactccacagttttggttagtcctggaccttgtactaaagagcccggcaagatcccaacctgaaaaaaaaaaaaaagtaaaaaatgaaaaagctatctccagaaaacaagaaatgacaccaccagctctatcataaaagacacgccagtgattgcagaaatgttgttgtcttttcaaatcagcctaaactggatttccaaattagcagccccaactgtgactgtgcagttccttgcgttcatggtgctgaaaagttgtattcactgtgaagagagaaccatccgacagaaggctaccacatttcccccttctcagaatctcggaaatggactgatttgcatatttagcataca

SEQ ID NO: 26632 - DNA, 1474 bp, Bovine  19866880720229
  misc_feature (1)..(1): n is a, c, g, or t
nttcctggaagagcagcagttgttgtttggaaataattctgcaaattgcatttatctcacagtggtctgaggtcacaaattcaagagcaaagagaaggctcttcaattagacactgatcaaaagagatctgtcaggatgacattccatctgaacaatcaattgggatggagaaatggttcagctgcagctgctgttattcagctttctttattattatttcaccattggttggagtcagggagctggctgctgagtgccgagcagttcagggcacttgtcactcgatcagatagaaatgcatctctctgtgtcctgtgctcgtgatgtattaatggccaaatgaatgagaaaagtttcctaaaagggaagatagatttctgctgagctctgctactcaggattttgtccagctgtgggcaggcccatctcttcccctctccctccctcccccacaccgttcaggaggcccaatttgtgtttgccagcccaaggcgagacttccaagactcactgggctcttctggcccttgattcagtcacctaggattatagattggcataggaatgttataagataatatatttcctgaagccacacagccaatttctgatttcagagagagggtaccatccatcaaagatacatctttgagctgcagttcaacacaataccactttcatcagctactgccattggaaacacacacacacacacacacacacacccctctttgctccttccatgacaggaggaggaggtagaatagcagtgatggagagctgaggaaaggctgtgtctatgatgtttcctttgtgaccatgggaatgctctgctgctttaatctaggctgggggagcaggtgcgggttgacttcgaagccccagtttaccccttacctcctctcttatgtttctcaacagtaggaaatcataactcattttgaaacaaaatgtccacagtgctgggcgcagtgtctgtgtcagcagtcccttaagttgttcgtgccgtgtgttgtccgcacagctggagggaactgtggccgggagaggcagggcctcgcctctggcaccctcgtgttgacagcagcgcatgcctctgacccagaatctgtttgccagctggttctcctttccaccactgactgcctctgagaagccacacagcatttgactgcaatgtcaggcttctcagggtattcaataaataagagagaaatgacggttactcagggtggatagttactcaggcaggttaagcttcctgcataccacagttggtaaagcatctccctgcagtgcgggagacctgggttcaattcccaggttgggaagtgtggggaagttcccctggagaaggaaatgcaacccactccagtattcttgcctggagaatcgcttggacagaggagcctggcagcctttacagttcatggaatcacaagagtcagacatgacttagtgctatctttcttt

SEQ ID NO: 26633 - DNA, 1413 bp, Bovine  19866880727501
  misc_feature (1)..(1): n is a, c, g, or t
ncgagtttacaccatcaatgacggctccaggccctgtgtaggggaaagagagacaggcttgttagcattagcacacacccagagggcagcttcctcagcccctccaagcactgcacagacatgcttctctgtgaacagcctccacccggcccctgacccttccacgtgcccataaacagagagactcaaaggggctcctccctgggtcgcctggaccctgcagcctgctctcaaacaccagggttaaagcacccacaaggaggtggagggaaggcagggttagacctgcctgctgacaggccagggcaggcccttggaggtggtgtgcaggacagacaggggtgggaggggaagcagaggaacggggagaggagagtcaggatggaggggagaggcgggaggagggagagggaaggaaggctttcgtgagacccaggagtctaggtgttgctgtggccgactttttgtctggcgtgactgggatgttgtggagcagctggggaagatgaataactacaccccatcattttaaagactatggtggcgtttaagccagcagtcaaccctacatcaccagggggtaccgagaggaccccgccttctcagacctagcagccacctccctcgagcgtccttctttcctcttccctctctctggccctttgtcacagttcccctgaatccctcatattccacatgagatgagagcacggactgacaaatgctgttcctttccctttatctacatcctcctccagaagacagactgagtgcactggggttgtcctcgcccatcctgaggacccagggcggaaggataagtgtcctgccctgccttcatacccgtccatcacctttgctgggcagcataagaatctagggtcataagcaagagcagtggccagcgaacagagagattccagggtaagcgaagctacatcttagtcaaaggtttaaaagtcctcaagaggcaacctgcagggccagtgacaaagggcaggagcagtgggaagacaggcagggcatcacggccacctttggtggtaatgtggctccttggaaatgaacttcactcccgacaaaagggttggtggagtcgggtctcctctgacagcacccaggtcccacagcttcctggtcagcgccatggcttggacccaggcctcgttgggccgacagttggtggtgacagtttagccaggggacatatgtgtctctagcttcagcgaccagcatctacctgttcccaccccagggttctcagcaggataccttctatttctccaatgcataacacaattctcttacttactaagaattcatatttacttgagagcttgagagtcctgctcacagttttatgtttttttggttatagagtattcacagaacaggacagagtccaggccttag

SEQ ID NO: 26634 - DNA, 1284 bp, Bovine  19866880739462
  misc_feature (1)..(1): n is a, c, g, or t
ntaggtaactatttaacaagtatttgctggaacaataaataaatgaatcagtaattaccttggaatgaacacaggtctctggttgctagcttcctaagtaatattgtatttttgaattatattcttggttttataaagctttccctccacgggccgtgtttatttttaaaaattaactggtatgaaacttaattttattttgagactattttaagacatagtggccccacagagatactctgggatattatgaagcaaactttgggaaattgctgacctagatacagtcgcaaggtgataggtgctacataaatataataaattatactgagggggtccccaggcctttcttccctgctactgcagatggcacagaaatagtctgaagaaacattgaagaatgtctaagggcagaagcaatttaacacctcgggctgctttgtctacctatattgaaattattttatttaatatgaaatctacttattcaaccaatatatgctgctggaatatgtatgttatgatgtgccagatgcagggcaaggttttggaaatgtgagagtgaacctaatttatcaggtccttcccccagtggaggccgtagtgaaggcacaggggataagcagacactaattaagcagacacttacctagatacacatgtgttattatttttttttcctcagtaaaaattcaggtagtaccgtaagtctgtcctatatacagtactgtgtgtaatacagatagctcgtgggaacctgctgtgtaactcggggagctcagctcggtgctctgtgatgacctggaggggtgggatggtggagaaggaaggctcaggagggagggggtatatgtatgcatattgctggttcactctttgtacagcacaaaccaacacaacagtctagagcaactatactcccaagggaaaaaaaaaattaaaaattcaggaagtgcagcaagtctgtcctacgtacggcatccttctttttgacactccttccttccttctctttcaatgcctgattcttctaaatacgattgaaatgtaggagcgaaagcttatatcccccaaacactgatccaggtttgtgttgtcttccccttagaaggaagcaaataaaaatcaaataaaaatgcctgccttcttcttgactgtacccctatagtaaaagctgaatcagtatttgtcaaaatccgttgaggaagtgactgggttgcaccaacactcagaagcaaagctgagagcacagagaggagctctgattttgctggtgccacacag

SEQ ID NO: 26635 - DNA, 1440 bp, Bovine  19866880744492
  misc_feature (1)..(1): n is a, c, g, or t
ntcagcatgctccatcctccccaggctctcaggtaccttccagtggatctgtgtaccatcacctccgagagcagcagacgcagccccagcacgcacggcgaccactcagttctcaaaggaggcatcatcctccccagagcagcttgtgtgagcttcaggctctcttccctcccccgcccccccggaccatggagcacgcatagcagtgtggcagctgctctctgactcaatatatttcttcctcatgttaaatactatcattcactcacacaatggtatgtcttctgctttgattgttattattaggttgttttacactttaacggctttagatatgaaaagaaattgctggatgccaggctatgtttttcattatctgactccattcagttttgctccgtgtccttgtggcatttggcacacttcatcttcctaggggtgtaaaatgcctttcctgctggagccaggacagtcagagagcaatccgcagaataccaattcctgttcttccagatccaggggccagcctccctcggggctgggctgcacacgctctccagatgtcccatggttgcctgggtgtatggggtcagaactaggtagcccttcctcgcctaagagcatcgtcctaccctttactctaacagagggttgattcttctaccattaaccctctcccccagctccccaaaacaaatccttcttctcttctcttagcaagagttaaaaggaatgactttggtcttaatcattactttgacagattctggactcctcatgtttaacgggtctgcagcccaggaggcctcatgctccttcctaactccctgcatcactgctttgccctttacgggatggttcaccaggtcacaatggttgacgatatttggccagacatctgcgtgatcgagaaagacggatggcttcttccctccattgatttatttcttctgtcgcccatcatttccaaaagggattaaagcagagaaggtgacatggatttttgtgcccagaaaatcttctagacaaaacaatcttggttgtttctacattgattcaactatttactcaataattgctgttgagcacctgcttctctgcagctgtctcagaccatgcagatccatggcaggacaaagcagatggaatccctggtctcacagagcttatattctactgggagagacagaaagtaaatccaaggataagtgaacctgggagtgtatgatattgtaattactgtgaaaaaaattaaccaagataagaggcagagagattgtcaagcatcagtttggggtttgcagccttccatagagtagatatggatggacttattaagaagataccctatagaggttaggggaaggaggtatttgggactttgctggcagggctggctcttgagtcccaggccctccatcatgacacatccaggctgct

SEQ ID NO: 26636 - DNA, 1016 bp, Bovine  19866880861170
  misc_feature (1)..(1): n is a, c, g, or t
ntgttgacaaatgtctctgctttttaatatgctgtctaggttggtctcaactttctttccaaggagtaaacgtcttttaatttcatggctgcagtcaccatctgcagtgattttggagcccagaaaagtagtcagccactgtctccactgtttccccacctatttgccatgaagtaatgggaccggatgccatgatcttcgttttctgaatgttgagctttaaaccaactttttcactctgctctttcactttcatccagaggctctttagttcttcttcactttctgccatagaggagacttagatgacaactaaaagcagtgtggggtggagaatgccaccctggacaccatgagaaaaccagggaattgggagtgctctctgcagatcagttagcgccattgtaccgatgctctgtcttacttttgagtatggtaccgtggctacaaaggatgctaagtgaagcatttccagttctctgtatcatccttgccactcttctatactctaacaattattttaaaataaaaagttgggttattttttaagaacatgaagaaaacaattcttcctgaaaggcttcaccttttatcagaaagcacactggcagctgacctgtttccatcagacgattgaaagggagcggaaggtgctccacccaagcaggtggagacactgggttatccgctgagcatccttgatgaacatctctgcgggaggtcagagcacagcttgtcagagaattccaagaagggaactgacaactgggggaggttccctttatgtttcttaaatacctgcctttcttatttgaaggaaagtgaaactatatgacccagaaggctaaaaataagtaacctcgagtcaaggaacaggtggccattccgtttaaatatgttccctctgaagtgaaagaaattcagaaaataagaattcattgtgctaacgtattgagtcttcctcattctcctgtgatattggtggcccttttatatgcataaagggaaatgtatta

SEQ ID NO: 26637 - DNA, 1406 bp, Bovine  19866880903110
  misc_feature (1)..(1): n is a, c, g, or t
ntgtgactggagagacagaacttgctttcattgtaaggattacccccgcatggttccgtttgatctgttgtttttcaaattcccttttgttcaggtttggggtggggagggtctacggggcttggtgtctagaaattaaaagttattgttcctgttctcttaatcataataatgagtttggcttgacaaggtcaattaattattcgggattaggaagcaacactattatacctatcaggcaggtaagaggggagggctctgagcagagagacaatacaggctaaaagaagggctggtgttcgcaaagctctgtttattgtccgcaagtcaccggctgctgccggctattccctggccttttccctttctctctggaagggacagccacatcctggcttcctctgctcctttctgccttattccacagacattagtggaggccccgcttcacgtgagctccagagactgtttgactccaaaaggcaggtaattaactatcaaacaatagaaaggattttcagattaattctgcccaggaagaactacgaaaactcatttacaccaaacaaaagggaggggttgatttgatgctccagtgacaaaagagagacctagttagggtctagaaaaccgataaaggtccaaaagcttgtgttattattattattataccaatacctccacttttataagcactgtattctactcttctctatcatgcaaataggtctctaagtgagatttaagctcagcaggtagaccaccagtcaatttctgccctctgataagaagacaacagcagaggatgagatggttggatggcatcaccgacacaagggacgtggatttgggtaaactctgggagacggtgaaggacagggaaatctggcgtgctgcagaccatggggtggcaaagattcggacccaacttagtgactgaacaccaacaacgcggagaccattccctaaggttccctaagaccaccagggcggtttccctgcactaccagggcttttatagatacaattagggctttggggaggtcttccatgctgtcctgaatttgagaacaattcagtacaaagcgtttttgttcactctgctttccagaatggggcctcttgcaaggagcaatgaagacaagtgtagagcttttccgagaagcttgctttggcagccgaatccagagggggaaagagttaaagcgtgtaactgaactggagaagcggcctcttattaattacactcataaagcagggcaccctgaggtcaaagagatggaaatcgctagacccaaattttaataaatcgtagatggagctccctcactctggtctcagagattgcattccggctgcctaagtgggcacgcaaacccctgggggtcttttttactcttcacaaa

SEQ ID NO: 26638 - DNA, 923 bp, Bovine  19866880911941
  misc_feature (1)..(1): n is a, c, g, or t
ntctctccctgaaccctccagccctgtaacaagggccctgccttcctatccttcctgtagactcactcacctttttgatggcatttggaggttgtgcttgccccccacgagtgtggattaactagccacttcctgtgaactgatcctgatggtaaatgagcctaatggatggtattccttgccctggtcgtgtgctgccaccaaacacagccatctgcatcccccaggctggactccagcagcccagagaccccccaacaagccgtgcactgaggcaggctttcctagaaattacttcaggggctgcacttgggggaaccaaggccccaggggctgactgaacacaaagccctaaagataaaacaaaatagctttatttaaagatttatttaagaggttttaaaaattgagtagaacatacatttttaatactgattgatattattgcaaaacattctaatgcgagtgcgccccatgggcccttgccggctacataggccgaatattccttttcatgcctaacatgagtcatagtccagccatgggtggatgtgctgatgcaaggtgcccctgtgctgtggggagggggcgagaggatgtgggagagcagcagggagaaggaagaggggaagatagtgtgcgaacctgacactgtagactgcatttcaatacagagggttcatgctccctttctgaaatgtattttgtagctgataaagtgcatgcacgcgagaagcccgctgaaggccatgaatgccttaattaaaccttgattcccatttattgagcaccatctgtgtactcggcgacggcttcctgcttttgcacacattaattcatttgattctccaaacaatcatggtattatgcccatcatacagatgtcacagataaggcttagcaacacttgcaagctcatccaa

SEQ ID NO: 26639 - DNA, 2934 bp, Bovine  19866880945119
  misc_feature (1)..(1): n is a, c, g, or t
ntccgactctctgtgacctcatgaactgcaccacgccaggcctccctgtccatcaccagctcccggagtttgcccaagttcatatccattgcatcggtgatgccatccagccatctcatcctctgatgccctcttctccttatttacataccacgcacataagtctttgtatgacatcagtttctttttattgtcatatttattttctgcatcacagatacaggcagcattatggagaggttttatgccctgggggaaggactgtgcctcttccctccccctcagaatgggccccccacactgtgttaacagccctgatcctctgagtctggacctccaggaaaatcataagataactgtatagtgctttcaaagtgggtttcaaagtgctttcatgtaatcggcttatcatttgttcctccagacatcccggtgtgctctgtgatgacctagaggggtcatcctaggtcatcccccatccctagaggggtgggatggggggtgcctatctcagacccagagcctgactgcttggtgagattcggggagggtgaacattgacattattcatcacttactgaggaccggcaattctccagactatgtgcttggtccgggtgggagcattgtacctggtctgctggggaaccgaggacaagctactgatgtaagaggcagaagggaggcgggcaggggaactggcttccgtcctgagaatctgaactgagaataagcacagcgctctgcagacgtagccgctccacacttggtttgctaagtttgtgccttcagtgtttttcctcctatttcctcaccccttctcctgcagctgtgggctttgtgagtgaagacgaatacctggaaatccagggcatcacccgggagcagtcggggtactatgagtgcagcgcctccaacgacgtggcagccccggtggtgcggagagtcaaggtcaccgtgaactgtaagtagtctcaggcgcacccacccagcaccttcgggaggtgctgccctcctggccacagagagagctggaccacagtgccagccgtgactcggggcgggaaatggggcagcctcgctgtccattttctgctttcaagagcaacagttctaaactcttaaagaaaataaatgggtgctgaaagtaattttatataatccaaaacttgacttagagtcctaaaagatcattacatggcattcaatgcataatttatacaagcttgtctttgaatcccaatttttactcataatgtcaccaagcttctcattctctggacagtcatctccttaatagggagcaaaaataaaaagcacatgtatggaagaaatattataacttatgtttatggtatacttatgttatcttatcctcttctagttatgtatgttgattgacatggtatacattcacaattgaactatatatagataaacctacacatatccaatatgagagggtatatctcatacctatgttttgctaatagaggtgctgcttctgctgctaagtcgcttcagttgtgtccgactctgtgcgaccccagagacggcagcccaccaggctcccctgtccctgggattctccaggcaagaacactggagtgggttgccatgaaccccaaaagctggaggccacttctctggactcctcctcttccttcaccaacccaattctctctgacattgatgctgcttaatgtccctgctccctcatgcattctctctaggttccccgttaggtcccctgactcaggtctctaggacatccggaaagttttcccagctgtgctgatttcagatgttcttaggacagaatagaacccaagagtcaaaccagcagacaagaagagtttctccttccaaacttgggtggggttggacatagaggaagaataccttggtgtgatgtttactccttctttactttaatatgttgattcatgtcacaatctgagcctaattaacacaaagcacctgaagaatcaaggaaacaggtgaagcaatcatgccatttttgtgccctaccccaatttctgtttaaagtgacataattcacagttaataaagattaacctaaacagtaaggagatgtaagagaaggggaaaacctatgtagggaaataagagaagtctatgggtaaatcagcacatggtgtttatagcctgaggtggtcagatgcgggtccaggatttggctttgaggtgcaaaagcaaagagaggaaacatcattgggtttgaggtttatgtccataaaataaaagtgaatttgtcgcttgggagaagcactgcttttttctggtgctgagacttgaaaaataatttcacttgaaggtctctataaatagagcatgacaagcatcacttgaaatggccatgcaatggctggctgtggctcctttccataacgcatttcgtgcaactgtcggcatgacaggggtggtttggcaaagactcgggatgaaagcagccggagtacttaagtatagttgttctggctgtgttcatgggtccgggaagaacacctcccaagaatgacagatctgtgtatcccccaggcaattctccatgactattatttcttgcaactgagttttcgatgggaactgaatagctcaagcttatatactctggcataaacctggtgtgcagaacatctatagggctagattaaaggtactatcaagccatggggcatgcggtggatggcgttggctatctcctgtgaaagtggaaaagtgtaaacgggaaataggcctagatgcctgctcatcccactggcgtccaaggggagcggaggcagtgcacgcgagcctttccctggtgatgcgggatggcttcattctccggcactccgtggagaccagagttagagtggggcctggagaacacagcaaagggggcattaaagatgctgtcgaatgtcctct

SEQ ID NO: 26640 - DNA, 2756 bp, Bovine  19866881023373
  misc_feature (1)..(1): n is a, c, g, or t
ntgtctccggcattgcaggcagatttcttttaccccactgagaccatcggggaagcccatagcactctgttacttacatcacttccaggacttacctcggggcacaatattttgtaactgaaagagcctctaatgctgcatgtgagtaagtcagggccgcactacagggtaactgacactgcatcctgaccagttcttaagagttgccctctctgggtggtcttggagggtcctgggaaactataggcagcatccatacagctacctgttcccccgaggctcaaggccctgtccctcgtggagtggcacacgagatgccctcccaacctctctttctgtccaacatcctttggtccaggcctccccatggaacccagtcacccttaccatcttcctgcctttatctcccacgtggccctcacaggtcctggctgtgcatgcacggggcaggtgtgggctgtggtcctgaagagtatggggcctcgttgctgctggccccttgcctgtcatccagcatctgctgtctggtcgggaaggattaggaggtgagccacgtagcgaaggaggggtgtttgccgggaaggcgggaggacagaaagcagagagcgctgtggtcctgcatttgaagtgaacctcagacctgggaaaatgggccctgagtcatctcagtggatgattagttatatctgtaagacattattccaatctgcccatcgaggggagggagaaaagaacagctacttgtcaaaatcggcgtgcatgggagactgggaagggaaaagaaataattaatttcctccattaatacaagacattacccccggacacacacagtccttcataattgtcagctcctctctcccccatcgcgaaacagccgctgcacagtgacagatgaggccaccttgaagtcacagggtgtctctgttctgaggtctgagtcatcgagaccccaggcccagtgctggcggctgggccagttccccagtgcacaggctggggtacagggactttctgatgtttcttcagaggccagtggccctgcgctcctggtgggaactctgcccatcaacacatggtcatcagtttccagaactcaaagaattatttagcgttctgggtcactaaccatactgctaagttaagaaacttacaaatgaccttagaagtcctctggtgcaatttttatttgataggaaaaaaaaaaaatcttgggacttggagtggtaaaaacacttagcccaaatcataccatgttagtggcgaccctgatggttgacccaggtcttctgaagtccaattcagtggtcttatatcctgattcctatgattggcccagagtcatagaaggtcccatggaatgttccttctacagtgatgaggctaagaagaggggccagggagacagatgccgttgatgagagatcagcttgatcagagtccagcctggatggtgggcgggagacccacttgcctagaaatagctcccggtgtgtggatacggagagtccttgtcaaaaactttccaagggcccccaccctgcaggaagcgctcccgtaccccgagcagaggactcgcctgctaagcgccggctcctcgccctcccctctcagcccagtcacagctgagcacctgagctgcactatctccctgcgatgcttcagagccaggtccgtgctccatgaagcagccactagctccggcgtgacttgcctgctgagtgctgcttggcttcgtgggtgttttgcccaggagcgaatcgaagtatttcagaaatattaatgaaggtgataattagcaccactgccatgaagctgtgcccttgggaactaccatgggaagagagaataaaggcgagaagaaaagagaagagaagaaagagatgaagcaggaggaattaggctgcatctgagcttcacctgcagaaaccaggctgtgctcttcctccagggagctgggaaagggcggccacagcatttccacaccagaaggctgaggtctggcttctgaccctccaggacttcggaccctgagccccagctgggtatctccccagggaatgcagggctgaccctcacttggcctatcaccctgttctccaagaggagaccaagctggtgcaccaagagttccaggattgcagagtccgggggactactctgcatctggtcccgcagggtctgacagcccagtcactgcctcttgctgggtataaaggtgtgagtgtcagagcagcccagagtggggcacttgcagcggccctggtactgggaccagacacaggccgttctgtgggccagagggcaggggccacggggtttgtcatccagaccagcatggtgttgagagccgaagacagcagtcagtaattacagtgggaaacagtgttaactgtccaggcaagcctaacagtatgattacccacctataaaagtaacaaaggccttgatggcattactacacacacacacacacacacacacacacacacacatctgtccccagggaactgagcatggcaggtggggtagaaggaaagttttaagtcccgccacaaagcaagtgagaggtaaagcatttgctatgatgttgctctatcatcagaaacaatttctggcttccttggtggtccagtggttaagaatccaccttgcagtgcaggggatactggttcgatccctggtctgggaaagattccacgtgccggggggcggcaactaagagactgtggaccagtgctactgagcccatgcac

SEQ ID NO: 26641 - DNA, 1280 bp, Bovine  19866881038580
  misc_feature (1)..(1): n is a, c, g, or t
nagattgctgtatagttaagcatcaaaaaacatttatttctactgaatagggaagttattagtgaaactgtttaaaaaattccataatttagaacttcaggggaaagatgtgacacagacattctttttagtgatattagaaatcaccccaaacaagatggcccagagggcagccctggcaggcagagttggaaggcatccctccccaccatcctgcagcaatctgctgatggagtgaatgacgcatgctgattggccagcaagtacacattaatgaccagttagcaactgtgttcaggtcaattaatttatatttgtattttgcaagtgaaagttgccctgttagattattgattctttgtccctgtattcaatttgtttttaattgcaccattgctgggccagaccctccctcctggcagactggcaataaatctgccaccatctcaacaatcaacaataaatgtgtctcttcatgtcattattaatatgcctcttggatgggttcgttactacggctcacagtttgtaagagccggatggcacaccgccagaagaattccttttcccaagggctattttgtcgtgataggattgatgttctcaggcctgtgtgtgtctgagaaaaggggcctgggatttaatttaatatagctggaatgtgagctccctaatcctccccttatcataaacagctttagaagaagattctgttggaagagagatttttaccctctcttccgtttcttcctcttttctactcacttttttttttttttttctttttcttttcgagcttcttaattccttcttaatttctgctcagatagatgcttttcccctctcaaaaacaacataacagctacctgggtgatctaaaatccccagataagggagccatgtgtcccccagaaattggagggttattactggttgattgttagttggaagcagaggggagttccctgtgcttgatgagtgaatggtgattaacagagctgcagaaaagtggctctcataatgtcaccttaattggggtcagtattgaaaaagaataagaaggaaatggctacccactgcagtacttttgcctggagaattccatggacagaggagcctggagggctacagtccatggggtcataaagagtcgaacacaactgaggaactaacactttatttcactttcttaaagagataatcatcaattccagtgttgttattggttttttcagttattagaatttttcagggggaagcacagattttaagtgaatgta

SEQ ID NO: 26642 - DNA, 1429 bp, Bovine  19866881053228
  misc_feature (1)..(1): n is a, c, g, or t
ngcaggtggttggacagtggaggagaagctgtggtcttggaatctagactgtgtccagaaagttgcagcaaagcaattgagggaggccaagggttggaagacagagctgtgccagcgtgcacagctcttgcaaccaggatgctcactcagctggggatgcactcagctgccaccagaaacctcagggttgtacacagaaggtaacccagggcctctgcaaggcctgggcctgagggtacggagcatctcagccattcagggccccgccctttggttgcatctcctaggtgatgggtagcttggagccacatcctctcatcttctctcctgatgcccaccaggcccatgactcatctcgggctgaatgccttcgccacagccccctgcccactgcctcccctcccccagccccaccaggcagcactgtgctggcccaggcagctctcatctctcctgacctctccccactctgagaatatgcacaaaggaaatgtgggggattaaaagcagctcagggctcctgcagcatttggaaaacaactcttccttagataaagcctgaggcaggcttcgctctcactgcagcttgatgagttgatattgctcctcgtatagcttctatttgggaccaacgctgtttacataacagacattttctgtatttctactctctcattttttactattaaggacacttgcctagaaacagaatctgtattttttttcaagtgttcatctcctcccgctgcctgctccccacctgagtgcatcacacttgattgctgtggcaaggaggcccacacgtttatccgacttggcagagcatgtgtctactggttcatctatctcccctcctatcctgatactcacaggaacacagacatgtctccggcaaaaggtatatgtgctaacgcttctcagaaatgcagggacgatatttccttttattgttctgataatacagaaaatcatactcagccgctatgcagcatctcgtcatgactccccaagatgcccatagagatgtgggccttactctgtccatttcaaagatgaggagattgaggcagagatgaactgacttgtccaggcagcctgaaaactcagcacaagcagaggattcacattcagaatcgcagatggctttaatctagtgattggatcatcagaccacaatgacatgtttccgacctcttttagagcttggagaatcaggtatttaatattgctaaacgaaattgatagaaaggtcaaacacaaaaagtacagagagcaagtcctcttttactctacaagtagtgaagcagatttctcagtgtttaatttatggcccattcagtgtatgaaagacatttctcaaacgggagagagggagaaaaaaagatgattccatgtctgggctccctgtatttaggattaataacaccag

SEQ ID NO: 26643 - DNA, 1648 bp, Bovine  19866881071452
  misc_feature (1)..(1): n is a, c, g, or t
nagcgacttcctttccttttattttatgtattggagaaggaagtggcaacccactcccatgttcttgcctggagaatcccagggatgggggagcctgttaagctgccatctatgggatcgcacagagtcggacacgactgaagcaacttagcaactgtcaagtcttcctcagcagcaccgatagggagggcctggggccattggcctagctgaggtccctttagtgatgactctttaatctatgtgggtccatgaggatgtctccctcacagggtggggttttcccaaaagagagggccctgaggagagagctctgcattcgaagtttcccgaaggctctttcctgactttccgttgatttcccccttcatatgaatttttacaaatgcatcttagtagctgtattagcttgggttttccctgatggctcagatggtaaagaatatgcctgcagtgcaggagaccctagttcaatccctaggtcaggaagatcccctggagaaggaaatggcaacccactccagtatatttgcctggagaacctcatggacagaggaacctggcgggctacagtccatggggtttcaaagagtcagactcaactgcgtgactaaacacttagatttttcacttttgtattagctaagagccctgaggatggctttgccaaaggcccttccctggtggtctgctgtttggcgcctcttgttcttgcagggagttgatggtgcgatgggaggttctcatcgtcttgcattcagcagctgttccttctaaccaggtgccacgtcgggttccccttccaggccaagggaagacagtgggctgtgaatcacagtgagagaaatgacctgagagcctaaggaaatgtggagagaactcccagtggtcttgggtaaagtcttcttgggttaatattctgaacgtaagagatctattttagtgggtgtcggagcagctgatagactggtgacctgttggtttgctgagactgagctctcagggcagcccttgaaggtagcaagagggatgctgtggggccaggccaccactgaccccccgcagcgatgatgcacggggccctggcgctgcggcttcttggtcccagtggggagagaggcttcactgcaagccccgctgcaaggctcatcctgcagctggaagctcacctccacttactccatttatctgaagccctggcagaggctgcatgctgctgtgaccgagttgccatggagaacttgtatcctcttggcttcctcactgcttttacaggcagtattacagaggagaatgtctttgctgctaggaaatataaatattacccagagatgctcattttctccctctatgatgattattaccagagatatgcaagaagacttcattacagagcattgtccttggtaatgagcccgctgtagctgttccgaggatggttcaggctgccaggaacaaatcgtgttaaccctcaactagctactagatagatatctactagatagatatgaagtagaactatttatacatttgacagatttttttgtggagtacctactatgtatgaggccctggggatacagagacaaataatatactcttctgccttcagagaacttatattctagtaaaggaaaaaagaactgca

SEQ ID NO: 26644 - DNA, 1246 bp, Bovine  19866881073976
  misc_feature (1)..(1): n is a, c, g, or t
nctgtggtatacacgtgcaggagctcccctgcctgtattgcttgcggacagcacctatcacagcaggcaagcaagtgttaataaattcacgggaagacccaagaacatgcttaaagtagcaggcagggccccaaagtccagagtctgagacgacagtcaacattagcccatagagactcatggtccccaccagtaagcacagtggccttaattgtcacagtggccttaattgtctgtcactgctccctaagcatcttcaggggaaagagcaccaaccttgaactgatgaagggtggaggaaatgcggagaagaggcttgaatggagagctcgcgctcccttttacgttgtggttgtttacttgcacccaccgtgagcctacacgtgtcagatcttccccgctagacgctgtaattactgtgcagagcatcgcggacactcgtgtcacacttaatattcccattaattttaaatggtggtccttggtacatatgtgtggcaattggtgtcatattttaattaggcttgccctacaccatctgaaattaataatagctcgaattaccagtgtaatttataaattaacagtgctgtagcattaggaaataaattagctctggtgagctgtttctggattgagctccagtgtcaggacagtggctggtaggacctcagatctcctgggaggctgcgatgacaccatcaaagcaaggaaacaaaacgactcagggttcccgggtcccttgttctctccaaccacagatcacgcatctggtttaattctaccaatcaaacaggttcttgtgcgaccacagtaagacatacaggaaccaaactctgatgaacttgttatgtatgaagtatgaagtcagtcagtcgtgtccgactctttgtaaccccatggactgtagcccaccaggctccttggtccatgggattttccaggcatgaatactggagtgagttgccatttccttctccaggggatcttcccgacctagggatcgaacccaggtctcctacattgttataggaacttgttataggaacatccaaatggagaagttgaggcagagagggggatattgccatagggtgaaatgcaagtatgtaaatattagggcaatcatagtaaaaaaaaatattaattctcaagttttttgtgggaacattgggctactttatgtgaaatttacaatattaatatcaggcaattttatgtagggaaggaagctggatagtttaag

SEQ ID NO: 26645 - DNA, 3940 bp, Bovine  19866881076673
  misc_feature (1)..(1): n is a, c, g, or t
ntgacagtcttatgatggcatctgatcatgttattcttccgttcctctaaaaaaatcttgcatctgtgttcagttctatagaaatagaagaatttcttaacaaaaacagaaaacaaaacaaaaaaactcttatgtgctgaatgtcggaggacactgcatgtttgaacatcgtataccctctctgttgctccctgctcactccttcccagcacgtgtgccttaatgcagatgcgtacgcagaagtgtatatgtgtccatgcacatgtggacctatcaaccaacctaccaacacacatgcatgcacgcattttctgcaggagacattgaagattttgcttttctctttaatgttcacttttcacttttcttcctcaagagaggaaattttcatccatcagagcatctctctgaaattagccttgcgtttataatgcatgtaaagattttttccagcgctggtctaatgaaaaatgataccccaaattagtgattgctgccttccaattatcccattgctcatgattctgttacaccacaaatagttatccgcttccctccccagtaacgacataaatgggctgttgtaatcgactccaaaacgaatgaccaggtctggctaattttgctgtatatatagttttatgtatatatagtttttaaaatgtcaattattagaagaagactgtctggttagtgtgtgtggtcccagtcatccaaggagcctccacatctctagcatggaagagggttggaatttcgttttccaagagcatggcttctctgagagctgggagagagcccaagagagggcaggcaggggttagggggctcaggagcattcatcactttcacgttatattgtggcttggattttccagtgctgaccctgctttgtgctcaggcaaatcacgggttgtggcacttaaaagcagacagctgcactggacttgattcatcctagtcacacataatggccacacttggctattaatctctttttccaccctagaaataaagagaaggggaagaaggaagtcaaatctaagtggttgtgccttagatgttaagaggactgttgaagtcagtcaaccgcaggctttggggtagcccactagattccagatgtcctggagacagaaataaagagactttgcaggagccctggtcaccacgctagaccctgggactgttcccaagctctcttctcacactgaggttgtcatcatgtcctgcccatggggagcacacatcacagcgagcacgggcaagatggaacaggttggactgcagaggagccagagatgcaggaatcagccaatgggcagcagatataccaatatgtcagtttgcctgtttccatcagcccagacctctccatggaaaccccatcaagtctcaggtgactcaggcagctttctgtctttggtttggctttggtgtcatggctccccgaggaacccacaagacgagagcaggtggagaccctgctccttatccaggtgctcactgcgtgggactgcccacttccgctccctcaccccaccctgacctttgggtcatagcatcacagccctgcctcatacttttttatttatttaattttttttaaattttattttatttttaaactttacaatattgtattagttttgccaaatatcgaaatgaatccaccacaggtatacctgtgttccccatcctgaaccctcctccctcctccctccccataccctccctctgggtcgtcccagtgtaccagccccaagcatccagcatcgtgcatcgaacctggactggtgactcgtttcatacatgatattacacatgtttcaatgccattctcccaaatctccccaccctctccctctcccacagagtccataagactgatctatacatcagtgtctcttttgctgtctcgttggaatttagaaagatggtaacagtaacttttttatttattgatatgaaaacattttcatttaaattgcctaatttgagtctcacaaaactctataaggcaagacagctatgatagtttctagtttataaataaagacaataatcttcaagatatcaatcctttggccccaagtgcactggcgctgggagtcctgtggttctaccccagcgattctgccctggtttcagtgctgctgtctcgggtgccctggccagggcttcttgtgatcttacatgggagggtctaagagctggtgtgactggctgtggactgcatacgtcatcctctcagagaggcgtggtggtggctggtatgtggacaaagcttcttgcttggtcctacatccagggaagcactgtgagtccctgaaggccactgtctacgtccaccagtctaaccttccccaccgtgtgcaggatgggaacggagctggtcaacctctggcctctctaccctcaccaggaaaacatctctggagaccttctcagagtcttgcttctcttttcttcattctcagtgggaaggaaattgctcagatggtgtaattttttttttaaggctctggtgccctggaaaaaaacagatgataagtctgcaagtatgttccatgcaccgtggctgctctcttgcgtcccccactgacttcgtgtttttcttagctgttctgttttagtttgtaccaacacagactccctccacctcacatatctcttcagggtgaaatgcctgctcagtaagctttggaaaggcagtatattttaggcagcctgataaaaggctctaatcgccccagattaatgcattcattcctagccaattgaaggattcattccagtgctcaggcggaggctcctctgatggacttgccctgggtaatgagccattcagcagctgctcccctgcactgctgggaacctgcagagtgggccgcgagagggagccaggcagtcgtaggtgaactgcaaaggagagcgggtgtctgggtacctctgaccctggagggaagtcgtgggagcaggaaggtgctggtagccatgatctctgcctctcaagcgggaggtgggaagcatctggtggggatgtgccaaggaatgtggccactcagatggcacacgagccgctaaaggctgggagatgaggttcacggtggacaaaggatgtctaggttttgaaagcaaagcccagtcgtgcaaccagagaagagtgtatgctggaggagcttctaaacaactgtgctctgtgcccctaactcacctctctacgtggacatttccaaagagggaacgagagacatagagacagaggaaaagttaggagacttcctaggggttggctggcctggagtctctaggagtgggcgtgtggtgtgtgaaggggagtttcccctgccaggacacttgatgatgtctggagacagctgtggttgtccagaatttcaggtggagaaagagagatgatactggcatctagtgggtgaagcccaaggatgctggtaaacatcctgcaaaggacagaatagtccccaacacaacagaggagcatccgctccccaaaccaggagtgccaaggctgggagccggctagcccaaacctacgctattgccagtgagacagaggaagcagggcgaaagcgatgggctcagggttacgcagatggagggtggaggagttgggagggcggcagcctgcggtctgtccctctcacctccatgatgcccctagatccaggaggcctgctttccagttctgcactgcactgataagtggtctcagaagcaaagtcgacctcccctcctggaccacagagcacctttccagcccctgtcccagtaaggaaaacaccaccgcctgcctttatgaacacacgtcggtgcctacccactttggtccaggcagatctcttctgggggattagcttattatctttgttatgcattttagaagcggttgctactgctataaaaataggaatgccag

SEQ ID NO: 26646 - DNA, 1035 bp, Bovine  19866881080637
  misc_feature (1)..(1): n is a, c, g, or t
nggcgaggagtgtgatggagcaggaccctagggaccttcccctatatcctctgctttagctcctctctgaagtacccagatatagtattctatgcacgtttcctgagttgttttgcacacacccctctccatcatctgccctttaaaatctctttgtgaaaatccttccagcagcgctcggctctttagggcctgagccaacggtctcctcacgtggcccctgcagtaagcctttctctgctccacactctgacgtttcagtttctttggactcactgtgcgttgggcacaggaactggcactaacaggagtgcctctagagcaactcgcatattttgggcatgggtaatgaggtaacttcccctggtagctcagaggttaaagcgtctgcctggaatgcaggagacgcgggttcgatccctggtcgggaagatcccctggagaaggaaatggcaacccactccagtactcttgcttggagaatcccatggagggaggagcttggtgggctgcagtccatggggtcgcaaagagctagacgcgactgagtgacttcactcaatgaggtaactagggcttccctggtggttcagtgaagaatccacctgcagtgcaggagacccaggtttgattcctgagttgggaagattctctggagaagggaatggatacagactctagtgttcttgtctggagaattccatggacagagaaggatggtgagctatatagtctaaggggtcacaaagagtcggacacaactgagcaattaacacttccacttttttttccattgaggtaattaggtgatataggatgacaaatgggacttaggacaggacggaagatgacacaagagcagaagggagctgggtgcaggggagttctgagctgaagacgacgcttttgtaatcattgcttgcaaatgacacataaggactctgtgtgccgatttcctagggtgggtatgattaaggactgataagtctaggatttgggggacatcaaagattaagtaggaggggaggtagaagg

SEQ ID NO: 26647 - DNA, 833 bp, Bovine  19866881112161
  misc_feature (1)..(1): n is a, c, g, or t
nggcggtggggcggggttgaagcttgttgggtctggcagagaaatcccgtggggctggagctttaacaagggggtgagagaaaaagatggaacacagagaacctgctcgggtatcaagtacacagcactctctactgagacccacgtggtcaccccagcacatcgaaagagataagacagcagtccgtgtcttctcacccttctcagtccacaagcagtcctgatgagacagtcaggacttcccaccaagactcaagtccccattcttacagggatgaggggaggggggcacccaaacaaagccaacagacagaggtgctccccaaacaccgggcgccctcatagctagaagacatcagagccctcctgcagccagcaaaggatgcagtgttgacttagtgttacctgtccacccgctgactccctggaatggaaaccccagagctgagtgctttcttcagcagggaagcaggggcaggagccgaacgcagactcctcctgtctcaggaattaacctggctgccacctgcgggctccctgtgtcctgcttcccccccatctcatcggtgtccttgctaattcaacaaagttattacccgattaataactcctctgatggaagagttctgggatgagctggagctcccatttacaatctgcaggtgatgggaaaattatgttcagttcaggaataattgatggaaatagtctctcctcttcctcagctgattggctttctaattgtgatttaataatgtaaatatcacttgttttcttctgaagatgaatcggctttgatttgctaagctcaaggctctttgggcttgtttatt

SEQ ID NO: 26648 - DNA, 1017 bp, Bovine  19866881154619
  misc_feature (1)..(1): n is a, c, g, or t
ntgggagggaatgagtacgagagaaacgccatgcttctggctggtggcagcagcagcatcatttgtattttccccaacctgcaaaatgtcaacatattagggaaaaaatatgcagacatttcacatttcattcctgatgagactccttgtcactccctcgcaccctgctcccctctgtctgaatcactgacatctggccgtcagccagagcatttaggctttaacacagagtgctgggctgtgctgatgtcagcacacgctggagcttctggttcggcacagaccagagccttgcctctttcagggctgtgatgagctgatgggtctgatttaacttctgctatgaacttcctaggccttgggctttgtgggatggctgccattttcgcctctttatccccacgccttcctagagcgtgaagcctggttcatcttctttgcagaacaataccaggccctgtttctgctgtaattaaagacaatggaggaacagctccctttgatagcaagtgatgcaccttcatcagccagccctgctgaaaagaggtttacgtttccccaacaagagtaacacatgcatcgtctaattagatttcctcgctcctcttttaatcaccaagaacatcattatccttttggttcctcattaggaaggtcacatagttcacactcatacttataaaactcatctaaatttcagaacaaaagtgtatcttcttagatttcagatgcttccttgatctcactgtgctattaccatgttcaactttcctgtggtttttttttcctcttattgtgatgaccatactgctgctgctgctgctgctaagtcgcttcagttgtgtccgactctttgcaaccccatgaactgcagcctaccaggctcgtccgtccatgggattttccaggcaagagtactagagtggggtgccattgccttctccggatgaccatactaccacctgctattttagtaggattacagccacaccttgctatcgaatttcttgctgaaaa

SEQ ID NO: 26649 - DNA, 992 bp, Bovine  19866881212237
  misc_feature (1)..(1): n is a, c, g, or t
ntgggtgtgaagatacactgaattaaggttacagagctgcgagtagagaagaaaaatctctgaataattttcttgacaccacattcaacctcttcaggatccgtggtgataaagcactaaagatttattttaatgtgtaaaaaccccactctgttcctctgggagatggtaaaggagtctctgggaggctcggggatagtttatatttatcaggtaaagtgctgtctgctcactaataagcttcataaatatttctcccttctcctgaaaggaactaaaaaaagatccaattttgcaatctttaaaaaaaaagggggggggagagagagaaaggaaccaattttcaaaggttctaataccttagtagaaaaatgtagctggattactcgctgccttcttcgcaaggttgttcggatatcctttatatcgaaccctagcttcacacaccgccaaccaacaggcactccagcacccagatagatgactgagtcaggctcatgctatatagtcatatattttttatctctgtagttgttaaacctaaaaaaagaatcagattttttttaactgcatttgaaacctgatttcttctcgcgactcttaagtaaccttgcaacataagagatgtacaaaatagcccttttaagtatgcttccttcttagttctgctttttcctgatcctcgcagacttgttgtttttcagtctcttagtcatgtctgactctttgtaacaccatggactgcagtacaccaggcttccctgtccttcacgatctcccagtttgctcaaacttgtgtccattgagtcaatgatgccatccaaccatctcatcctctgttgcccccttctccttttgccctcaatctttcccagaatcaaggtcttttccaatgagttggttgttcgcatcaggtagccaaagtattggaacttcagttttagcatcagtccttccaatgaatactcagggttgacttcctttaggactga

SEQ ID NO: 26650 - DNA, 986 bp, Bovine  19866881214844
  misc_feature (1)..(1): n is a, c, g, or t
nctgcagcactctcagtctgagaagtaaattagatatagtgttaagatgccctacaggaagagtgtacgattctaggggttctagttgcagttgtaaaccaggtcaactctgccatcctaactgtcatattgactgcatgtcatgttctcattcattggaatgaacagagaaagaggctggtcctcatcgggccatcagctgggacatccatcccttctctgagggtctccccctcctacacagggtgagggggccccagagacccgaatggcccctcgggagccttcatcctgccttccctccattctcacactgtcgtgtccatctcctcgtgcaacattttaccccactggccaggcccagctggttgtgatggtccgtgtgtttatgtgtgtgtttatttgccgagatttggcaagagggaactgtctggtaactaggaaggaaaggtgttcattgttcatatggacctcagaccctgaacagctttcagcgttgacatgaactaaactttgtccaccaaccatctgaaatgtgtgatctatgtctcttgttttctctctgcattgtgtgtgcattgtgctgtgtgtgtcttagaaataagcccctcatcagcagtggcaggtgggtaccgcatgttccttcactcctctgcctgcctgaatgcctatgcttttgatgttaagcctcgttccaagataggcttgcctgctcctcctccctgactttttctccttactggatagacttcagggggctggtgtgcacagtttaggtaacaaacatgtagaatatgatggcttttgttgtttttgtttagtcactaagttgtatccaactctttgtgaccccgtggactgtagccctccggattcctctgtccatgggatttcccgggcaagaatactagagtgggttgccatttccttctccagggcatcttcccaacccagggattgaacctgcatctcctgggttgcaggtg

SEQ ID NO: 26651 - DNA, 3626 bp, Bovine  19866881223497
  misc_feature (1)..(1): n is a, c, g, or t
nacatctgtatatccttccttcttcaataaagtatgaattacctttgcttactaagaaaatcttatcagttttaagtaaagatgttttttgtcttattctttatgtagtttttaatttattttcctatctcattgcattggttagaattttttgatagttataacaggaagcccatgtcttatttctgctttcatgcaatcgcctccaggtttttccattaattgtgatgctcctttcaatttgcagtgagatctcacttattgagagatcatatacaaatgtacaatttttatttattctttcaagtatttctataacttcacacataatattggcacaccttttattcttggaattaatttcaggaacattttatctgttgaatgtattgtttgattctatttgctaataaatttgtgctcttataattaaagcactgtatgcagtagaggagacagtgaaatgcacatttcccgacaatgcatagatgatcaatgcatcctcgcaggagaagtaatggtaattactaccaccatgaatgcttcggattatagtttttcaggtactacagtggttcaatgcactaataataacacagagaacctttgaggtagggttgcaattttcctgccaccaggcttattccccaaagttacaattaaatgtcatccgcaaatggaggtacaaacattactttttatagctcaggttctttacctcgtctctgtaatccagcctttttcattagtgctgagatcccaattctggctgcgcagagtaggagaaatatccccaggtgattctatttaccagctagatcttgagtaagccattacaacttcggagcctctagttctcatctgtacaatggagccaattaaccagcccctccattccttagaaccattgctgtgatggtcagatatgatatgacctctgaaccagagtccacgccacacaggtacaaatgggtcatcagcgccagcagcagcatcagtggagttgtattaagctatggctcctccctccgtacataaagccggatccttttgctttcctgtgttattacaggcgtcatgaagcataggcttacgtttcttctggtttctgtgctacttaattacccttcctcatctcccagccatttttacatttaaataaaactctcatttcacttaacaatgaaagggctaaaaatttgcatattaagtgtgagtcagtggcatggatatctaattaaaacctgtggctttttttttttttccttttttccccttttcatttttctcccctgagctgctgacattattgtcactgtattcagtgtccccattctgtcagccctctgcgttctgaggagagcagccacgaggctatcagggagagctggagcttacagaagcaagaggaggttggggcaagagggaaaaaggacccaaaacagaggcagaagatgcagacacagggggcttgtgacggcaaaaccctgcagaagaagaggcacatggggaggggcaggatgaggcaactggattttaaagagggcagggtgaggaagggaggggctgaaaaatggaaatttaccagaaagaagagcaagtgtaagaatagaaagaccacgtgatgggtggagaggagcctatggcagatggagatggagcaagtgattcaaagcagtttgaacaactgggtatcggccaggacatgcaggaggtcagggtaacagatcgctggcctagttccacaaagagtgtctgtcttacatcaccacagagtggttataataaaaaggcaaatcagttgggtctggtttaagtactgtcctcccctctgtggtctcatttaacaatccacatccgctctcctagattttctttgttttccttccctagagtctaaaggacgcggaaacagatttcctgaaatcatttgtgcatcttcagcatataaccaaatatgaaatgagtgtcttctccctcctaacccctcaacacgaagaccaggcaagcataattcacaaggagtttgttaaaggcatccacccagtagatgcctttgcccactcttgctgtaaatggatggcctctttctagaagcacagtgtttatggggaaacttggcatggataaaggtgcaggtgaaaagcatggctgatgataggagccagtgcagtcacgtgacactgagatcatttctgctggagtcagtcacaccctccccctgagcacacggcactgtccctctgcctgtgtccagctgctcaggcaggtatggactaaaagatcctggggattggactgaacttagacggcttggcaggtgatagtccctacagggagagggaaagaagactttatgttgctgaagcacaggctgccacactgtggccccaggaattaaaatccagttgataaagaaaaccacatggaattctgctgagggtcatgtggcagcctggatgggaggagagttcgagggagaaaggatacctgtgtttgtgtggctgaatcccttggctatgcacctgaagctattacaaacaccagctatattccagtataaaattaaaagcttaaataaaaatcagttaatacataaaagaaacactgtcacggcagtctgaacgcacgttggaaaaggatttccagacacagagtattgcagaaaagaatgagtttgttaagtacaaagagtagaaataatgtgggccctgcgagtgcagtgggccaacctcctgacagaccaaggagaagccactctttttgtgggttagtggccaatttttatagcctcagacaaaatttctgctggaaggttggcattaggtgaccgtttagggttctatagcgtgagtactgtcatgggcattttgcatagtaaggagtcaggaagcctgctggtgatgactgggggcttttggcaatggttacaagaggactcattcagcttcagaggtgaccttggctctgggctctgcttctgtgaccttggcacaagggcccacacttgtgacctcgggcagggttccacatcaatctaagtttgtgaagggactgggcagcaagactaaaggcgcatgtggtcaatgtcttcaaaggccttgaaggttgaaggttggtttgggaagcagctctctggactcgtgtctaagggagggtcacctctcctcctgatgctgtgttttccaaattgcttgatcataagaatttttcagactcttgtccagttacccataaccagccacatcccaggcctatcaagtcagattttgcaggagatggtgctgaagattatgcatttaaaacacaatcagacaagattgcaaacatcagcttttagaggagttggacaatctcaggtcgggggtgaggtgtgggtgtcataagaccaaatcaggattctcccttgcaggtggtgtctaatgaggaaacaatttccctaaactccccacaccaccttgactttcctgttactgcagcatcagcatcatgactcaatcttgatgtgatgtgtgaggtaattaagggactccagatctgcatctcactgcttaataccttcatccctgatgctttccaaatgggctttagacaggacaggatcaatagactgctcttggctcttc

SEQ ID NO: 26652 - DNA, 1261 bp, Bovine  19866881245248
  misc_feature (1)..(1): n is a, c, g, or t
ntaaatgtggatggctactgcagcctggattaaaagacacattttccttgggagaaaagctatgacaaacctagacagcatattaaaaagtagagacatcattttgccaacaaaggtccatatagtcaaagcaatggtttttccagtagtcatgtacagatgtgagagttggaccataaagaatgctgagtgctgaatgattgatgcttttgaattgtggtgctggagatgacttttgaaagccccttggacagcaagaagaccaaaccaatcaatcctagaggaaattaaccctgaatattcactggaagggctgatgctgaggctgaagttccaatactttggccccttgatgcgaagagctgactcattagacagcaccctgatgctgggaaggacggaaggtaaaagaagggtgtggcagaggatgagatgattagatagcatcactgactcaatggacatgaatcttagcaaactccaggagacagtgaaggacagggaagcctggtgatgcagtctatggggtcacaaagagtcagacacaacttagcaaccaaacgaacaaaaacaaaacatagtttctacagcctttactgtgtttttctccaccttcctcagcagttcttggggtgaggacagatcagacctagactgactgagaaagccagggagactgcagctaaaaccccaatattccactacaaggcactgagagttctgtcattttccgtgctgctgtatttggagctgccacactccccaaaggcaagctgcgcagtctgagttagaactgatgatctgcacacatctgcttcagggagcctggggccaacacctgaaggacagcccgatgctgatcaactggaaacagaccagaaggttgggagagagatcacagatgggccagagtaaaggaatggacggctctataggttaggaggtgattaagtgacggcaggcgggaatgggcatttggctaacatgccttgtgcccaagactcaaaataaatgccaactagaacaatgaggaggcccagaggaagttgctaagttccttttgggatctcctatataaagcccaaatatacacactgcagatgccatcgcacccatggctaattttctgatttacattgttgagaaaggattagcgaaacctcccatttcgatggtctgctcctaatttacatttttaacgaggtgggatccaagccaggttctgtccctttgtgtttattttgtaggaactatgtttatt

SEQ ID NO: 26653 - DNA, 1156 bp, Bovine  19866881279715
  misc_feature (1)..(1): n is a, c, g, or t
nctcagttaccaggggcctctacagataaatcaaatgttcagtctggaagggattttaaaatcacacagcctaatctcttgctcctttatttatttacttaaaaaagagaaagcacaagttcagaaaagtttcagtgactttctcaaactcacacagttaattagtagcagaagcaagagtgtactctaggaagctggactttatagtaatacttttcctaaaccatcacgctgtctctttgtatccccatgcagatctttaatattgtttgttcctttttaagaaaattcttcactttactttggataaagatgcttcaaaatgcaggtgacataattagaggccagagaagctagaagatgaataaaaggtagttatacaaatctttaagatggcgatcaattatgcagagcagaaaatttgatacaaatctgtgtcctcagatttcacttgtctagtttgtagagctagattataaagtatttttaaaagcagttttattcacagtctgcccaaattgacttgttttggctgaagagctgcagcagaagagggtcaccagatgggacagcccttcgtccccggagcgtggcctgaagcacagctgagtttttaggggctggcagtgggacatggaacaccttctgttcaaatgtgccccataccctgcagtcatcagccacagtctgctctggaaagaggttcataagacctgacctttttctcctgctcatcgtgggtagatccatgttcttcaggagagagagcagctcacatgagcaggtatcacggtactttatgcttgggaatcaggatttgggttcattcacttcatctcctcattttagttgcttggcctgtgctgtagtgaatcacttcagttgtgtccgactctttgcgaccacactgactgtagcctgccaggctcctctgtccgggggatcctccaggcaagaatactagactgggttgccatttcctcctccaagggatcttcctgatccagggatcgaacctgcatctcctaggtctcctgcattgagcggagggctctttatcactagcgccacctgggaagcttggtcttacgcatgtctgttacctggatgtgaaggtgagacattttgctcatgtggttagctgacctgcactaag

SEQ ID NO: 26654 - DNA, 895 bp, Bovine  19866881283437
  misc_feature (1)..(1): n is a, c, g, or t
ntgaatagcaggtcatttcctttttctattataaattatactctgatatcatctttaaatataactctatgtcttcatctctgattatttccttataatagatttcaaaacataagaccattggatcagaagcatccgataaagcttccactactcctgagagttcatgtgtctgccagccatgcagactgagtattgtgcagaattagtattgtttttgttattttttaatttttgttcattattatttattattatgacacgataggatactaatattttcattttgcttattactcacattggcggttgacatatttaggtatgtttactaattataaatcctttctgtgacatttttcatgccataaatttatccattttgtattggggtagtttaaaaaatagttgtaagagatagctcttcttctatcttggggacatttaaaatgctgtttaggtaagggacccatcttttgattctcaatatcaaccctatagtaggtacttaataaatgaacattttattttgtatctggctgaaaaattcattttaaattatggaattaagcctcagagtgctggagtgtttttttttttttttaaataaaaatcacatctacctctatgttgtaaaaaactaggtattaaatgtcaaatagtaacagcacaccttttgtagggaaattctattaaattggactttctagaaaagtgatttaaattaaaatttcctgataaaatttttatccatctacaactctttatgaggctcacactttcagggactttcaaaatcagtattaaggctattaccaggtatataaataaatagatagattttacatatatatatatatatatatatatatatatatatatacacacacacaca

SEQ ID NO: 26655 - DNA, 1409 bp, Bovine  19866881287967
  misc_feature (1)..(1): n is a, c, g, or t
natggataacgaacaaggacctactctagagcaaagagaactctgctcactgatatgtggagtctagatgagaggggagtttgggggagaatggatacgtgcatttgaatccttttgttgtccacctcacctgaaactatcatggcatggttaatcaagctatactccagtatcaaattaaaaaatctgaaaaaaaaaaaaagaacatgggggcacaaaggtgaatcagacttgataggagtaagacgcgggtgaggcttccttgttctgagcttgtgaaggttctgtacccacgttagaactaagagcaacttctgacccatcaaagcacacataaccttgcacctctgggttgaagtccttgtcttcctggtagggggcatgtagggggcaggcgtgggaggaagctggactttgaccactgggcccatcccctctctccagagtccagacagctctctccaggcctctcctggtttccacgtggaaggctccttattcctggatcaggttaacggggtagagagggagcatctgcttcagaggaggccgtcgagtgaaaggcagtaatgctgtctccaaaccagcttttcataggctcttacttatcatttaatttggctgcagtgtatggaattaggctaatggctgttaagtggctaaggcacaaacatggtccatctgccgagaaggctccaggccattgtctatttcaaaggctaaggaaaaaagatgagccagacatactgttacactgagagcctcatcaaatgcctttttattcaccctcagatcttatttctttcaaagctagtgattttcctggtaccatattaagagctcaaaatcagggcctagctgctgggccattaccacagtggaaaataggctatctttacctaatctgcaggatattgtgatagaaaaaaagcctgcatagcagcaaaatgatttagtccgttaaaaaatatatatatggagcaactgtaatgttcagagtgtcacacggaacacaagaaaagatccctgacttcaaggcgtttctcatcttagatggacaggagggaatagagtgtgtgtaggaagagttctaatgcatggccagcattgccatgacttccaagaggacagaaaggaagaagggaagcgtgtctgggaaaactggagggcagagttggcagagtgaaattttttgaatggggctttgaagagaaataatagctcatatttatgggactgcctctctgccaaaccattcatacataagattttacttaacaatatcctgataagacaggtgtcattattccctgacctttgacagatttttaaactaaacataagctcagggaagagctatccccggccaagcagactcaggacttgcccagattccaagttctttttaa

SEQ ID NO: 26656 - DNA, 905 bp, Bovine  19866881319303
  misc_feature (1)..(1): n is a, c, g, or t
nagcaagcgcgttttcagtggttattgaaagaagatgaatagataattctgcagagttcacttgaacccatcagttgtcaggtcaaatgacaaaaagctggtgcaatcgtagcacatcaaatcaattctgggagtgaaataccttatggtcaggaatgtaaataatcatacccaataaggaagcacaccttcccagtcttcaagcaaaactccaacttaccaggagctctgatcacctggctcagccattaagctcctgtgctcagttacaggagtctggatgtgcttcccataccaagttgagtgagttggcatcctcagaggtgcagctccagttagctacctgtctttacctagcaagtcagttgactacattagccacttagtaatattccaaaatcatctgtgaatcagaagaaacacataccaattttatctgtaaacgaaacactctcatatctattctgaccataatcctttacaagttccagaaaccactttagtggggctgaactggaggagacataaaaactacaggatatggctctgcctgctaaagtgagtggcaataaatgccatgcaaatagcagataaaaatgtgctggtcactgtgatgctgcgtatattagtcaataggcgtttgttaattaccgtctgtgcgcccagcccttacaatgtgcacagccacagaggcacagaaaagaaccaccgttgtccccaaagcaaccagaatctcccagagagatgggacagtggagaatgaagtggtgaggctatgaggaagggaacatgggagaagtctaggaaaggggaggccagtaaaacctgaatcccagaaacgaggctctgagaagctggaattatgtgcaacatgtttgtgcatttccatcagggatatcccctca

SEQ ID NO: 26657 - DNA, 778 bp, Bovine  19866881358371
  misc_feature (1)..(1): n is a, c, g, or t
ngaaggtagacctaatgatctgggtcccctgaggacctttttggtgcctgaaggtgagaatctggtctccaagtgttcctcccagatttcagtcatttttggtgagcctggtgtttgcatttgatgacagggagcttccaaaagctccgaggattaattcaggccgctgtgtgtgttctgagaactgcctcactgctttgtctgcctttgggccacagtgcccataaaatggaggaaatttggagaagaccgtaagtaaaggtcctgagtttcccaacccagacattcctgtcctcacccctcataaatcccattagacttgagacctaggctgaggggtcctccatcatcacagtgtcattccctcttccttacatccacaggcagaggcccgggccaccttgcctgtccttctctataaatcagaagcagggcaataggaagctgggggatctctgtgtctgcatggccagaggaaacccggttgctaggagagctttggaacacttgagcagaggagcctcacttggtcctcctctgtcagccagtcccaggcctggcctccaagtcaattaactgaaccgtttcaacaggcttgaattctgtcagcagctcaaccatccccttgtttactgttgaaataattactactttgccataatattagctctgagccgtgactccattaccattatcaccggaatattacccatttattatctcccagcaaccctggaagatgaatactgggcttcggagacccattcgctgttgggca

SEQ ID NO: 26658 - DNA, 1378 bp, Bovine  19866881412344
  misc_feature (1)..(1): n is a, c, g, or t
ngcagctagtggagatgggtgggggaactgagtgaagaggggtgacaagcttggggtggggaagggatgaggggcctgctgccaggcagtgggttaacttgagaaatcagaccaagacacatgtgaggagagctccaccaccatcagcttcctttcagagccatgggctggcagatcagcccatctgaactggggaggaaaagggacacaggcattgcataagtcaggggagaaaacaggctctctgctgacacatacctctgttttgaagggacttattcttttcttaaataaatgaaccaatcacaaaggttacaggctacgtgagagaaaagctcatcctatttctgtcttgctctagttttatataattattatatcaactgtggctgatcaaagcattcattaaagagaaactatctctcctatgcttttgttacagtttggagagagttgacaggctttctatgtctctggctatatttcccctttcctttttcatggctgatttctctcttcttcctctcctcctcccctttttctataccggtgatttttaacacatttttcttttttttctctccacctggcttaatcacatctcttttaagtcatcaagggaaccatgagcgcaggcagctcctggttgtatctgtggtctggagagtgagcagatctccagtttgagagaatggaacctgctcttcactaggcatggccctcaccccaatcatccctctctggtatctttcctgtgactgatttttggtgtcaagcttactgccttgtcccagtaacttcctctcaaagacaggcacagatttgacatcgctttgtcaaaattaggagaatcctgtgctagcaaaggagttccatatggtcaactttctgtctttgcaaactctcactttcagcatcattttttgcttctcctcttttccttatttcagtgctattgctcctgtggagcctgctccaacttacttaccatagagggctttcccccagggatttcagcaacccaatcaattatgggaggatatgacttgaacttggagagcactgggcgtgagtgtgtgaaagtacatttttcatattagcatatgcctctatatcccatggtgtggcacaattttatctcactctccactgggctggctaatgacagactccttcacaaatttatgaaagagcttcggtcttcagtctatatttcatcctttatttgttcactggttcaacacacaaagcacagactatgcgctaggtaccatgccaatgtgcaggcacgtggcgataaataaaaacaattctgtcttcttgcagttcctaaacaaataaggcagggagaaagcacaatcagttacctgttaaccat

SEQ ID NO: 26659 - DNA, 1525 bp, Bovine  19866881413728
  misc_feature (1)..(1): n is a, c, g, or t
nggctggttttctaaaaccataaaacgttccacaggttccccctcccctcctccccaacaagtggtcaggcacaagcctgcttgtctccatggagagaatgaaggtcaccacttaataaagctcccctttggtggacgagctgtcagagtgaaatggtctgtattcattttaataaaagaaaggttgggttgcgatagtgtctgacaccgggcgcactctcttctctcttttaagctgcatcgtctaataaatatgtatcatctctaagggaaagcactgggtcagactcctaccccaagaacacaggattaagaagacgctgtgccggctgctcatgccagctccatgccatgtgtcaataaaagtccagggctcatcacatttcattccgcacaagcgcggccttccagctcatctccgagctgccacctcctgcgcagcgtgaaatcaggccccccaaaaagcaatttcagctcctgcttctcgcagggtttccagttttgatgcagagccctggcaccgggcagcctggcggtcagggaatgagacgagaaatgacatgcagtttacaaaaaataaataagaaaatagaaaaaggtataaaataaaattgtagatcctactggtccaaatcaactcagagcacactgctcctcactactggtgaaggagaagctagtctcaaagtgcagcctttaaacagctcatctctgcatccatccaggtgggtggggtccccacacgcttcccacacctcggcccgttccccctgtgtgtatactagtcactcagttgtgtccaattctatgtgaccccatgtaccacagccctccaggctcctctgtggaattctccaggggatcttcccaacccagagatccaacctcggtctcctgcattataggctgactcttcaccatctgagccacctgggaagcccttaaagaggcctgtatttctcctttccccttcttgctttcctatccccattgttctctctttcatctgaaagagactgagagttcctttaaggtttggagaaagtcactatatcatgctgcaaatgtaaagttgcccagaacaagatgatttatcataaaatgataatgacactctgctccgtaattcatcatgcactttatttgccgattcattaatgaacccatccaagattccgggataatggcctctaattctacaggtgcaagagtttgcggtaattgctctaaattataattacctttcccagtttccaggaagggtttagtaaggaatcatcctggttatcggcaaggtggacattttcatacaattttaaccaatatggcataagaaaccctatgcattaacaacataaataggctttatcattgttttgctgaaacctaatgtgcatttcctttatggctgagtcccttccctgtcacaacattgttaactggctatgctgctgctgctaagtcgcatgagtcgtgtccgactctgtgcgaccccattgactgaagcccaccaggctcccccgta

SEQ ID NO: 26660 - DNA, 1665 bp, Bovine  19866881515211
  misc_feature (1)..(1): n is a, c, g, or t
ncagagagaggcactcaatctttccaggtggatctacgtgtaagatgtaagatctcagacgatggtcttatcctctgtgcccatcactgcatttaaaaaaagggggatgagcaattctgcagaatgagggcaataaaaacccacaaagaggacagaaggatggagtggaggtccctggtggtatccctgtcctatttttgaggccaagttgtagcctcacatgtactccaggaaaatattcagtgtttctaagcaagtttccctccttcctgagttggtttctacacataaattcaaagtagcacagactaataaccatggactttgaatgcttcgtgaagtcgacttctgtcttacttgtctaccatcatccccaactcttctcctccccagtgccctccacctccaccgtccttacctccttgtcatgaccactggtaccttcttctcctgcgcatgctaccgtgtgacacagatctacagtccctccctctacattctttatctgggcaattagccttctcatccaagaagattcagttcaaggaccacctcctctagaaaccccctaccgggatgtttaaatctagaaaaggcattcttttcccatgtcttagaagggcttgtgctcacatccaacacagcttttgtcacatggcatttagaaacattggttgacttgtctgctttcccgcaaggacttgaaaatgaagggtaaggggcctgctgacaaccttagctctctgtcatttagcaaagctctggactcaagagaatggcctcatttaatgtttattaaatgaagggctgaactgatttcattaacgaattagttattagttactaaataatcagaagatggtgccaaatgaagcaaaggtcagaaaagtgactgtctacggccagtaatgactcactatctgacttctaaaccagattctcttattctggaactattgctctcaactatgctgcagaggacatgaccatgtttcagtcttagtggggagaaaggcaggtcagatggaaaaaggctctcttaaaactttgactccagagcattgccccaagacagtttaacccatctcttcagggaggatgcctcagttctgggagggtgctgcatcttctctggggcacacactccagccccagttgcaccgcatgcacgaatagagctgaacgggtcacttgaccgatttattgtgcagtatcggttttcctcgtaactgaggccaatgtttttgctcagtttaggcagtgtgtgcatcacacctggagaagggcaggacaatcgactccaatattccagcctggagaatccccatggacagaggagcctggcaggctacagtccatggggtctcaaagagttggacacaactgagcgactcacacacacacacacacacacacacacgcacaaacacacacacacacatcacccctatagaatgtgatctatcaggtaactgggtctaggatttacccccacacattctaaaatcagacaaagattcacaacaaaatattctttttcttctttttgagtaaagtgtgcgtgtggaaaatagtttatagagctcagtctctgcctcataggagatgaaaatgtgatcctttgctagctcagacaaaatcctccatgctacattaggcttgata

SEQ ID NO: 26661 - DNA, 1493 bp, Bovine  19866881516026
  misc_feature (1)..(1): n is a, c, g, or t
naaatgaaaaatattagggtccttttggggaatccattctagaatagtttttttttttttttctttctgcaaaccactcctatctaagggtttcccaggtggctcagtggtaaagaacccgcctgctgacacaggagacaagagacaaagattcagtccctgggttgggaagatcccctggagaaggaaatggcacaccattccagtattcttgcctggagaatcccatggacagaggagcctggcgggctacagtccatggggttacaaacagttggacaggactgagaactccatctaagttggagaaacaaactaaaatgtagacgagatggcagtgtctctgcacatataagcgtcaactacttgttccacgattatgttccgttagacctgtgaccaggcttatgctttcatccacctgcctatccatggactgtcctcctctctaaacccatgggttatttttgtgatgttcataaaataggatatgactgtgctgccatctctgcatttgaacccttggtgggcgctgacctttcccggctctgagtcatgaaagctcttattaatttcctgcagggatgctggcactccgaggcagtggagtggtgggagttcattaacatgtggggctctaattagctagcaaaggatttgtttctgtcctcattctgataactaacgaagctataaatatagacgtacaagaacaaacaaaaagccgaaactgaaggaaagaggtgttgacatgtccagggcagatctttaaaccaaaataaccaccctgttttcttcctcgcactctccagggacctaatcaagctcttctagaaaacttcatgtggacagctgcacagtgtgggagaaaatcggaggggtctagataagggtgtaaagaattattgattggattggattgtgaagtcccttctgaacctgccgttctatgaatagcaaatctaaggagaggtaaaaagacctgaagttcccaggtgttgaaaacagaatgaagaaaatttaatcattgtctttgtgtctgcataggattttgatagaataaagaccacattctctgtttcccaaactagaagaggaaacatgtttagattgcagctgggagcagtctaattgcttaattaatatttggaggctctttataagataccttgttcaaagagttggtaggtggttagcacacaactcttgggggtacctcaaactgtgccagatgttgctatggaatccctgcccagtgacactgaaccaatcagttgaggttccaggaagtactctgaaggcttttaattgctggactgaattcccaactaggctgtggtagttcctgccccacttaagatcttaataagcaagaaggaagtctgtctacctgaggttaaggccctgatttgttgagatggataattggctctgtaaagaatcagcccctgggatgtaggttctccatcattagatgccatgcggtagaggcg

SEQ ID NO: 26662 - DNA, 1113 bp, Bovine  19866881743274
  misc_feature (1)..(1): n is a, c, g, or t
naggagcctgatgggctgtagtccatggggttggaataggtcggacatgactgagtgagtaaaaaacaactttgtgagacgagaggtttggaggcgagatggaagctttactgagaacatctgtggctctgtttctgctctcagtactgtccacccagccacagggcctctgagttgaccctgagttatcatctcaaagaagcagcttctccccagctggcatccacctcctttattacccagagctgcgcatctgaggtgagccagccctggagtctggagagcctccaagagccaggaaagtggttgggaagatggaggcaaaccccaaagaaagagaggaagctgccgaccattgtccttttcttttcaagacagcagtgccttttgcagacttttaaatggttgccacggaaacagagcgagggagcggagaaaggttacatggatgctggataaagctaatgcacctttaaaaaacatccagctgacaagtgcctaagactctgaaggggttggtaacatctcatgttcaaagttccccttcggagcctcaagtaccttgataccatcattaaccatattttaatcattcgtcaactataattcatctccatcaaagactcgtgctggtgggtttcatggaccgtggcctgcgaggctgctcttatggcttccttggaatgaagtgtctggcaagctgggccccgggtttcagaggccttggcttaaaggagtttgattccaaatcttcttcctcctgtaaacaagtgtgcaccccgaaaacacagcaacacaccgcgaagtctgtgtttacaggtcagtctcagaatatgtgcgtggccttgtgagtgtgaaaatggatggtggaaagaaacgctaagtgtgagccccagccgctcagtttagaacacttaccccagggtgtgattcccctcttctgtgtgctgtttatgagggcttcttcacttcagtgagctcgctcaagaatcctcgttccaactcagttctccatcgtggcctctagtgaatatttataactcccaatctctggaggtttgtcccactttatattctgctgtgtccccagaaagtttatttgtgcaatttgtg

SEQ ID NO: 26663 - DNA, 1220 bp, Bovine  19866881752920
  misc_feature (1)..(1): n is a, c, g, or t
ncgacttgctttggccatgcaatgggaatagaaatctcttgtgtcactatgaaatgaaagctttaagagacatcatgtgtttctgtcactcttttctctctggagtcatactgcacattccaattaaacctactccttcaaactgtggtccaggaattaaagaaataactggatggggtgggggcagagaaagagaggggaggatggagcagtgtttgtgaatacatataaatacatacatatacatctacatctatcccatctgcctacgcatacatctgtatcagtaggcacataaagaatgtacacagagttgtaagccatcattgttgtaagccactgacatgttggggacatttgttattgcagcataacttagccaaagctgactaatacacattagtatccctcttaactaattttcattgaaataccccatcagattaactgatgctctctatttcctctgcaaaacataccaaaagtccaaagttcttagactaatacttagtatattagcacttttctgatcctacaagttaggcaaataattgccgagaatcaatttctttttaccatacagaactactgtaatttcatgctgtaatctcattctatgaagtgtacgttcagtacattgttaagacttgataaaaactaaatcactaaatacattaaaaatcaaatgggaaaatgtatatcaaagtgtatatcaaataaattacaaattgctgtgttgatatatgagttgatatcaatttgtcaattagcatgtttttgagcagctactctttgttagacaccatgctgggaataaaatgaagcgtgtaacacagaattaatttcaaaggactttagcccagaatattgtaaaaggaaaccagcatcctaaccagcaacatatctcagtgactgagcctagtaccaataaacagcactgcatccattaaaacaaacaaaaaaaattgtatagaatgttccagccccagtatatctgagttaacgaggtcaggaagacggtgcctctttctattttatttcatgtttctattatcttcgtttatttatccactccaaaacaatgcaagttcattacaacaggcttaaaataaggaaatatattaaagtttttggtgtaatgatttagttattgaaagcctacttaaaacagaggacttttgctagaagcgtccttgtcggagcacttttgccaaagacca

SEQ ID NO: 26664 - DNA, 3006 bp, Bovine  19866880209432
  misc_feature (1)..(1): n is a, c, g, or t
ntcctgggtgttctttggaaggaatgatgctaaagctgaaactccagtactttggccacctcatgtgaagagttgagtcattggaaaagactctgttgctgggagggattgggggcagaaggagaaggggacgacagaggatgagatggctggatggcatcactgactcgatggacatgagtctgagtgaactccgggagttggtggtggacagggaggcctgacatgctgcaattcatgaggttgcaaagagttggacatgactgagcgactgaactgaactgaactgaactgaagccacctcaggttgtctcatagctcagtgatgctcttttcattttgttgatttttttctgcatttcattttagatagtgtatgttgctatcgcttctaccattaatcctatgcagtgtatttgtcatctcatatattgtagtgtttatctataaaagtttgattttcaatctttgtgccatctctatttaacttttcaaacatacagaatatagttaaaataagtattttaatgttcttgtctactcattctagcatttatgtcagtactgagtccatttcagtgactgatttttctccttattataggtctcaactttgcagtttctatacatatttagttatatttgattagatgctagacattgtgagtttcaccttcttgggtgctgtatttttttgtactcctgtaaatgttaagttttgttttgggatacagttgaattatttggaaacagtttgatccttttgtatcttgcttttaagattggggggtcggggtaggggcagaaccagaaccatttggtttaaacctaattattcttccctatcaaggcaagatccttctgtatactctattcagtgctccatgatttatgaaatttagtctggttgatgaggagataggcattatgcctggctttgtgtgagtaccaggcacttgtctctttgctcctatcaaatctttttttctacagcctcaagcagttttctcacatgcatgtattgagggggattcttcacagatctctcctgagaactctagctgccttgttcttcccaggtcctaggcttcatctcgtcaacttgaggggtctgcttgactccatctgggctctatctccttgtatcatagcctagaaattatttcagggcagtatgctggggcaatcatagagtgttctttgtttttctgtctctgagggatcactctttttcactgcttgatgtccaatgtcttgggagggagggagaaagttgtttcatatgtttcatcttaaaacttttctttttttttttttactattctaggtgatggggtaaatctgatccctattactccatcttggtcagaagcaataaagcttttaagttttcagtggtggttataaaaatgaccaatagtaaaacagggagtctctaaccaaaatatccatggtattttttcataactttagaaattggaaagagaattaatctcagaattatcattatctattctttcttccactcatatccatcacaaacatttacacaacaagattcgttgaacaaatagtcaatcacatcattcagggaggggaacattgaatctaagaggaaaagccatcacaagccactagaattataagtttcaaagaacatattatgtaaaaaggaaatgatgtcaagtgaattgagttggtatcatagtacagtactattttaatttctttatatcagtaaatagctgtgaaatttttggttttgtttgttttatttgtgcttcacagggaagccaagtgatttttgccaaaaaaagaagcagaaaaaaataagaaaatgctagagaaatgtaggttatctcttacatgttcttatagcccctataatgtcagcttagtcaataaatgtttgcaaaaatccaactagaatgtgataaggtagttgctgtagctgctttctcttttcctacttttgtaaaagtaggaaagttcatggataaatggtagtaattagcatgcaattgtgaatctaggttgcaatttgcaagtgtgagtttcaaactgactaggccctcagaacagaaagacccttctaagactggtacacaaagacttggagttcatctgcccagtttatatgactaattagcacttagggttttcttcaataggggctagtgaaataagacctaaataatatcttgtaagattttttttttttttctatctgtacttctcagaagaggggcttgttgaattggaatggaaaaattaaacagatttttaaatgaagccctgatatactggctgcttgcctgctctattgggacaactctggttccagggaaagagaatgctttttttgtttatttgtttgtttccagacaatttcctgcgtcatcacattttttgtgagagccaagtgtttgaggttgatgatgttgacagagcccttggagaatcgaaggagttcatctccacagagaaaagcttttgtatttcaagttctgaaatcccagaatatttttctatagcattgttattgctagctttttatgtctttttattggagaagactgatctcccttttatctagtcatcagctttttaggtggattactcttttaagtcgagaaggctttttagaaaaactatttctcttggtatttatgaaactcacaaccacgtatcttgctctatttgagtctgtctggctggttgtacatgttgtaatcccagaggcttagagtttcattgtaactataaattctatgtttattcatatttaattttcctataatagaatcattgtttaattaatgatattatctcttgaagtgtttgggaaaatataaaatatgtttgaactataatgaattataatggtttccatttatttacaaatttacttttctgaataatgtacccaagactattttcgacaattgaaaacagaaactttttatatatgtgtgacacacacacacacacacacacacacacaca

SEQ ID NO: 26665 - DNA, 3250 bp, Bovine  19866880436427
  misc_feature (1)..(1): n is a, c, g, or t
ngttctgtgcccctcatagctgggcccctgtttttcatcctcctctccccaccccctcaccccccagctcatctctgagaagaagacctactacctgacggctgactcgcctagcctgctggaggagtggatccgtgtcctgcagagcctgctgaaggtccaggccattgggcctccagccctgcctcaggggggcaccaagcccaccgtgaagggctggctgactaaggtatgggttgggggatgggggaggcatgtgggcctcctgagagtcaggggagccaggagtgagtcccaggggtggcgggtcccctcctgacacagctttctgcagagggttcctcacattggttacctgtggtctgagccacataaggtgatggtgaatgactctctggaaaaacagggatcaaggttgttagagcaacagctgttctcaagtcagaggggggaaacgaatgtcttggacccattttgagctcatttgaagttgcccccactgctgctttgtacccaccacagctcagtatgaatagagggaagctgtgacctcagtgaggcaggcgtggccaaagattcataatatctcaggctgccctaaagatgttttttgattttttttttttttaagccgtgcctcttggcatgcaagatcctggttccctgaccagggatcgaccccagtgccctctgtagcggaagctcagagtcttaaccactgggccaccagggaaatccctaaagacattttaattagggcctttctggttgcagggagctgagaagcacttattgacccccagggagggaggttaacagggaagtgcagtaactaggccaggacactgtcaggagtaatacgtaagaagctccgtgctcggggctctccctctgcctttctgttcagtctgggttcacagccctctcctctgctcgggtgcagtgtttttacacttcatgattacatttgcccaaggacttcagcccacggtggccctgccctcccaactctagtccttgctgactagcaagttcttcttgtggtcacattcctgggacaggacatctggttggccaggtcgaccttttaatggcagttcatatgagggtgaatgggggtgtcgtggccatggacccttgctgtgaaagggctggttccattagtcgagaatctgggtggcatctgagtttgacctggaattgacctaagggtctgagttgaaccaggggttttgagatctgtctcctcgtggcttctctttgccagtcccagatttacttctggggtcatctgattctgataatgctggctcacttctgacctgcaggtcaagcatggccactccaagctggtctggtgtgctcttgttgggagaaccttctactactatcgaagccatgaggacaaggtacttcctggcctcccaatagcttcccccaatccgcattcctgtggctccgtgtcctgatggaaggctccaccccaaaccctataaccagtacaaagctagtggccctcttttgagtgtgtgaccagtgtgcaaggcccacaggttgtttttgtgtggcatgtctgtgctcctccaggcctgtctccccttccccatccctgtcatccatccacctccttgatccccagccctataagccctgaggttcagagagaggagactcctccatccctgccagccctcccattcatgcaaggctcctgtctgcagcgacctctgggccgtctgcctgtgcgggacgcgcgcatagaggaagtagatcgatcctgcgactcagacgaggactatgaggctggaggaacccggcggttgctgtcctcccactacacgctggtgatccacccccccggagcacagccccacctacctcctcattggcaccaagcatgaaaaggtgagggaggggctgggcctccgtggcaaagctcaaacctttgattctcatcttccttccttcttccctgagattcccaaaattcaaacttattttcctcctagacatgttggcaactcatatttcctgattgggaatattccttgtactgggttcattcccagcgaccaacatctcttcactggggccatgagatggaggggaccacaagcttaggaacttaggttcatattcattcgatcccaagactttcctcttagacaccagtggcctcagcttgtgccaaccaagcaggctgagcatcgccctgcacttggccccttcagggaagcgcccttggaggtcctgcctccgttctctcccagcccagccccatcagctggctttccgtccgcttccaggatacgtggctttaccacctcacggtggctgcaggtggcagcagtgccaaggtgggcactgcctatgagcagctcattggaaagctgatggatggtgaaggagacccgggtaaggcaagggtggccgtcactgctgggttggagggcggtggctgagtaattggtggttgggaaccccaagaaagcacgaccgtgccctgaagctgtttggaaagcatctgagccacagaagggcattcgtgtcccatgctccagggccttgtttctggtgaggatactggggagaccactcagtatctgggggagttgtctggggagcagacacttggtcaatgttttactttgttccctgcaactttgctggccagacagagggttgaggaaagaaggtggctggttaatctgtagttagaggtggttaataaatgaagttaggatcaggctgacttgagcctggggcatttagaagtctgtattttgctactggttctcaggaccctaaggacctaagggctcccagcacacacacactgctccactgctgcctcaaggcttgtttgttccaggctgatacacattccttcatccagacctgacgctgcaatgagggggcctcccttgcacacacgcgcacacacacacacgcttacagatgcccacgccttgcacactcactcctactgcagccccatgagcaaagcagccttcctgtaagctgtgcttctgagtgtgctgaataaatgcagcgcacacctgcccagcccacgctctgtgggtgtaaacgcagcacaacccgtgtgtccagactgaaaaccctgtgttccctgcagatcagagaaggggtggggtggggtggggggcgcgtttcctgcgcacttctgactgccgctgctctctggtgctgtgctaccgggcagactcccccctcggaggcaccccatgct

SEQ ID NO: 26666 - DNA, 2396 bp, Bovine  19866880437458
  misc_feature (1)..(1): n is a, c, g, or t
ngatgctgggaaagactgaaggcaaggagaagtgggtggcagaggatgagatggttagatagcatcaccaactcaatggacatgaatttgagcaaattctgggagacagtagaggacagaagagcctggcgtgctgtagtaagtggggtcacaaagagtcagacacaaacttagtgactgctgatgctgctgctgctaagtcgcttcagtcatgtccgactctgtgcaaccccatagacggcagcccaccaggctcccccatccctgggattctccaggcaaaaacactggagtgggttgccattgccttctccattgtgtgaaagtgaaaagtgaaagtgaagtctctcggtcgcgtccgacttgtagcgaccccatggactgcagcctaccaggctcctccatccatgggattttctaggcaagagtactggagtggcttgccattgccttctctgaacttagtgactaaacaacaacaattatttcatgaagtgactgtatgatctggacacatgtcctggggccacagctaaaagaaagtttaggatgctccatggaactgggaccacagccctgctcacatattctaggagcagattcaagaagcatttgaatctttggtcaccttctaacagaagacaaaaaattcgttatcagttataccaacccaaaacctgtgatctctggaggacactctatcctttagggatctcactatagggcaaatttttaaaaaatttttttaaattttttaaagagccataataaagtgatagagacttctaattaactcctgacttcaaaatctaagatcattgtttccaggttgtgttagtgctaaaaacttagggttttcaactaagagtttgctcccactggaattcataaatcatatcaaggtcaggatttctgcacagccttatagatggaagccattattctgacactaaccttcagtgaaattccatcaattaatagtttaggtctaagtttcaatgctctattattcaaaaataataattatgttgtaatttaactgttaatagtttatctgtaattgatagtgacaccagatattgactactaaactttttctttttctctatcaataccaagctgaccaggcacataagcattgaggactgtgataaagcatctgttcttcagatgagaaatcagacttttcagctaatgctcttgaagagagcaaactcaacccctcaatcatgccattgtttcataaatgatcatctaggtgaaaagaaaagaaggtaactgagaagaccagagaggttttcagagaaggctgaaacactcaccgtggaactaatcaacacttcaggttggggacgctccgccttattgtacttttcaatggtccggggcctggattttgacagacactccaaaacaaatgcagctattcaaacatctcccgtgtctgaaaagtatcttgagtactcaagtacattgtgaaatgtgattaacacgctttgattttgaaaaaccccagagaaagaaaagaatgtaaataaaagaatggaaaatatatatacaactggacattatggaagagaataacagacagaaaatatacaagtaagattaagttgctacatctggggaaggaacatagccgattcctttaattctctgtgaagtaaatgggaagcaactgtttttattcttattttgcaaataagaaaatcaggcatgaagcataaaagttcacaatgtggaggggaaaagttacaggtttacagaagtaatgattgagtgagaacagtaaggttaagtcgcaggaagctatgttttaatctttcctttgaaagaaggacccgtttgttctttgtatctgtccttcaagaaagttgtgaactacctaataatcacggcgtaatacgcaatggtcattttcatgcatacagaatattattttagccagggagatcaaacaaatcaatcctaaaggaaatcaactctgaattcattggaaggaatgatgctgaagctgaagctccaattcttcggctacctgatgcgaagagccaactccttggaaaagaccctgatgctgggaaagactgagggccagcggagaagggggcggcagaagatgagaaggttagatagaatcacagactcaatggacatgaatttgagcaaactcagggagatagtgaaggacagggaagcctggtatgctgtagtccatgggatggcaaagggtcagacatgacttagtgactgaacagcaacaaaagaagtggggagaaagggagaaaagacagggtccttgaggtctaggagggtgtttatgtgtgtaaggaagaggggcaggggtgatgagagagagagtaaaaacacacctaaatcttttggaaacagaaatt

SEQ ID NO: 26667 - DNA, 1221 bp, Bovine  19866880446076
  misc_feature (1)..(1): n is a, c, g, or t
ntaaagcaataaattggcattctggtttgcagcactggtttatttatgaattttgttaagatgaagtgtgagaactaacccttgtcaactctgggatacagacaatgtcaagtttctgggcctgcaaggctggaactggaccctagctgttagttcgtatcgtcttaggttgtcatttagtacaaaaggggagataatatatacttggataatttagtctctagagtctgatttgggtttgaatgcttgatcagccatttataaaatgtatgaactaagcctttttccttctctgtaaaaggggagagagatcatcataaccccaacctcaaagggttgttttgaagatgaaattagataatctatgtaaaatgcttggctcagagccctgcacagagctgctctcatcttactaccaaagcaaatgacaccttgtgatgattattaaaagccagtatgagctcattaaagcaaagcattcctgtttccttcttttacatttcatctgattgcttataggaatgtcatggagtagagttgaggtgtttggcagagatttttattatatccttgatgtctcattgggttaattaagtaaactcagagctggttgaacaaacgtgaccaagtggttttgagcttagattgatgacaatccagagggagatcatcacagtaaagaagtgtttgctgatactattctatccaattttctcacttaaaattttgatgaaagcagagaagacatgtttgtgtaacatatggtggcctcaaagttgaaagagatggctcacccatccaataagagagaccggatttaaaaagatctgtgtaggttgatgggataggtttgcagctaacaaccacatatgcatttattgagcgcttaccatgtgccaggcagaaagctaaatgtgttccgtggattccctcatttaatcctcacaggtcaccctctgagttgtacattattaatactccatttgataagcagatatagaagcacagagatgttatttcctcaagtcctccagccacagaggcacagctggaacatggaccagttgtctgacaccaaagcccacactcttaaccattgtaataagctctctgagccagtgagtctaaattttacataagttgatgtaaagttccacacttaggttagcaaaatattgtgataagtcctaaaaagaaggcaggagcttagtttgatagcaa

SEQ ID NO: 26668 - DNA, 1014 bp, Bovine  19866880458577
  misc_feature (1)..(1): n is a, c, g, or t
ntcggacacgactgagcgacttcactttcacttttcgctttcatacattggagaaggagatggcaatccactccagtgttcttgcctagagaatcccagggatggggaagcctcacgggctgccgtctatggggtcgcacagagttggacacgactgaagcgatttagcagcagcagcaggatcctgggacctagtttggcaggatctccctggaggaccaatgttaatgtttttttttatttaaaaatgtttttcaatgttaatgttttaaagaaggtgaaaaggcctgtctcttgtgcaactccaattgattggtagtgcatgccctgagcaccatgttaaggattctgggcctgtaccactcaatgagtaggcatgctctgattgattaataatgtctggaaagggtaatggtgacatacaggccacctgttgatgacacttgctataaaatatatagtagaaagaatttaagggctttatagctcaggaataacttagtggcttcttacccaatttttaaaaaggttcaagctatgcttttgaggcctggatcaacaggacccatgtctctaatcattgctccatttacttagaaccaagatccagaacaagttacccatcataccgcagcccaggaacgcttgggagtcactttcccctttgtgacctggaataagatcggaggggaaacggtgtgctctgggaaggctccaacctctttcctctccttcctttctttacagagtgatgtcatccggaaaccgcaaggccaagtggaactaaactcccgttgccagattgttcgaggggaaggtgcacagacattccaggtgaacatggtcctggcagttggtgttttagatagaagaggtgctgggtttggatatggctccgatgaaaacaaagatggggcaagatgagcgtgtgtggaagacatgacactgacatttgcatcgctcctcatttgtgggtttgaggaaaaagaggaggcaggatgtgagatggagtga

SEQ ID NO: 26669 - DNA, 1282 bp, Bovine  19866880494408
  misc_feature (1)..(1): n is a, c, g, or t
naagcgtctgtctacaatgcgggagacccaggttcgatccctgggtcgggaagatcccctggagaaggaaatggcaacccactccagtactattgcctggaaaatcccatggacagaggagcctggtaggctacagtccatggggtcgcaaagagtcggacacgactgagcgacttcacttttccatatgtgaagaagtatgggataagaacagaagaaaactaaaagaggtaataatcagagctagcatcactggattggcatgtatgagcaggccctaagacgtgcagggaaactagaggcaggaatgcagaggcaggatgtatgaatcaaggtgatctgggtagtaaccaggtaaattcacaactgatactcgttatcttctccaggaaacacagccaaaagtcattagctatacagataaaaggccagaatcaaaagctttaaccttttcaacttcctttatttctctaattcaaatattcctgtgctaaagacaggaatcttggctgaaacacctacatgaacaaataaaaaggaaaaaaaaaaagtttttatataaacatcagtaatttagccacagtgaaaccaaaactgtgcaaataataaactaaatcatagttttgatactataaataatcctaaaatacaaacctaaaaagaatttgagatggctgcaatgaaaattttaacgttctttttatattctaaccatgaccaaataccatacctatagctttggggtaagtaacaaagaggaggaaaaggcaatggcaacccactccagtactattgcctggaaaatcccatggacagaggagtaggctggtaggctgcagtccatgacgtcgctaagagtcggacatgactgagtgacttcatttttgcttttcactttcatgcattggagaaggaaatggcaacccactccagtgttcttgcctggagaatcccagggacagaggagcctggtgggctgctgtctatggcgtcgcacagagtcggatacaactgaagcgacttagcagcagcagcaacaaagaggagatctaaccagtccattctaaaggagatcagccctgggtgttctttggaaggaatgatgctaaagctgaaactccagtactttggccacctcatgtgaagagttgactcattggaaaagactctgatgctgggagggattgggggcaggaggagaaggggacgacagaggatgagatggctggatagcatcaccgactcaatggacatgagtttgagtgaaccccaggagttggtg

SEQ ID NO: 26670 - DNA, 884 bp, Bovine  19866880499792
  misc_feature (1)..(1): n is a, c, g, or t
ntcacaggtggctcattccaaggataaaatggattgacaggttgctcacaggtccggccatctcactttctcttccctactcctctttctctttccaatgacactcctcagttcaacaggcgtcatcactgtcgccgctgtggccggctggtgtgcagttcctgctccaccaagaaaatggtagtggaaggctgccgagagaaccccacccgcgtgtgtgaccagtgctacagctacttcaaccaagagtgagtgtcccacagcggggccactgcagctggtgaccagtgccccctcccccggggtcctgacatacctacaagtctcatgagggagagcatctcaaatctgagcagttacagaaggttttctttccacattcacactgaaatgccattaagcctgcggtgtaatggtcaaccttggtcggagagacatcagagagaggatgtaggggtgcgtagaagcagagagcaagtgcgtgcatgatgttctgagatcagggccctgggttctttggcctgtcccctaactgaggccactgatctttgcttgccaacaccctcacctcttttccagccactctcgcttcagtcagtctcagctggactcaaaacgacacgctcacctactgaatgttggggcctcacttacatcagctctcatcaaccttatcattctggcttgttatccatgactcagagtccccacacactttcctacacacagttcacccagggacaaatctcagaaactgctcacgccactggcaaaacaggtcaagggatttttgccggctcagtgtcgctcagttttttccactacttctagcggcaaaagagggtaaaactaagtgcgtggggcatatagccaaagcagctatc

SEQ ID NO: 26671 - DNA, 2689 bp, Bovine  19866880540903
  misc_feature (1)..(1): n is a, c, g, or t
ntccagcttgagtacaggaggtggtcctgctttaggataagtaactagaagctgggagtgcctttcaatgtcttctcaacttcttgcctttctctataaaggtagaaatttttctgaagctcctatactctttaacacaaagaatcaaaatcagacattttctcctgctccacaaggaacttaccactgttttggaaaatctcactctcttgctagttccatgacttggttatggtttcactcatactacctacaccgacttaccccccaaattcagcctcagtgtcaatacttcccttctgcccatggttctgctgctgttagcatttacctaaagggttttttctcaaatcaactccttgctaacaagacagaactcccaaataatggctgactcccataaagggcaagcagagccaaaatcaagtacaaagccaaagcagtgaaaagttttctaattaagtttttacaaatttatttccaggaatatcaagctctgttctcatgtgctgtcttctctaaggaatgtaaactggcatgaaaagtccttccggtggaccagttttccactgctccgaatcagagcagcatatatacttccaacaatggatttttttctgggatacttaactatgtgatattctttatttcttctgttctatcagtacctttgcaagtcatggtttaaagctttgacattctcagatgaaagattagaattaagagaaattaattgtgactaatttttgaaacttactttctggacattgagcggagaatcttccgacttttgctcaagttttcacttgtatttaccagctgagaagagaaaatagcaattatttccctcttctcacagaagtacacactgtagaactgaacattagtaaactggacggggttaaaggctttatgttgaaaaactcccagaaatcaaatcaatttaaatgatggcctctgtaagtagaagaaactggaaaggacaagatactttaatacttgtcaataggcctaggaatgattgtatcccaaggctgctgtgaggagacctctggggactgagctaatccttcactgtggctacacaacacaaagtcttcgagtgtaccttgccagtaactgaagtaactctgagcaacttaagatgtgaatttcatcagcccaaactccaggacagcctcctgagctaatgtttgtttttgtagcctggtggattaccacttttgagatctggttctttttccttttttctttaccctttaagagatacttatattgaattatgaaaggaattaatctttttttaaaagccttttttccccccttttggttgcctgttattaacctatatagctggaggatatttcaacagatgccacctgccatctgttcctgttcaccagtggccttggtaagttgatctctcagctcattcctcagctttaaaattcaactaatccatctagtaagttcaaaagtaaaaacaaaccatgcaatctgcaaacaagctgctttctctgcagtttaccttgaattcagtactttactgtgaattttcactgaggagggtgatacctgacttgattttaagttgtcaaaatcattctgacttgattttaagagtggagaattacggctattaaggtgggaaaataagggctcagtgtggggatttgagatgactttctcgtacctaagtcttgcccatagtatctgtgtttcatttatctacctcatgttcttaatacagcattccactggcagtttttaccattcctttgcagatggtacagaaaggaagaaataagttgtttttcagagccccttagagtgataagtgatagtagattagaggccacagtacagtcatcatttggcctaagtattttgttttctcacagtcatctcccttagtttgtagtagtagtagtgttaattgctcagtcatatttgactctgtgatcccgtggactgtagccagccacgtcctctgtccatgggacttcctaggcaagaatactggagtgggttgctatttcctactccaggggatcttctcgacccagggattgaacctctgtctcctacactgcaggcggattctttaccactgagccatcagggaagcccatgatctcccttaccttaggttaagaagagtccaggattaaacctctataaattgtcagtagtactattttatgacacgtggaaaatagccttggctctaaatgacaggaaagcttagaatcttttaaagtaaatgttgctttcataagaatagcaggtgttctactagatgtgtgagaaacagaaatttagttcataatacaggacctaatataggacctaataaaaggatggtatggctacaatcctatttgacaatcttcactaaatgtagaaactgggttttctgcaatcgcagtccccctgcccagtgacctctaaatcttacaagtaaaattacttccaagggatatgttttagtcaagcaaattacgaacagagaaaagcataagaacctaaaaaatcataccctgaatttggaactgcggttgcttctgacagcagcaaagcatcagggtgtaatgggcccacttactttccccattcttgcccttctatccacccagacttactctactcttggtacgttccaactggtcacgttgctcccccagctctt

SEQ ID NO: 26672 - DNA, 1074 bp, Bovine  19866880569977
  misc_feature (1)..(1): n is a, c, g, or t
ncaggcctgcccaaatttattagtcatggcagtaaataggaatggtctaaggaagtatactttttactatgggttagattttcggtttgcccttttttctgcatttttactttccctactcctaggaattttctttttaatatccaagctgctttcctaagggtctagactatgctaactttcataaggatatttgcaagctttcccacattctacccttggagcttttgctcatttagctccataaaagtggaatgttcttggcacacatctaacatatatcaaaatcctacttgaccttcaaaggaacaatttaaatatcatttcctcactcaagaactctatgtatttaataattcctgtccctgtatcctccatttatcctaaggagaaactaccacttccaagcctctactacatgctagatgctctacaaaagagtttcattttaatcttctcaatggttctacaaagtactattctctctattctgcagaatgggaaactaaagctataagtcatggatacgagattcaaatgaagcctatctgacttcaaagtccatggtctttacataattttaagctgcttctattatagctgttaccatagactgagctatgatgagttgtttatatgtcagtccaccctcagaggttatgagatctttgaaggcaaagactctgtcctgtctaggtttgaatacgcctgtcctagtatattgtcgattatgtagtacataaagcactctagtagtgctagatatgatatgaggaaattaatacaatgttcattttcctcatataattagctattgtaaggcctcatgatcataaaaaattaagtacctgggaccagagttgtcctcctattataagcagtgagaaccctggataaaatatacaaaagaattattgttacaccttggacaaatgtcaggataagactgtgtcccctaagtgaagggaaatgaataaggtaagcccccaaattacacaggatgtcttgtctgaaagcattttctggaatgcaacacaggggagtggtaacccaatcagagtacagatgtcttat

SEQ ID NO: 26673 - DNA, 1806 bp, Bovine  19866880580554
  misc_feature (1)..(1): n is a, c, g, or t
ncctgcgtctccacaccctgtaagggtggggttaccaggactctgtactgctgactcacttggagatattcgagaaggtatgtctatttgtaaacttgcactggctaccattttggatgagggcagcagactaaaattaaagtaaaactcaagtttctttaattttatatgaaatttgctatgaatcagtttttccctcagaaaaacttcatgggacattcagataaaaaaagagaaggtcaaagagtcatggtgaaatggagttttgacttggcttaagaatcgctccaaggaaatcacacacttcacctttgcctcctgtgagaggagagcagaagacgtcagaggaagaaaggagagcatactctctcctcccgtaagatgcttggggccaaacttaggatctgtgtcttagggtgcctcctgggctttgtgatgacaactcagagtggatgcgcagttgggttagcagcaggacatagtccagggcaggtgggaagtgtgtggaaacagagagaagttaagcaatttgcccaaggtcacaccacgcataccaaacatcttgttccagagcccacattctcagctattatttagttctgctgtatgttctgggagaagggatgaagtgtgtcattgccagtgacaagggcaatctgggatccaggttaagacttttacatgctcgtccaaacatgatttgtgtagagagaatttgccatttgtggttttttttttttttggtcgtgccacacaactcacaggatcctagttccctgaacaaggattgaacctgggtcctcggcagtgaaagtgcagagtcccaaccactggaccgccagggaaatccctagaatttgccatttggacttgactctgcctgagatgatcctacagctgaaccctggggtagcgttaaggggggttattgctcccggaagctgggcaggccaagccaggggggcaaggcaggcactgcatgcgaggtgtctggggtcccaccgtgtgtagcaggtgcagcagggcctcccgcaggcagctgtgcctcacgtagaagctgatgatggccaggtgggtgctgtagctgtgcaggtagaagaggcattcttggtagtaggtgttgttcaggatcttcccttcaggaatcacttccagagagaggctctgggtccggagggttgcttccagctctttcaaggtggccaagaagtcatcatcttgctgccaagagaggacagagagggaacaagggacccagagagttctcagcagcctctggaaacgctgctttcaaaaaacacttaacaatatggaaaaatgctctcttgtatagtgttaagggtagaaaacaggcaggatataaaattctacacattataaaccgtatgccatgctgcgctaagtcacttcggtcgtgtctgactctttgtgaccctatggactgtagcccgccagattcctctgtccatgggggattctgtaggcaagaatactggagtggcttgccaggccctcctccaggggatcttcctgacccaggggctgaacccgcatctcctgcattggcaggcaggttctttaccactggcaccacctgtggaaccctatatactgtacagcagcaatttaattcagaaacataacgaagaaaagtcgccaaaatccaaatacggcttaagtctggatatgggattatatgtgattttcatgtctttaaaataattctttttgttgttggaaatttgactgtttatgacttatctaatcacacagatggtgagggacagggaagccggcatgcagcag

SEQ ID NO: 26674 - DNA, 812 bp, Bovine  19866880603473
  misc_feature (1)..(1): n is a, c, g, or t
naatggagggattcctggatttttttttttttcctggcagtaaaatgaattaagcagcaagctttgcctacatttctttcttcattaagttaatggacacgtttctaagaagttatgtaaggaaaacagatgatgttaaagagagaaacagagacaagagactggtaaacagtcaggcattagtagatcctgctgacacattttttatagcaaacacaaagaatgtgttatgaatgcagtgatagaatagaaagcagaaccaggaaagagatggcaataaatggtaataaaatccaagtgattcatatgtttaaatcaaagaaagaagaaggatggtagtgcccaaaatgtgaaagggtaataaaatggaagtagagacatactggtgaagaccaagagattagaaatttgaggaactcttcttacatcaatacaacattacatgttaaacaacaaacaaagagcatgcaactatacttctcaggtgcagtatctctagtaactttagggaaataaaagccagataagattagtgtagcatctttaaaaaaaaaaaatgtaaacttcagaattcacatccgctataaaaggattggaagaatttgaaaagatgaggaacagtggcaaatgatagaaatcttaagcagaaaaagtgattttaaatggtatggccaggttttcaaaaaggaaagtactctggttctctctgccctgagagttgggagaccaacatggcctaaagaagaatagacccacctcatgtttgccatatactgagctggatgctttacgttcacttctcatttaagcct

SEQ ID NO: 26675 - DNA, 615 bp, Bovine  19866880606346
  misc_feature (1)..(1): n is a, c, g, or t
ntcctaaaggaaatcaccctgaatatttattggaaggactgatgctgaagctgaagctccagtactttgaccacctggtgtgaagagctgactcattgaaaaagaccctgatgctgggaaaggttgaaggcaaaaggaaaagagggctgtgaaggatgagatggtgagatagcatcaccgactcaacagacatgaatttgagcaaagtctgggagatagtgaaggacagggaagcctggcgtgctgcagtccatggggttgcaaagcgtcagacacaactgagtgacggaacaacaaccagggctgccatggacatctttaccctgatattcttgagcctcttgcaaggagtagtttaagccggcctgtgtgtagcgtctgcagaattcacatgtgttgccttgatgccatgttcatagcagggacgccgcagttatatctcgttttctctctggctgagcagatgcaggagctggagcagaggctgctggacgcagagcagagagcagagaacgcggagacccaggtaatggggaggagacggtgggagtgtgcagggagaatgacctttcctgacccttcccatggacactcatggacacatcacaccaatgt

SEQ ID NO: 26676 - DNA, 3321 bp, Bovine  19866880694976
  misc_feature (1)..(1): n is a, c, g, or t
nattatcttggtcatgaagatcttttttgcatagcttttctgtgtattcttgccacctcttcataatatcttctgcttctgttaggtccataccatttctgtcctttattgtgcccatccttgcatgaaatgttcccttggtatctttaattttcttgaagagatctctgccgctaagttacttcagttgtgtctgactctgtgcaaccccatagacggcagcccaccaggctcccccgtccctgggattctccaggcaagaacactggagtgggttgccatttccttctccaatgcatgaaagtgaaaagtgaaagtgaagtcgctctgtcgtgcctgactcttagcgaccccatggactgcagcctaccaggctcttccatccatggaattttccaggcaagagtactggagtggattgccattgccttctccgaagagatctctagtctttcccattctgttgttttcctctatttctttacattgattgccaaagaaggctttcttatctctccttgctattctttggaactctgctatcaaatgggtgtatctttcgttttctctgtttcctttcgcttctcttttcacagctattcgtaaggcctcctgagacaaccattttgtctttttgcatttattttattggggatggtcttgatccctatctcctatacaatatcatgaacctctttccatagtttttcaggtactctatcagatctaatctcttgaatctatttgtcacttccactgtataaacataagggatttgatttaggtcatacctggatcacatcccaagacccaccacagaactctgtccaatccaggttgttgggttcataacactctcctttcttctaaatgtctttctttgcttgtataacttccacttaatctttaaaactcaggtagaatgtcatctcctcaatgaattttctcaaaaagtccaagaataggatatcttttgtttttccaaagaaatcttctcatgtaataacagcattcatcaccgcttaaaaatcacttatttgcacatctgctttgctactggactataaattccttgaggttatatcttttttttttttttaactgttttactaagaagtataaaatgtacatagtaaaggttatcaaattttcagttcaatgaattatcacccagtgtataactacctcagaaagatcaaattaaaatatgatcttgcaatttgcatactcagtaactggtatataataaacagtacgtatacaataaaagtaacaaatgacattaatcaggcttggagtatattaatcattgcaagaaatcattccactgctgtgatccaaaatttagatttttagatacaaagatcacatatcattgacaatgggaaaatgctgctgctgctgctgctgctaagtcgcttcagtcgtgtccaactctgtgcgaccccatagacggcagcccaccaggctcccccatccctgggattctccaggcaagaacactggagtgggttgccatttccttctccaatgtataaaagtggaaagtgaaagtgaagtcgctcagtcgtgttctgattcttagcaaccccatggattgcagcctaccaggttcctccatccatgggatttcccaggcaagagtactggagtggggtgccattgccttctccataccagtcataggctctaacatatatatgatcttgggagttaatgaatctctctagccccaattttatcatgtctaaaatggaaataaaatgatcatttacttttagagtaactgtaaggatcagagataaatgctcatagtaactagcataatgcctaacacacagtaaaaactcagcaaatagcaataataaaatcaattggcatactggcatttccattaaaagtactcctttcagagctaagacctttctgactgaacacagacctttggcaattctcacagtacagcacaccagataccattcatcctcaattaattacagaaatgatcatctaatttgtgaactgaattatccaatttatcctgacagaggctcattaaggcctctagaaaaatggacaaagaagtataatttaataatctgagttgcttctttggaatgctgcatctaattctgcacaaatgtagaagaaaaaaattctcaaataaaattcccagatagacagtggatttaatttactcatgctatctttaaccttcatacagacagataatttataatttacagcaggcggagaaaatttttttctccattcatgtaactgaaacacacatctggtctaaaaggcagacgtttgcaagacgtactccccagacgttaatgggttaatagttctggaacagtagagcagtacaaaacgagctgaaataggaatgggaatgaggagagaatgggaaggggtggtcctaggtaaggtaaaatgcagctctcaaagctggctttcagccagcacagctaagctcacatctcccaactttccaaaaataacattagggtctttttgaccacaagtagtaaggactacagttttaggtttcatctaaaaataactattaaaaacaaccaaaaaaaccatacatcagtcaaagtgtgatgagaattttttaaactctgtaccatgacccaataaatgctgtttctataacaaccagaaatagtgcctatccccaactccattatttctaaatggcatgcttggaacaggttgtaacttcttagagaaaaaactctagaatatcatagtaggatgctttcatttgttaagtaaacaaaaactcatttcaaagtgggttaaaataacacttcttcagtttttgtgtgtacatgaatcatccggacagcctattaaaatggagattctgattcagcaggactacagtaggccctgaaatttctttgttcaaacaagctcacaggtgatgctaatgctatcagttcacagaccaccatttccataccagcgacttaaaccacgaagaaatatatgtattaatacttctggaaacccagagataagactgttcaacaatgtgatcaagaacccatagctcgtctatctctctgagataccatccaaaatgtcacttcatcctaaggttggctccacctttttgggtacagtgtggatgacaatagtaatcagagctattaatacatgatttccttgattatttcccacagaagatacagagtggcttcccatggatctcttataagagcaaggaatactagccccaaaacttaaaacactttcctatttgccaggattaggtcatctgttcacacctgaaccatcaagcag

SEQ ID NO: 26677 - DNA, 1324 bp, Bovine  19866880883107
  misc_feature (1)..(1): n is a, c, g, or t
nattggaatatgtagtattgtattataattaattttccctttagttttctttcgtttaggcatattgatttttaaatttatgtatacaggtatgtcatattatctataaattttaattggggtaatcgggaggcattacaaataattgttctaataaaaagggacaccatcctagattgtgcagtgcaagggaaattgcagtgctgagggaactggaggtgagtagaatcagggtggcttcatgtgatcaaccccagacaggaagttcaatggtctcttacagatactgacatgaagttcctgaatgatgggtacacggtgtgatcaaaccttggggccctgaagacaactatacaattgggggcctttgggaaatttcatctccacaaataatttaaattatactatactgcagaattttccagcacgtaataataggtagaagaccgcatgtcatctgcagggcccagggaaatgacaaacagttgaatgtctggaggcagaggtgtgtttagatgaagtcaaagaacgaggtgccaggcttggtctggtgaatatcttcctaatggatgagaagatgagtaaacagtaggtaagaggatgcttaaggatatttatggaaatgctatatcacgaggaatcgtgaacagaaatagggatagagaaatgatctcggagcacctccaatgggttagaaaaacaggccagaaatacttacagctcagaatataagaggggctggttacttaatggtaggggaaaggtgacctcaactcccataggcatgcccatcacttccaaataggtacgaagcgttcaaaaaaagtgtctttctgtgtatacctatggctgattcatgttgatgtatggcagaaaccaacacaatattgtaaagcaatcatccttcaattaaaaataaataaaattctttacaagtgtccttcaatcaagagatagctaactgattcatgtatcctccccatctgaggtcacctggggatgggaaaaaaggaaagtcacagcctgctggcttggatactaatggagggcctggaaacagggctttctgaactttccgcaaaccctcacaactctattatctctcctctcgattccctcatccaaaaatgaagaaaacacaataaaacactttagattccatcaccgtacattttcctactgttctgctgttcttccaggagcattttgtgtaatatatatattttaattttaaaatggtcaggttgaagcagctatagggattaacaagaagagtgattctcccttctcaaaagggggtagaggaacttggctgacctgggct

SEQ ID NO: 26678 - DNA, 1282 bp, Bovine  19866880889775
  misc_feature (1)..(1): n is a, c, g, or t
nattgtacctaaatatagtataactatttgaatagcatctaccatataaagaacaaatttgattataggctttcgctttatttttgagcaagtgcatttttatgctgttgtatgcttcaaaagtctgattttagaatattaacaaatagaatgcttccgaagcagaaaatgtggaggaaatgatcagctttcagacttattgccatggttactgtatgtaaataattttttttctccagataaatctaaggctaatattgttaactagaaaagtaagaattttaaaatgaggaaataaaaaatgcattaaaaaaaaaattgacttgaattttttttttttttagggtgctacagttcgtaatgaaatggattctgtcattattagtcggatagttaaagggggtgctgcagaaaaaagtggtctgttacatgaaggagatgaagttctggaaattaatggcattgaaatccggggaaaagatgtcaatgaggtttttgacttgttggtaagttgacatgggtagaagaataattgatacagtctcaaaaattgtttcctttagtagacttcagaataaaatattttaaaagcattttaaaaataacttaagatatctatataatttctagcataattttcacatataattatttccataatatttactgctgctaagtcgcttcagtcatgtccgagtctgtgcgactcaagagatgacagcccaccaggctcctctgtccctgggattctccaggcaagaacactggagtgggttgccatttccttctccaatgcatgaaagtgaaaagtgaaagtgaagtcgctcaggcgtgtccgactcttagcaaccccatggactgcagcctaccaggctcctccgcccgtgggattttccaggcaagagtactggagtggggtgccattgccttctccgataatatttactagtagcattttattcttacgaggacactactaattttatttatactgttaggtacattttatttgcctctgaaatcactaataataactcactaaatcattcaaaatatatgtattaagtgcctcctatgtgctagctgctagggaaacagtaacaaaatgaagttcataccctcatgacttttttgttcattttctttattagtctacaattgattgttgtttttttttaacagtattagagtaataacaagggtagtagctctacactgttcactagtaagtagccattagctacatgtgctagttatttctatttaaattaagtaaaattta

SEQ ID NO: 26679 - DNA, 931 bp, Bovine  19866880897727
  misc_feature (1)..(1): n is a, c, g, or t
naacaagtgaaatacaatctgcctttgttaattcttcacaggtgattgagtgaggcacgtggaccagagctcaagtattgaacctttcctctccggtcctgttgactgcatggcaggaagcgagagatcccttacctcagctgattgggacacaggaccagcgcccaaagtatatcttccaccttctttgggatatccccttgtgcctcgtgtagctgaggtacgcatgcctttgccagttcccattctcctctccgaaggcactcacagaaaaatcctaaaagctgcttctgggaagcagcttcttcttttccaaatggatggtgcattttccccagcacagagtgcagggagatataaacagatgaattacacaaaacacatcggcttttttctcatttgtggactatctcctagaaacaatacacatccgagagagaagaaaaggaaggaataagacaaactagtaactattactcgcacgaggaaaggcaggacttacttttctaatttgacatgttaccgtctctctttttgagaagttccacctttccacaaggggtggatcccatctttctaggcgcatccaatatttgattaatattaatcgtcatattagcccgcgacgcagacccaaaactccacttccttatttcctcctgaactttatgcccaatccggccccgaatctccaggtggtcgcctccctaaagatgagaaattcagcaggaacctccctagtttgagccctcttttaaggcagagtactgatgatcaggagaggaatcggggtcagaactggagggcggtggggactggggcgcagggatgctttctaccgggatcgtggagagtgctcctgccttcttggggcgccttacactcaccagctcccggtgcccaaatctgtacatcttccagcgaagccatg

SEQ ID NO: 26680 - DNA, 1541 bp, Bovine  19866880916294
  misc_feature (1)..(1): n is a, c, g, or t
ncagcttttttttcttatttttgctgttatttgttacttatccccaataagcactaataaggcaggaattgtcatttcttcattctcatcttcctgtatttttctgttctttggtcctattcagattttcctttattccctagatcttcagttcttattgggagtttccattgcttctcttttctttatccttcttttgtgtctttcgttctcttctgccctgtatgtttttatcttcaaggtaaaatgccaagaacactgtttaaatgaagagaaggttttttaaatcttgcttaaccctggtaaaagagtaaaaatacaaaagctatgagaccattacccaaatctttcaagtcccaccaagtccaaattggagaagcacgtctctaggaaatttccattttgtttgttcccctaggctgttataaaatattgtaaaataagtacgtgagtagatcttattgggatgatgttagaatgaaatagccaatgatattaccttccctgggtcagtttttgtgtgtaattaacatgaaacctttcttaatacactttctcttctttgaggccttttatttttaggagattagaaaaaaaaaattggcagcagtgagtaggagatgggtaggattgaaggataattgttaaaagataacagagcaaaagaattactaaaatctccatcctggttgtatgctctcatgttcgggggtgtgtgtgtgtgtgtgttttgtgtctgactctgcaaccccatggactgcagcccaccaggctcctttgtccatggagttttccaggcaagaatactggagcagattgccatttccacatccagagaatcttcccagtccagggatcgagcccccatctctcgtggaatagtagtcctaatgtcttatatttgatccatgtaagaactctctacaataaaaaggagagatactggtatctcccttttctaaatgaggaaacatattcagagaggttggtttgtcccagaattgacttgctctggatcttaggctataaatgctacactgtttgtgtgtgttcacccacttgagttcattgttatggaaaaggaaataattatgggaaaaaaagttttcatatggtaatcttttgttgttaaggagttattctaatcaaagtaaccaaaggtttgtttttatatgctgtcttctaaaatgtaaaaatatcttcttaaaaaaaatgtatatctcttatctttgaattgttgtgctcttcatttttttttctaggtttacagcattcttcgtcatgttgctgaggtcttagaatataccaaggatgagcagctggaaagcctattccagaggactgcctgggtcttcgatgacaagtacaagagacccggatatggtgcctatgatgcatttaagcacgcagtctcgtaagaactcctccttagctctgcttttcccttggtattacagctgctaggcctagcacacaggttgagagcctaacatttagtaacacaacatccatgtagtaagtcctgtcaaatttagattaaa

SEQ ID NO: 26681 - DNA, 3378 bp, Bovine  19866880945148
  misc_feature (1)..(1): n is a, c, g, or t
nactccatgtgtcaggaattttccaatcactagaccagtaataactgcttcaacagccagggagtgaatcctcctggaaagggcagagggtaaattgggcaagtaataagtttttagggactctgtttcttcttctgtgatatgggaagctgtctatggggtcacacagagtcggacacgactgaagcgacttagcagcagcagcagcagcagcagcagtaatagttcagagttattatgaatattgcattatctgatctatataatgtgcctgttatacatgtgttcaacaaattattattataaaactctacctatcatagggaaatgttgtatcatatatgtaaataacaatttattaaaataggtatgttataattagcgagtctgagcatcatttcttcaatattctcctaaatttagcattaaaatatgaatggggtgcattgtctggaaatgaattcctgaaagttatttataccatgacagtgattcatgtatttcccttttctttatggctttcatctgtacttagctgcagtgtatcttgtccagaaatttttgtgcaagttgaacttaacttaggaagacatctggagcatccttgggtttggcccctggttttcatttagataaacactagggtataaatctagaatataagctatatggaatgttatattcatatttctgagaaacttgaaatatttactgttatcctgaaactcagagaactgtgtgatgaacagctttgatgtgaaattatacgtacctgtttggagaataggctgaagttatgttcaacataaaggggtccaagatcattatgttaaaaggaagtaaatctatgtttttattgttgttcttgttgaaccctatggcatggagaggaggaatgagttaggaaacaaaagctaagactgaattagcaaaggccagaagcaacaaaagaaggtttggaagcttcagaaggagtgattcaggggaatttcagttgagggcctcttgggttgcattgatgtcgttggctgactggaatgcacttaagtttgaagtggatggaaggacccttgagaaactagacagaaagaattttgcttctttaataaagagagggcttgggataaggagctttggcttagattttagagaaattaagtgcaactagaaagaaacactatttactttcctccatatggaacccttcattgcttaggtccttacaaatccatgtaatttggtctgtaactatgattagatacatagaagtgtagatggtttttttaaattgctttttcagtaaggagaaagtgaaagtgcaggagtggtagagagcagaatggatattccttgtgcatgttcctgtccagtgtcatatgttaggttaaaagccttagcctggcagtttcttaaaagtagacaagagtttggaggaatattataaccgaatatgagcaggaagtagaaggtgctattttgctctagtttgggttcatccagatgggatcaaaccagaggaatttggcaagcattgggactcaccacttagaaccgcactgaaatagttgtggtagcaaaagaatttctccaggagacttattccacttgaggcataacagccagagattcctgacccttaaggggagcgtgccaaagttgataaattttagtacaatcaactgaagtctataaacgcagaaatagttcaattagatgataccgggcctatattgtttccttgattttcacacaaaggacatatgatgagaaaaatatttctgtaatccactgtttagaattagctcctccctaatattatgtcctttccttgggatttattatattgcaatttaataaatgagacaagtctaaaagaatttaactttaagaatgtgtgtttgacttctgtatttgtgaaattctgacatattaaccttatcgttttttttttttttaagactttctggaagagctctttgtgatctaaaattcaccttcccgtttaattattttctgaggttttttatagtctggcaacatgaactacacttcatcatcattggtgttgcttatcccttgtcacctgacatctatccctgtattgtccaattgtatccccttcaagcgcccggtccactgacttaacatacattaggttttcattaaatatttttttatttagtggtgaatgaggaagtatttctttatatttgaaacaactggctattgtggagaaagcgcaacaggaaggaattactgtgagtaaagagtcaaacgagactaaaaatgcgagtgttaaaaatttttaacagctctattgaatcataatcgacagtaggcagcacatctttaatgcaattcaaaaagatttaacatatgtatacacccatgaagtcatcaccacagtcaggataatgaatgtatccatcatccccaaaagtttctctgtggctgttttaatccatttctctcatccttccccaccttaccctcttcaagcaaaccactcatctgtttttgtcactatagtttgcattttctagagttttatataaacagaatcatttagggtaaactcttttggtctagcttttccactcagcttaattattttgagatttatccatgatgttgcatgtgtcactattttactcattttgagtagtattccattgtattcatataacacaatttacttatccagtcacctagtgatggatgtttggggttcttttccagtttttggatattataattaaagctactatgaacacttggccacaaatcagaggtatgctgttttttgttttgtttttttttcatggataaattcccaggagtataatggttcaatcacaggatgatgtgtgttaagttttataaaaaactgacaaactattccagagtggctatatatacctttttgcatttctaccagcaatgaaatagagttcctgttgcttcacatgcttgccagcatttgataatgtcagagctttgcatcttatccattctaatagatgtaccgtgatatctcattattgtttgaattttcaattccctaatgacatatgaggttgagcatctgctaaataaatacttatttgtcacttgtgtgtcttatttggtaagaggtctagtcaaatcttttacccgtttttaaatcagattgtttaaaggttgtttgagtcccttgtgtgttttggatatgaatcctttatcactaagcattttgtaaggtttttgtctcagtcagacaagccatttcattctcttaacagtgtcttttgctaagcagaaattttcaattttagtgaagtccagcttgacaattttttctttcatggagagcacttttgctgttatatccagaaaact

SEQ ID NO: 26682 - DNA, 677 bp, Bovine  19866880968922
  misc_feature (1)..(1): n is a, c, g, or t
ntgtttatttgttttacctattggatttctgattagggtctgatatagttttagatgctatatactatatacaccttgagaatatggataaatagattagtgacctgtctatggaaattttggcagccatgaaaattccagtatacatatattgaataaatactatattgtccctattggggataattagaagaaaagatggagctggaggttaataataaaaaaggaaggtaatatgaatggtaagtagtaatagtgatttttgaaataaaactttgtgagaaataaagtggataaaggagaataaacccaggtcttaggactgcaagtggatctgtgtgtgagaaaggctgaaggatctggggaagccggagatctggggaagctgaattcagggccctggaaggtggcgacttggggaggagggatatagaactggaactgtaagaggcagaagtggacattcctgagttgtcatgaaatcagaagagcttgaaaaccaagaagaaagatgtagtgcaataggggacgaagacaatcaactaatcacaaaaatgtaaaattataactattataactaagtatgcaaaggagaggtatatgttgtgttggtaccatgtggaagcaatggccaagcttagatctgaaaggaagttttctacttagggtgcaagtca

SEQ ID NO: 26683 - DNA, 1208 bp, Bovine  19866880978265
  misc_feature (1)..(1): n is a, c, g, or t
nagactacaaattaactttccatgccgattacagaagttgacttttaaagcttcaagctatagagacagtatgaaaatcccattagcttaaatgttttatgatttagcttgttgcattctggtcataagaggcagacttttttttaacgataaaaacctatttctatatgcttaacttttcccctgcagtgttcttttcctaaaatgttcaaatgactttcaggtcatcttttccttctgatctcaaagtcaattgtcatgtcatttctctcatataatcttattccaatgttgaacaagtataattaatgaccatttgtcaatctattaaatattttattccaatgttgaacaagtgtaattaatgaccatttgtcaatctattaaatattagtatacagtacagcagctatattgatcacagaattccagtttattacctacatatataagtcatcaaattatactgtgttcatatataaaatgcaaaaaccgtcaaatgtgctgtgtcctctcatgtatgtaaaaacctgcatcttgaagaaacttttaatgatcaacagtttatatatgaatatctgccattcataaaaatataacttatacattctattgtactatgcagatcaggaaaaggaagttaccaaatcagttgtgacaatttaagataaaaattcaaaaactcattatacttttaaaaagatcagcatatgttgtctatgttttagatcagagtctgcaatgaagcctgatccacaaagtttgagctaaaaaattggtgcttctaatggaatgtttttaagaattaaaagacatataaatgaattcaaggctaacagagtagctccagaccaaagtggctccattttttaagaaagtaaagtcattctgatgactaagccagtcttctaaccaaatcctgtcgtcttgcccagtgcacagcacagttccccctcactcccaaattctcatgaaatcatttaaattaactgttaaataacatcaatatttactgcagtgttaaacacggaccattgtgtatatatacacgtttttgtggaaatatgactaggcagaaaagatttggttagatgaaaacagaattaaaaggcttttaccatggataaactagaatgggctctgttgaaaacttccatttaaaatccccatctgaggcaagaacctctaagccaggtacagagagagaa

SEQ ID NO: 26684 - DNA, 1676 bp, Bovine  19866881032376
  misc_feature (1)..(1): n is a, c, g, or t
ntctctctcttttttttttttttggccgtgctgcactgcatgcagggtcctagtgccccaaccaaagatggaacccacaccccatgcattagaagtgggagtcccgaccactggaccacctgggtagtcccaatatgtattcatttttatgtgtgtagttctgtgcatctttatccattcttagattcatgtaactaccactataatcaggcatcaccgcaaaagaattcccccccgtccctgggactacctgtttgtgcattgattccttccttgtcccctggcaaccaatgttctctgtgtgaatgttgaagtccttcttagcagtgctattaacagttagtggtagaggagttaaacttcagtcttttccctcatttttccttactctggcaattatttataagaaagtattgtattacatatagaatggagatttacatgattcttttcttcctttttttttttcctttaaatttggattctagtcaattactgtctaaactactaacttcaaagaaaggcttatgaattcctgtaattctgttttttatgctaagtcgcttcagtcacgtccaactctttgcgaccctatggactgtagcctgccaggttcctctgtccatggaattctccaggcaagaatactggaatgggttgccatttcctactccagggaatcttccaatgcagggactgaacccacctctctaatatatcctgcattagcagacaggttctttaccactagggcaacctgggaagccccaatcctatttttagcatagagttaaatttttatgaactttctggtttctttgattacttgatatcagtttctatttcaagatttcaagttttctgtttcagatagctttgcttttatggcttttgatggaatattattttgttaaaaataagaaagactagataaggagatagagagagaattgagaccttttccctttttttttttaagtgaatgctgctagttctgttctgattctccctttactgatctgtcacatacattcaaaaatttctcattagggcgatgtcttatctgttcaggtgtaaaacagactgagcagtgaaatctaaattttggatcacaaagaagaaaaaataagtagaaactctttgtttagattttttttcttctttttacatttttcagatgtggacaggatatcagtcctcaaagattagcctgggtctggcttcttgtactggaaaaatggttggccctggaaaaggtaaataggtttacatttcaaattttctcctgaggccaggattgaaaagaacttggaaggagttgtgaaatttcccttctgtctgctgcttcctttattttgaggtttgttgtattcctttttcagtattggcagtgaggttggcttgaatatttattgatgtctccttacctaaattcatttattaatttactaacttgcattggcattgagtcaccaacctaccatttgaggtggtaccattgtgttaaaaaccactgtgactcttgtgctggaagagaactttggagaactcggtgaaagtgacaagactgtgaataaagtctaatcctcgtaatactcaaataatggagaatggctgaatcaaaacttggttgttgatacaaaaattgtattttaactagtccagtacagtgaaat

SEQ ID NO: 26685 - DNA, 761 bp, Bovine  19866881103858
  misc_feature (1)..(1): n is a, c, g, or t
nctagtcttgacacagcccaaggtggtgtcagatcaacctttagctctaaactacatggaatgaggcaagatcaagggaatgactagaaagatgctcacaggtcatcatcattttaagatgcccatggagtaagagaatggcagagacactgcagcagtaagcagaatttacttcatctgtcttaccccatgcaccatcaaggcagaatcttcccctcccaaaaggctgactgtgcagtagactttcagaaagcctggcagtgcattagcctccatgcaaaggtgtcaggtaaacataaccccagcaatctactcaggccaacagtgaagtgcacaattgaaaaagttcattctcaaaatcaagggcttcccaggtggctcaaacagtaaagaatctgcctgcaatgcaaatgacctgggttcaatccttgggtcgggaagatcccctggtgaagggaatggcaaaccacttcagtattcttgcctgggaaagcccatggacagaggagcctgaagggctacagttcatggggttgcaaagggtccgacacgactgagtgactaacacacacatgcactgtcaagatcaaactctgctgggattagaagggcattctcaaggatttttactcagatgtcataatagctccgtgttatttttaatgctgttctttggattttgccccacacagaattcccaagtcacaagaggatcatgaacaatgtccagatgtataaaatgcaaaaatacctccctccta

SEQ ID NO: 26686 - DNA, 767 bp, Bovine  19866881113733
  misc_feature (1)..(1): n is a, c, g, or t
naactccaaagggctgttcccgagcattactgggtgaggagacaactctgctcaccttgttgtcgtcactgtgtatcgcctggatcaggccctccagctcctgtgcgggacagagacacagcagttgtgagatggagcatgggagccggggctcaactccgtctcagcccagcccttctgactctggttggggatgcccgcctgacccttccttataaactcaactcctgggaaatcctggtggtccagtggttaggactcggtgctttcactgccgagagcccacgttcagtccctggttggggaaatgagatcctgatagccttgtggtgtggccaaaataaaaaaaaaaaacacctcaactcctgctatcagagcaatagaggaaatctaatgataacactaagcttgggaatctgagaatcaacaccagatcaaaagcttttccttggctttcatgaatgatgtgtctgttcatcccacaaagccatcaggggacagttttgcaggtgacatgccacctgcaggcccacactgacctcgtctacaatccctgggagaaactcaactccgtctgtccgcagacacttccaggtgtcaataacatcagacaacgggatgcttagggggcggcttctggatacgtaccatgaattttctttccagggaagggttgattagcgtaaggccattattatagaggggtcagaaagacagagggatcttgtagagttttgggtacatgatggggaagagaaaaataaaga

SEQ ID NO: 26687 - DNA, 820 bp, Bovine  19866881272578
  misc_feature (1)..(1): n is a, c, g, or t
ncagttccccgtaagtttggatgtgttcctgtgttcctgtgcatttccgcgtacctctgcagaacctaactgtgtagggagttttcacccatttcctccaacagtgatgtccaagaaataggaactttgtttttaccatatcttttgagaattttctactaaagatagtcattcttgagtaccatttttctgagagtatggtactaattactttctataaatgaatttcaattttggcttcttatagtccactgttcagtatggaatcagctcctggtttttttaactgatgcagaagacagagctttagacctaatctctgagcatagactttctgtttaaacattgtatagtacctgatcttgtggaaaaattgagtgataatgttttaaatgaaatgcaaaatgaagtaatttaaagtgtataaaacatactaaatgtaactgttactaagatactaacaccacagttttgtttatttctcaatctagaaataaaaccagtcaatgttaaaacacacgggggtctaacatttccttaattcattattttttaatttgtattacaaaataaaaaaaatttttttgactagcagaattattcctcacccttgctctgatctgtgcttactaattttgcctgattttgtttgcctagatacaactcggaatcggcgagaccatgaagtagctggtagagattaccactttgtttcacggcaggcgtttgaggcagacatagcagccggaaagttcattgagcatgggaattgagaaaaatttgtaggaaccagtatagattctgtacgccaaggtatcaa

SEQ ID NO: 26688 - DNA, 1245 bp, Bovine  19866881274564
  misc_feature (1)..(1): n is a, c, g, or t
nctgatggtgtctctgcccttgatttagttctttatgcttaaagtttttcttgaaggaacttggtaaaataaaacattgattttctctctaaatatataaagacagcaactggatttccagaagctatgataggataaaaattttactccaaagtagttttgactgctttgcttaaatattggatcttcactgctattctatttactcatgaatctgtttttaaaatgcaatcatattaggaagtttcatagtggaataatttaaaagaaaaatctttctcaagtactttcatacccttcagaagttcctgttaatacataatgtatcaatcttttaagtatgaatctttgtatctacttattaaagcagattctataaagccctcctttcagaccttttagtgcagttctagtaaaatagatctacccgaaagcaatgaaaaggaaaatgcttgaatcttagtgatagttttgcaaagagaattcattaacctgaagtactcatgcatgtcatttatttaaaagccatttggttttaactttaagctcacccagtcagcacgtgctttcgtcagacatttagggcctaacagggatggatttatttagtatcacagaaaatttcccagggaacactcttctcatcttagggcacaaagtcagactccgagactcagaaccagaccgttggcaagtaaattacttttcatgtcatgttcctcttacctgcccagtggagatgcacaaactcattatctgcttgtcaatgagagaaaaatatatcctgtcttttttgtgtcagtggttatcaggaagcagtgataactgtggcctgcagtttttatagggaaggccctgtggaagatgggagacatgagcgaggcctgggagagtacataggatgttagtcattctgagaccattttttgaggacttctgatacagggacatttaagatatgttgcctgcttctgttttagattggcacagagaagtcacgaaggcaacaagagaaagggagtaaaagcatagcagccaaaaatctcatagtgtgttttgtattcatgaagcagtggaagatgtgattcaatttaagtttaaaaaaacagccattcatcctaaggagatcattaagaaaggagtataaagtatgtttttatgaatatttttatttgtgctatttataaaaatgaaaagttgaggggaaaagtctcagaaaactattaaataagactataagtagag

SEQ ID NO: 26689 - DNA, 1149 bp, Bovine  19866881317780
  misc_feature (1)..(1): n is a, c, g, or t
ncatcacgaatgttatcaaactatataacaggtgctgcttaaatgtttgttgtaagcagaggaattgaattttcactttgttcactggattttttaatacttcaaaagccataactgttgagaaatacttgtgatatccgtggtgagcggtttatatcctatgcaggccttttgttcagttccacaacaattctgcaaatttatgacccttgccagagaaaaagatcaatacctcagtgatgatggagagaactaagtaaactccctgctgacctaaaagtatcacttgcaaatatgagaacaagatcacacccagttctaaaaacttgaaaggatagacaaaagatcagtgaacagtttacccaaattttgaatctctccgcataaagactcactagaaattgacagtttcatctactcccagttctgtctttgaggtcaaatggttatcaactcataactgaaaattaacaatagtttgagtctcatttaggtattagttgaaaattttaaatggccggaaaaatacaaatatccaaatgatctttcatgttttctagtaaaacaagacaagccagtacttgaggataatgctcaaaaacttagtggaaacccccagacggccttgcctgacctagttaacttccacagtaaaagcactttaaatggttaggaattttaaaaattcaagtgctagtacccttggcaagaactgtcccatgatttgcctcaaagtaatagtcagctacttttcaactcatgatactgatacctaccgtacagagtggggtgtaattgtgccaatttacaatcaagaagccatcaaaccaaatgcagcttaattcagataaaaacctatattgatagcaaaaagcaataaaaaaaaactgaggacacagaccttggtgagatgccaaatggaaaatggtgctttaaaaggcagtctcttacaatgtaaggaatgaagtaaaacctcattagcttggaattcctgatctgaatgatcaggtattctagacaagatcaagaaaagatagttcaaactattgaatgaacttttacttaagcactttggaggtgttcacgccccttaaatgtaagttacatatctattcatgaaggaagtctaagcagttgtacggcagatta

SEQ ID NO: 26690 - DNA, 1262 bp, Bovine  19866881364645
  misc_feature (1)..(1): n is a, c, g, or t
ncagggtggttgtagtcattacataccgaggaggagctattagattaatctaaggaagacaaaaattcaattatgaatgtacctacagaccacataacaattaggatgtttgagaatcgttttgctaatctgctgctttaaaaacaaatcatcccaaaatttactcccaattctgcagcacagcaatttgaggtagtttgttaatgtagcagaagctaattgaggctaactgatactatgatgtaacccagtagtagaagcagtctgctgctgctgctgctgctaagtcgcttcagtcgtgtccgactctgtgcgaccccatagatggcagcccaccaggctcccccatctctgggcttggataatctgtctctaaaataaacaaaaaagattcctatttggttctaaactaaaccgatggaagaaattcttctaagtgattctgattaacagccatccagttaattttattgctaatcaaagagtcaggccaaacctccttaaaactgtgtgtgaatataagagaatatattgtccttttcaagattctatgagcataatgggcactgtggctacttactgtaaaggaggtttagcatagctggttctttggcactaaataccaataggaatctctatccatagtgacagtagcagtagctacaacaaaagcctacacataattttaaacattccctagaagtatcaagaaccacttttagtaacacttgatatgaaatatgaccattaaaaaatctggatttaatttggattaagtggatatttcagtagggagggagaaaacaggctactcactttgatgggcatggtttctgtagaacaattcaaacccgctctcagagcttcttttacggcatcgatgccttcataaccataacaagccacttcaatatctaaaattataaaaattcaaaagcttacttcaaaatatgcaaattttttttaagtttaaaaagaaatcagagatatgacaaatacattagtactcaaatacttatgaaagctttcattaccctttcaactagaaatcaaccccagctattaactttcatatttaaaaatatctgaacatgcagtgatatcatatcttctcaccaacatcaagcccctgaatgatgaaaccataaaaaagagaaatttaacaaacatcttgaatttgggctattttgggttgaaatcataattccaacccctctgggcttcagttccttatttgtgaaatggttaggagtgtgatgaaa

SEQ ID NO: 26691 - DNA, 1191 bp, Bovine  19866881365787
  misc_feature (1)..(1): n is a, c, g, or t
ncaggctcctcccatccatgggattttccaggcaagagtactggagtggggtgccattgccttctcccacctcaccagctggtgaccttcaataagttacttaagtcttccacgaaaaggaggtaatcctgatgcctctatctcagaggggtgttgtaaggattaaatgaaaccatgcctgtgaagctatgattattactgaggaagcaattaagtgttagcagtcagtacattttagccattttgatttccgaggcagcaatactaccctcatcttcacagccatggtcccttcaacatagttccaaggagaccaacccccctcccagatcttttcagtgaaatggtgctttcttctcatggattagtctagagagtgtatttctgtttggagacagtgtacagagtagtcatgtgttcaggttcccttttttccatcctaggcaagaatgaaggcctcacttctggaccagaagcagacgtcataatggtttctagggcttacttgttagctgactgaaaatagcccctattgctggcaaaacaattcacatactgttgagtcattattgttgatatgattgtacacatttatttatcttttgcctcaattctcttgcctttaccacagtgtgaaaatgtattaatgctaaaacatcaagaggcacttttagaaagcaacttttttccctttttttttgaaggaacttaattatatttgtatttatcattttatgcctacatagaccagctcctggcatatcagatgtgttttataaatgcatgttgaatgggatgaatgagaatttagtagctttgtttttaaagcacttggtgtagtgaaacaagcactggacttaagtcagataatctgtgctctcagtttagccaggccaccgatcagctatgtgacttatatcaggtaactacttcctaactggcccgcacatgcagtttgacctttgtaaaatggtgaaatgtaatctaaatgattgctaaggtcccatctgagtctcagcttttgtagctttctgtagactgtggaaataaagtattcctttttttttcttttcagggattcatctggaatcccagaacctagccaatttggaaagaaaaccttgtgttctccaaaaatactacagaaattcttaagttaccaacagaataagttccaaaagtctacttgtt

SEQ ID NO: 26692 - DNA, 1693 bp, Bovine  19866881451933
  misc_feature (1)..(1): n is a, c, g, or t
ncagatggtgagggacagggaagcctggcatgcagcaggtccatgggtcatgaagtgtaggacatgactaggcgactttcttggaaaaggaaccacatacactggaaagaaggaaatccaaactggacagctctgggccagggctgcactgtcattgggacggaagctgatcttcttcccaggccgttactgctctggggcctcgctgttcccctgagcccagcctgtgcctgctgcgctcttaccacagataggagtggcctcgctgtggactccaggtactcaaccacctcctgtaccagtcttgagccatgactcagctgattgaggtcgaaagggggcttcaggcagcggctgaacttctcccgtgcagcagtgaggttcccagctttgaggcaggccatgccccaagcatgccatgccccggtgggatcaaggccagtctttgtggagacctggaggaaaaaccgctccttttagggaagaggacttgcagccaggcctgagggtcccaaagactgacactatcccctggttgtcaatcatctccccctaccccaccccaccccacctgccatgactcccacactggcaaactgtcatgccctagacactctccatggccaaggaaaagaggaggaagtaactcactggggcagacatcagctctgtgcctcacctcaacacccagttggtagtactcagcttccaagagctggttcctgagcctggttaccgcagctggttgcaagatctgatccagagatggcacgtggcgataggcagcagcaactaaaatattcagcacatcgaccttgctgatgtagctaccaggaggaaaagggcatggcagtgaggctccccagggtcctcccagcaacagtgctgcttcaaggttccctatttcatttttaatgtgaactgggatcatgagaattgggaggtacatgggcgaataggtgctggagtcagacgttctgattctcaactttatctcttggtggctctatgatcttaggcaagttagctaacctttctctgcctcaatctactcatctgtgaaatggatataacagggggttttaaggataaaatgaaataactgaaggaaaagacttaggatggtatctggagctttgcagtagattgcagtagttgtagtgttagtcgatcagtggtgtccaactctttgtgaccctatggactgtagcctgccaggtttctgtccatggaattctccaggcaagaatactggagtgggttgctatttccttctccaagggatcttcccaacccagggatcgaacccaggtctcctgcactgcaggcagattctttaccatctgtgccaccagggaagcccccccaaggaagctttcaggaactcattaaatgttagctatcaatacgtggagtagggacgttctggaacactcaggtctatttgaggcaaggcctttacattgaatgttaggagctcacaggctacccattgctttttggttctctggaagcctatttgggagagcgcatacagactgtatcaggggtctgcacctccagtcagtatggaggtcacagcactaccatcctctggagtgctgctgggcaggggcctcctggccttttggattctcgtgccctggacttgacatcctctatcgggtcaaggaggatactgttactaggactg

SEQ ID NO: 26693 - DNA, 839 bp, Bovine  19866881820487
  misc_feature (1)..(1): n is a, c, g, or t
nctctgtccttctcgataagcaacaggaagggatatatggggtaacttctgttgtacaatttgaatcaactatttgaggcacatcccctctgtgcttgggcacccttgtcagaaagctgacttgggagaaggatgtaggaagcaacacatgctacagaattacacggatgctataaaatctgaacacagacttcaagtaggaacctaggcccccgtgtgaggtactctgccatgtattattaatacctcaggtatctgatcaacgacaactagacgtcaccttgactctgaatgcagcagcagctccagttccccaaatgggcaagctgagataggcaaccagtttataaagtcttctagtaagaaccattttcctagaagcattaaattgataaccaccccagtttgctggaccctaccccggctggggctcttctagatcacaattcaagtgagatcaagaccatgatgatcaggacagggcctgattatcctagagaggatggaggagaaagtgaggacacaggccaaggttctgcataggtgtgttcaccttggtgtcaatcgacacatcttagctcttttgtgttaggacattcatctacccaaatgtcagaagattattttctttatgaagtatgccgattagttgccaaggcaacacctgtgcatccactttttcgctatgggaagcattctaggaaatccatgtatgagatccgcctagagatcacccacccagtggcttggaatgcagtgtgaccaaaggcatttccagagagctcacaaagcacaatggccacgcatgggggatttgcggaggattagacaaaccaacg

SEQ ID NO: 26694 - DNA, 1466 bp, Bovine  19866880356757
  misc_feature (1)..(1): n is a, c, g, or t
ncagtgttcacattaaactaatagactttgttatcaggctccaaactgttcctaattctcagtgacttcatagctaccatggaggcagcccaaaggagcttaagtaaacactttaaaattacgtaatgcagttccgaaggaggaacaacccccagccaaactgtgccatatagttttacagatgcaattttgctgtttgccagaatgcttattaacctatctacagaatgacttcatagcaaagataacaagtaaggaagctggaagtgagccagtctgtttctaggcctcttgaatgaaggcagggttgtggaaattatttcaaagtagttatccagagaatgtttttcttaaccgtatagactaagtatttcgaagcattctgaaaagttctatagtaaaaatggcaccttaagcaataaattcaatatgatttccataaataaaatacaagtttttattttacaacataatacaagatgttgctggttgatagtaatattgctctactactacattaagaattgaagactacatgtgtctcttccctcttggacctccctccactctacccctacctccaatcccagccatctaggtcatcacagagcattgttttgtggtcagaatatggcctgtacaatttctcctttcttgtactgtgttgaacttcctttatgcccaagaaataattaattgcatatatatttaatggaaatgtaaaaagaagcagtattctccatttctataatggaaaatcaatttatatacctattaagcttcttaaatgatcataataaaactttcctgtttctaaaaaaaaaaaaatacaatctttttattaagtaaaataatttggatccttttttatgttcttttttcctcacctttctgtgtgttcaaaatataatttatcttaaatgctgccaaagccaataacaaaatatattttcttcaatatcttggcaaggctctataaagaactgtaagtccctaaaatggtaaagttattaatatgagtgtatgagcaaaatgcaactttatctaaattacagaaagagtctttccatcagattggcagagactgaaaataagtgctaataactgttactaagaatgtaatttacacacccatctattactatattacctttctggagtcaaaaatgtctaaatctttgatacagtagtttcacttacaggaaccaatcctgaaaaaacaaaaaatcatatgaaatcgaagatttatatatgcttatgacagtatctctagatgggagaccatctgaatattcaatagtaaaggagtgataaaccaaggtacatcaatctaatggcatttttgtaaccactaaaatactgaataccacagaaaaatgctaatgtttaatttaatgtacagataaatcttttaggttataaaactatttctcctcaagggttgggggaaaatataccaaagtata

SEQ ID NO: 26695 - DNA, 3133 bp, Bovine  19866880366357
  misc_feature (1)..(1): n is a, c, g, or t
ntctttcttctatctgtatgctttagaatattttctatgcccaggtttatttctctttacttatactatgaaggaccaatgttcaagacatggaagctacccagtagtgcatagcctcacttaagtaagatacaaaagatcctttttgagattagataaaaagactaaaggtactgaattgacaaccaaatgttggtgttgctggaaaaagtggctcccactctgagatttcatttcatggaaaactgagtccccctgacacaaagtgcagtggctcctagaagaaaagactcactggtttgcccctagtcaacaaatgaccgcttcctggacccacaaacaaactggatcagccgggagcaggcagaggcaaacacataggtagaaggaagtcagtacaaatgttttccgtggcaatgtggaagcaaagtggtctcaggtagcacgggacctaagacccgctccagagcctgaagcactgaagtgaaataaacacagatgctggtcgcctgctgtgtattaaggaggattgtttaattttgcattggaatccagagtgctgtaatttctaaggttccacattactgcatggacagtttttcttatttcatattttctttgttcacgtaagcgattttggtggaaggttttttgaatggtctctagtttctaagccagaagcccaagggcatttctttgtcccagagaacagagctccaactcaaagaatttgtacttaggattttcaggcactagttggcagacaggggcttgtgtcaactctccagtctgaattctggatggatctaaggaatcatttaaggtacaaacttaggtgacacctctgggtgagtttctgagaaagtattggggcagaccaacttaatccttggagccatgcaaaacatttgcaaaattcaagcacttttgtgaaacacaaatacgcattatgtagcaaacagaattgggatgggtcttgtggagctaaagacattaccaaaaaaaaaaaaaaaaatccaggattctaatagctagaaacagcttcaggatcggtgagcagcagctgcagtgtttaaacaaacacccagcctctgcacatgcatgcacggcaaggcctgtcagtatcgcttttcaaccacacctgtgctcctaggtggcgaccactgccagcaggctcagctctttaaggaaggacagtcccggattgtttcacagaggtttacagatgggaaaataactacccctcacctcaggccaacactgggaacattctcttgcatttcctttatcatgcattagaagaggcctcacttccccaccctttcccccccgaagacaccagttctgagaacttcaagtcttttgcgataagtctggaacacaaggccattcattggtgttaaagtggatttgctcagtctccatgaaaactgtcaggggcgaggtgggaccctgatggcctggaaccactgaagcagagctgcttctgggatttgaagtaagagccacttgctgaagtgcttgggctaaatctgaaaccacagttcagctgcccatgttctttgacttctggaaactctcttccctcatggctttgccagtaagcccatctattttaccttctctctctgtatgtgctttcttattcccttaatgctgactttccccagttcctaaaatgtagctgtcttcagagccatctccttggctcttatcctttcttcctccacatgttgtctgtgggttatccacattcctgccttcagtcccacacccacacagccagccccctttgggatatcttctcctgggtgtccaggagctcctcaaacttcccttgtcctaactgtgttctctgtcttggttaccaactggcccctgaccctcctgagaagacctatctttcttcacactagccttatcctctctctcttttaatttttctctgttttcagcaccagtgtgcctgctttctcatttggaaaaatctttattaaaaaaaaaaaagatcctgttcatagactaaaagctctgtggaactttacccagtcctcctccctctctgctggaattaattgctgccttcattggtaaaataaacattactgaggacctgctgggcttgaggcacagggcaggcactggggaccctcaggaggctggtgcaggaggcagactgtggtcagctagcatttgaagtggtgcagtaaaggtatgtgctaagtgctgtgggagcacaagggggggcgtcactcgcgctccattttcggaactgcccatggctgggagctgggagcagagtgcagtgaggatagagcattcccaagtgaacagctcggctcgctgggcacttccttcttgactgtctctcctaggctctgacctgtctctctccccccaaactcatccatccgttgtctattactgccactgggaagctctgcagagtgaagacagtttcatctctcccttttcttctttccagatctcagagtcaacttgtgactttaatagttgtaactccttcagtatgacatggtgatgttggcaaaaatagaacctgcaaactaaagcaaatcttaaatggtgcaaactcatggtgaacctccagggtctgccccctttgaaagcttctcattggagatcatcccctgccccgttgcctgtcgtctctttcctgggggctttattgtttgactcacgccattctgattgtgctgtcctgctttttctggtgaaaatgatcatgggggtgctgtctaggtagcatccctacttcatgcttcactgcttaacatatcctatcaaattgttattctgatgagcagagagactaggccccatttgagaactgagacagcaagggaaattaggcatcttggtaactgtcccatcgcatggaatctggcatggagttgatatataggatgaactcaggaatgatgaatttctgagacagaagattgtttagcaatcatctagttcaaaatgggaattaaaatatcagtctctggaatgataagaaattggggaggtgaaatttgtgagatagtgtatcgtgagatgggcttccctggttgctcagtagtaaagaacctgcctgccaatgcagaagatgtgggttggatctctg

SEQ ID NO: 26696 - DNA, 2770 bp, Bovine  19866880462756
  misc_feature (1)..(1): n is a, c, g, or t
ntaaaaacaactcttctatactacttgaaattacagtcttatttccgaaagattgagaattatcttaacttcccaaatactaatttcagatataagacattattttactaatacaaaaaagtaaagatttatgggcttccacctgtagcccaccttgtctgtatacacaatgcccaagcagtacagtttgttgttctttttagttacagtgaaataaaaaaaaaaattggccttgtttagactgggctataaaatataggcattatgggcttagaatatggtcccaaagtgaaataaacactcctatgacaccacagtcaacttttctttcctcagtgtattacctaacttgggttatcaacaaccattaataatttattctagcttaccagcttaaaagtgaaaagcatgaaacataccataaatactttcagaatcaagacagttttccattcagaacacatgtaaataactgaataaaataaaataaaataaaaccagagtaaatagtaaaatacaatgtcttgagaactataagcctctaactgttctatttaagttgttttgggaagaaaatacctttttgtcaaagaatgtattcattttactatatatgggtttcactgatagttgggcccttcccacatcgtctgtaaaagctgggtgggtgcaggctccattggccaccattattacatattgatgctattctgtacaacagctgacaagcagcagcaatctcccagtccctgctccaaactgtgaagagcaagaacaagggctgttggtgatacttattcactgttgctgctactgaagcagcaagctgagaaaagcacatgcaacttagcacacagaaggaaaaactggttcagctcaacctatctagcaggtctgcctgtatcactacatgataatattagtaagaagcaattttttctttaaaaagtgggatggagagagaattaaagacaaaatcggtgttttgattagaaagggaacctgtaatgtatctacatacatcattaatttttttccttaatgacacttcagttcctagtttagatttaactgcttaattatcaaaattctcagaagagtgtgaacaagcttcagggtgaattcataaagaatatctcccctacccgttattctagaatataagaaagtatctaaactttaatcaagagatgaaattatattatgcctataaagagctccagtctcccaggttccacatatctaatcagcatcatatgtttgacatcagatactattagcaagtaagattttaccccagaagcttttacaaaaactccaattattaaaaaaactttccacatgtaattaacctttgaatgtgtaatacaaagctaaaaacttagtaagtacataatatcaattgatgactaacagaaatatttgttctgtcaaattatctttaaacttaaatgtgattctatttacggactcataattttaaatttaaaaaaaaattttattctttaacatcttaagtatttctgattctgaaaaatacttaagtcagaaaaattaggacatttgtaaattttttagatgcaagaatgggctggtaagtttaaatagctagtcaagaaggctaggtgtgagattaaaataaaagtataagataaagtaatagttacaatttggatactttattaaaaacctcaatcttaatttttatcaaaagagaaaaagtaatttttccacttagcagcagctcaatattaataacaaaattaattttaaaaaattctgaggatcacaggataacaaaattattaaatatatttgtttagtatgaaagctttcaataaaaaagaataacagcaatattaacaatttttaaaaattaagacatttagaaacagtaataaattaaaaaaactattacccaatcagtcttagtaactacatttgaatcaggctgcatttttctcttccaagtgactctaaccatgaaaataggaaagtaaaactaagccaaatcacatatgttaatgaaatataaaaagtggtttgtggtgctgagaactgaaattttacttcaaaatgctattaaaaaaaaattaagtccagacattaattaaacagtgctttttgaaaatactcatcagaaaatacaattctgatacattaggtctatatgaagaaaataaacagattaaggatctatttactagtcaaaaaagaaaacatacacacatgtacaaaaactacttcaaataaacattaaaaattttttcattaagaaattctatctactctttaatgaatccttggcaacatggtagacctcaaagaaaatggttacagctgacaaactttttaaaatataagttatccttatataccagcattatacatcagtaacaaataatgaataatttcaagtcccttcatatgtatatacgttaaattgcctctattctagtttatccaaatattcttttcccctaaggataactctttcaataaaactagaacactgacagtataactgtattttatgaaaagctaaggattttccttaaaataaacgttatttaatcctgaaaatgcatttaaccaaaaatataaatatttcacaaataagacaaatcactgaaaaaatataacaggataaatccttttcatcttatcttgttataaagaactacatgttaaggtttagatagataaccaggtttgtaaatttaaaacagccaaaattcttacaaaatgtcctttcaggggtagttaaggg

SEQ ID NO: 26697 - DNA, 1367 bp, Bovine  19866880577304
  misc_feature (1)..(1): n is a, c, g, or t
nagattttatttgtgtttctccctcccagctttttattgctaggctgacaccatgctgtgcctgctaagactggagttggggtggggatgtgggttggggcctaagaatgagcactaatgtaaggccaagctcatgcaaatgtttccacttcagagtgagttattttctactgattgctcatatcagttccttaaattgatgccttctagttgagttgttccacttactcttcagacaagacccccaccctgaattctagccatagaaacagcttaggctcaaagtgaaacccctctccctcatcatagccttctctcccactagaggggttaggtattcaaatctgtcatggtattacactgttcactgatgaatagcagtacatttttccttgtgtgagcatgaaaattctagctatggaggcaccgcatgggtattgcatgtgctagccagagatattctgattttctagaatatttatttccaaaggtaccttgtttataacaggggtattacacgaaatactggattatatgctacaactctaaacacagttattttctgaactgtattttcaaagaaacataattgttgacatgaattttatttttttggctttagattgctggtgatataataagaaaacaaataatataaaacccagagaaatctatataaaatgttaagactatcaactagttcttaagcctgcataaatcttggtccttcatatgacattgttaccaaaaagatatccagagatgtttcatcttaatgttttcacatgtacatcaaaagaatatgaatgcttccaagatgttagtctgtttcattgaatttcacagctttgcatcccatgtcaggatgctgtagcagagttgtgctgatacccggcgcagaatgccagcacatgcatatgctgacacagatgctaaatgaagagtcaagactgtagcactcagatgtatcccaccccagacttttctcatctaaatttaaagcctaggtggcccctgcaggctttccctaaacttgccctctggctatgactcgagactaaccatcttaaatctcagatgaatagcactgtccatattgtagaagcgtggcacttgatacatttcccaggcctgaggctgcagtctttattgccagagtagtaaaccatggggtgtagtcactgtggtcagcaagctgtttgtctgcctaatatctctgtggtcaccattccttcatgattcgtgggctttgaggttctgatggggctgactccaacctctggatccagaagtgggcccacgacccaggcctgggccatcaaagaactccattcacctggctgtagtaatggctcagagggactgag

SEQ ID NO: 26698 - DNA, 1947 bp, Bovine  19866880581002
  misc_feature (1)..(1): n is a, c, g, or t
nctctgggggcattgtgactggaacaccggtggccagaattgattcagtaatgaagtgcagtgattatcagcccagtactggagtcattcagaaaagtgtaggtgaagacaacatgacggggaaaggctggagctgagatatcagtcaagggtggattgaacaccattttcaaagaacttcccagaaaacttcctcaatacaggagtcaggtaatgcctgagcattgtcaagaatgagttgtggaaaaccatgatggagaaggctagatcttgtaggaagagaaaattccatatcatgtgtcctaaactttaggaaatcgcctagacttataagagtaggtggacttcagtcggtaaagccctgatgacccagtcagtaaagaatccgcctgcaatgcgggagacctgggttctatccctgggttcagaagatcccctagaggagggcatggcagcccactccagtattcttgcctggagaatccccaaggacacagacgcctggtgggctgcagtccatggagtcacaaagagttggacatgactgagcgactaaacatgtaagagtagataaatgtgtcatttgtttaggaaatgagttagttgcttgaatctcattatctcttatctgagaaggaaatgtaaggggtgttcagaaagataaaggtccacaaacacaaggaatttttccaatttgctagtatcctatttgtggagttaaattttcttttagcttcatgagttaatgccacaggtttcaaaactgtcttctgcactcaaattttgacttttcttcaaaggactaagaagtcactaatgtcctttaaagacagagaaaacacaccaaacttgagaagacaaggaaatgggaattttcacacttattcacacatatatttgagtcattttccaagtgaacaacacattgatcctactttataatttaataggctttttgtgcctcttctcatctgtaaagtaggaaaaacaatagtacctgctcatgggttgtcattaggattaaatgagtcgatgtatataaagtacttggcatagtggccagcataataaatgacaaataaaggtagctattactcatattccaatgagttctttggtttctataaatcataaaaggtgctccttgaacacacacatgcaagaagtttccaggggtttgctaggtctatgaaatttgatcttccttgccttaccttggcaagaatcttaactagctaaagttattgatccaggtagcaagatccacacctctacataactgtttccactcactgcaaatttccagaaagtaatcgtttcaggctgtaagtgtccatgtttggtctcaacccaggagaaactcacttgcactggaagatgggagcagaatccataccctgcttttgagcaactgggttgaggaacaaatagacttttttttttctatcccaaaataaggagtgtttaaaaattaccaaacattataagtttataagcataaagaaagccctgtatatagtaagtgaccacctactctgaagttcctattatttttaagatttttaaacctcctttgagacaaagtagacccaagttaaaatttggggtatcttttttttttttaatgtccaagtttttcagctaaaatactctacattttaatagtttcttctctgattttcctcttttaaatttcataacatatttcacagttctaaggtgctggtaaaatggtattagaaaaggattttagcatagattaaatgccaagagccatctactctacccaccagacatatgcagccacaagtcctttcttcatgatgccaagacactcagatctagtgtttggaaacatcaatttcccagtcaccagactgaacatgcccctgcagttcatgcccacccagctccaaactcagtgcccaccatgacagatggctgatg

SEQ ID NO: 26699 - DNA, 1714 bp, Bovine  19866880584868
  misc_feature (1)..(1): n is a, c, g, or t
nattgttccattttactggtcaggaaactgggtcataaagaagaaattaacccaggtccctcagggttcattatgttaattaagtggcagtactgaatttcagatcttggtttattggcctgtgctctttctactatccaatagttctctaacttgacataattttttgtttgtttgttttatcggcctatgctctttctactacccaaaagttctctaatttgacataaattttttttttgagagatttgtttaaaaagcaaattctacccaatccaaggattgggttcagcaattaattaaatccaaggatttaattcatcaagagtggagtagggtcaggaatctgtgtttttaaaaagtgccttcactgattctggtgtgcagcttgtttggaaatactggagggaaaaataagaaagaaaatggggtgcaataaggatagatggtgggttccccactttgatagtctggggcaagcccactcaccctcaggctcacagcctctctagatctgaccagtgttctccaactccaaggacagtggtttcttctttgctagaggaacttgtaccaaggcaaggcttctaagcatggagttcaaagctggcgcagaagttccaggttagaaatgtagttcctattgtcttcttccaaaggaaggaccactcacaattgtactctaagcccagaaatgggatcttcttcatctctgggttcttagggtctggcacaagtgtgtatggtgcacagtgggtgctcagtgtacactgggtcaagaagggtggcaggcatgctgagtgtccagtcctcgtgagtagggctaaggggttacatttttcagtatggcctgtttggaggctacactctgtctgaggggccagccctctggcatgtaactgaggagggcatagtgagagtccagatgagccagatttctaaggtacgcagtgatgagggtgtgatagcttgttttccttcatgatgttttataagctggatctcatttacctgtgggaaagtcctgtggagattagatttctaatctagtcagcctgtaattatttctttcctttggacaattactgatatttcaggtggcttcctcccaattcagagtcagcagtgagtaccattgacttgccttctagcatttctcccagatcattagtatgagatgaacaatcaggagattccaagagcctgaagcttaatcaaagagtcatgtcttctggttccaagatagcatcctccatggctctaatttcccatgcctgccaacctcaagaactcaagtgaaagcctttgatgattttcaataatgtgattccatgttttataggatcctatgcctgcctcctggctccagctgtacactaaatttaaagcaagccactcatgcagagctgacgtgagataactcaccaacttgatattcaaaactttatcatttgtacagactccagacttgcctcctagcccatgttgtccagaaaactgaaaacagtccaggcacaaattactgaaggagttggatgaaaggcaacaggaagttgtagtagctacagtggcctggcagggaccccagaggaggctgtagtaatattttagcaaaataggggctccaaagagactggctgtcttcctccctccctttcttccttcctttctctcacaaaaaattcttaaactgcccccctccatattccagccg

SEQ ID NO: 26700 - DNA, 1169 bp, Bovine  19866880585598
  misc_feature (1)..(1): n is a, c, g, or t
ncacacacacacacacacacacacacacacattgtttttaaccccaaagcttttctgaacaaaaacagaagaaaaatgcagaaaatataaagccaagctggagtaggtcctatgcagtgagctctttggggtccctagcagagacatacatcccagtctgttcacagtcatccagagtaagacagctcaacagggacgtgaagacttgagaagatttagtcttctcagcgtcgtcctttcaaagagctatcatcagactccttttgattctaaagagaaaaggataataacactgttcttcttagggagctaattctctctgactgaagtagtcaaaccacatagctctttctgtttatttacagtgttgtaattgtataacaggatagaagtaccaatgcattcaatagatagaatactctttatttaaaatagggaaggatttcctagaggaagcataaaattaagaatgttatgataattttgtaaactatccaggtgtaattaccatccaataaaaataaaatatttcataatactcttagttttcactagatattggtttataagtcatggttctattgtttaccttgtcacaataaagtccttaaaaccaatattctttatttgttgatatgtactaagtggaaatctttataatcctgggattttatgtgcaaaaagctgcccaggtaggccccagctccgggtgtgcagtacgtacaggctgcaggagcatccttgtgatccaggggcctatgttggctggacctttctcaagggacccagaaataacacagctaaaagtggagaaacagaagctaagatctcagctgatatgggccttgcatgaggtcagaggacaagtagtcatcagtaagagaacagtagtgattagaactggaagttgagaaaaagaacaaggctttatgagggctaaatcagctaaaacagttcaaaactaaggctctgaaggacaaagagtgtaagaatattccccatcccctgtttttagtcactggtttaggggatgatttagggggttcccaggtggtgctagtggtgaagaacctgcctgccaatgcaggagacatgagagattcgagttcaattcctgggtcggaaatatccctggagaagggcagggcaacccactccagtattcttgc

SEQ ID NO: 26701 - DNA, 963 bp, Bovine  19866880596090
  misc_feature (1)..(1): n is a, c, g, or t
nttctcctgcaagactatagatggatttcacattatgaaagaagagaggaaagccactccagcacaccgtagaatggccagggcactatttatttattctagaggtggtggcagctggggaggaaggttcaaaagacacaaagttgtgtatgaattatgatgtgatatgttcgcttttagctcaccaccgggcagaccttcaaagtcagtttccagtgggtttttctcaagggcccacaccagcatcttccaaatgtgagtctgaagatgcttcccatcttacatcacttacaaataactgccagagcaacaagaaacaaaaactatacaatttacagtttagcctctttgatgtgatgtgggatggggatcagaaagcaaaggcctctgggttgattgccatagagagcaaactcttatttccttaagagagcaagctgcactagcacattaaaattattagaaagcctttaccagattaaatgaagcttgatttgggtcaaggtgggggaggggaagaggaaagaaactgaacagtgtgcgccaaggatttgctgaacatggtttttttttttttttttttttaatgctgacgggcattaaattaagtaacaaccaaagattacacaagagtaaacactgctgctaacgtttgattaaaagctaactgagggctcgaagtgactccagttaatttatagatcatgccaataacagccccaggggaatggggctgctcagggtagaggagaagttttataggcagaagccacatttttaaatgtcgaaaaggaaaaccaaagctgaaggaatgctttataaacttcagggaaggagagaaagacagagaaagaaagagagaaaagaaaaggggtgtgggagatagaaagggaattgtctctgtgactgctgggcttggggtaataataaaaaaaaagggatgtgtaacatttaaatattctt

SEQ ID NO: 26702 - DNA, 1421 bp, Bovine  19866880648014
  misc_feature (1)..(1): n is a, c, g, or t
ntttgcaaaagatttggtagtaattactgtctgcaactgttggaataagaaaccccaaaacctttcaatttccatcaagtttttcccagagaagtaagtggttattctggtctggtggggtcccaggtagagtctgagtgagattcaaagctgggaatccagcatgtctgacagttcttgtggaagagcctcttctctggttaggattgaggagacatttgagagggtgctgatcctgaagggagaaggagccagacaaatgaatttcacccaagaactgaatctaggttatcaaagaagaggaggggtgagtatgatgtcagtcattcatacccctttttgtccagctcccactggatttataaagagttgcctagagagagttgactgtatgttaaaacagaaagggtacttttactcgatattctgccaaaaataaaaatggagccaggggccctccatcagcagctgggagcaggaaccagtgaaatttgagttattactgttaatttgcccctttaagaacaccctggctagtgaggtttgaagaaatcaagttacacgggggccaggttagcctggagccagctgaaactttatggcgcttcgttagtaaaaagagtccttggcacaaaccaattgtccatcagaaactatcctgaggccagaaactcattttaccttgatcccagaatgtccatcagatggtgtggctcttgcctgggactcatatttttctgggctggtactcagagagattgacttgaggtccttacattttgcaacgagtcatacgtagggccaggtttgctgagacttaatgtggcaatttgttgctaacctgaaggcgttgtgcagatataaaatgattaatctgatgcataaaatgaaagacaggtagcggaggtagggcgggggaagctatttccaatgaacatagctctagttcataagatgaaatctatatttcactcagcagaaggtacaaatctgtattgcattaactctgcaattctaaccaaaacaaagacaggatggcaaatatttaaacagtgattaaaacattgcccaggcaataggaaatgtctccttttgccaactgtttgcttggacggaatgaaatgaggggcacacaaaccttgtcttcctggttgctctcagggacccttctctgtcacaaagtcagcaccctcaatcattgagtccaatggatcccacggaaagaccctatttattgagaaagaattctgacatctgttaaaggctgaaagggtcttcaatatatatttgtcttttaacatattttacttataaaaatggcagggtgtaattagagcagatttctctaccagaagtttgaatgcttaattcaaaacaaacccatattgatttggtagtataattctcccccacctccctca

SEQ ID NO: 26703 - DNA, 1951 bp, Bovine  19866880678624
  misc_feature (1)..(1): n is a, c, g, or t
ngtagagacagggaagaggcacccacatggcagaggcatcagattataccacagcgaggaaacaagtcactcgttaggagccgagtaccgtgctaaatgagggtcaaagattaccaggttcagatgagaaacttggggttgttcccaaagggatcagacccccggaactgttctcacactgcctggctctcaccaaacaccctctacacatacacacacaagagaacaaacaaaaacatccaaaactatcagccctctcattaaccagataggtttgggcactttcacccggctagtgaaaaccttgctttggttctgtgtatcacaacacaaaatgagtaattctggatctcagtgatgaactactacttttgggacttgttgcaacacatcctcatacttcgagagccttaggcctatctttttctcctagttgggatctgtgcctatattcactgacagtcacagggtacaagagtatgactgtgcattcattcacatcaggcaacatgacatttcagaaaatgggggcctagaagggccctcttcctcagtttctatttcaccagacctagatataaaatggataattccatctgaaccagaaagagacactgagaagaaaacccagataatagagtacaaatacctttccatagtcagtcacagtctcacttcacaatactcctcaatttagtgtaaaggaggaaatggccaaaatattcctttatttatttaagcaaacagatactaaaacaatggggggaaagaaatgacccacaaatcacaattattatttaacttttaaaaaataaactaaccagttcatgtagctagaattttaaaaaatatgtccttcaacctccttttatgagataagggcaaatgaatagtatttcaactggcaacaggatattataataggcaactgccagcttataccaactaaatttgtatgtattaagcccagtccccacatttccatgtctgatgctgcacaatagcaactgttgcttataacccattgaaattcacagtaataactgtgatgtgctaaaatggctactaaataaatcaactagattaaatcctattagtatcatcatgctgcttgagagaacccatattttttctcagattttaattgatcataaactggcaagccacatacgataacaaagtcctattagtttaaaatagccccgtcctgaacatttaaaaccacactgacttaacctactacgaatatgacaagtaaaacagaaaagagaccaaaccacactgacaaaccaggaagctctattcactgcactgtctcatcatctaatattacacgctgaaatatttaagaatgtcccgacttttacatctgtccagatctcatatccgtaaatagacataaactattttccaagtgcagaaatcaagctagtttcctttattctagcttcctgagaattctgaccactactccccacctccctcgactactcatacattttcaccacttgagacattgcagggtgagggaaagagaaagaaagagaagtctcatgacttctgaaattggaaagaggaattaagttctaaaaaggagaaagagagtggcagttttgcttaattcaaggattgagtagaatattgttgtttaattatttttcaaaagatacactccagtgtaacagataactgaaataattacttttttatttcaatgacagtacttttcatttctaagatttataatcaattctattttgtatttacctattttttttcatttttgtctggtgtcgattaataatttgttggtgtttaaaaatggggaaaacaagatacactctttttggccatctctttatttgatttataagaaatgaaactgtaatgtaatgaaacttgaccacacaaaaatcactttgcttcacatacctgacaacatcctaccccc

SEQ ID NO: 26704 - DNA, 1983 bp, Bovine  19866880710237
  misc_feature (1)..(1): n is a, c, g, or t
nagaaggaaatggcaacccactccgtgttcttgcctggaagaatcccagggtacggaggagcctggtaggctgccgtgtatggggtcgcacagagtcggacacgactgaagcgactcagcagcagcaacagcaggactttaaattccctaactatctcacaaaaggataagcattgtttttattttaccaatggagaaaattgagattctgagaaaataagtatattttaagtattaatatatacttattagtatacttctttgaacatcaaggacaaagtaaatattccttaaattcacttaactaactggatgttctcatgaaattgtgtggaaagtaaacaactgtatgtgagatcctgatttctataggaagcctaagagatgtcctagttctcaggcagcaaataaatttcaacccatgtgtagtctccagttaattggtagtgactgcctggtacactgagttgcaaaggattctgtgcgtcattatcaatgtctgttctgtctgtgaagggagcagccaaaactctattagtaaaataacataactttgcacacacaagggatttaaaattctgatttactcccagaaaaatctcagagaagattgagaaaaataagtctatggtttgtaaatctttgtgcggacatggatttgaaataacttctttaattcctttataggaatattgccttcaggattccagatgctgagagaagggtttaccattacattattatggtttgaggttgttgtatgaactgctctagagtccatcctttccctatccgtgcatcattaaaatggaacgtaccaagggatcaataaatggaagcctaaatagtgcaggaaaaattgtgtgagcacctttgggaataaagatctttgtacatttttaagctcttttaggaacatttaaattgctaagtgcatctttgtgttccagccaggactaaaaaagcggtgcagaaatcaacaagaaatcagtgtggtctcaataacaaggcagaattcacctccctacactttctctctcaactcatgctccacattcgccacttgctgatttaataaggcatttagaatcatttctttgggaagcttcacatgccctgaagaaagagtctagtgtcaccatgtatctaagcatttggccaaaaaagactaggtgggattgggttacactaatgagcgggaattcccagggacctgatcatatctcagttttgatctttttggagttgtgagatacagtagaaaagaaacaattcccagaaactctaattagagacagggctggtgagacgttttcaggttttcccccaaatgcctctaaatctacctgctttgtacaaaatgtaatttatgtctggttcctagtcagaacaagcacaggaacttcttgaggattgactttttaaaattcccttttaaaacaacctcagaaagtacccaacacccaggtcttggcatctcttctcattccgtctcattctggaatttggctcaaggttctacctctctttgtatgttatttccctccatctccattccatcacttggcgctaaagtcctacctttcatttattcatagagtcacctaatgagtcattcaattctattcactcaacaaagatttgttggaacaagtcaaatatggttccaaaccacactatctgagaatctagaacacattcaaatttacataagacatggtgtaattacagctgtgttctgtatcttacaggagaaaggcaggccactcagcctgagagatcagggaaggcttagtggagacagcaaccttttatcttagccctgaagaatgaagagaattggtctaggtgaagttggaagtgggaggaagcgaggaaaaaagggaagaccattccatgaagaaggcactgcctaggtaagaccacaaggccaggagggacatgatgcagaagaagagcaggccagtgaagccagagtcttat

SEQ ID NO: 26705 - DNA, 1595 bp, Bovine  19866880771801
  misc_feature (1)..(1): n is a, c, g, or t
ncaagcgtggcactcaatttgagtccaggcctgtctgattccacagcctctctgctacaccatatccagtttgatgtttgtagcctcttgtaacggagaaggcgatggtgccccactccagtactcttgcctggaaaatcccatgggcggaggagtctggtaggctgcagtccatggagtcgctaagagtcggacacgactgagcaacttcactttcacttttcactttcatgcattggagaaggaaatggcaacccactccagtgttcttgtctggagaatcccagggacgggggagccggtgggctgccgtctatgggattgcacagagtcggacacgactgaagcgatttagcagcagcagcagcagcagcctcttgtaaatttacactagcgccataataattgagaaagtatgagttgtttggttctacattttaaatcttaggaaaccaggtctgcatcagtgcatgtttaccaagtgccaagtgactctgtacttagcatcatacacaactctcttgcacgctctaggtttccaagttatttcatgaactattttggtcagatgtattttggaagaggactttaagagtaaaacttatgttaaattcccaattatccaggatatgttgtttgaagatgggaacagctggctattttaattccctaagtgttgaaatattgtggaaaagagaaaccccaaaccagcttgctaacaaatgacttagtgaatgaatcagcaggattgagctctctctggttcttctttggctgttctctgtgtgtccccacaatctgggtgtagtgtgatgagctgttctgctgcgaaaccagagttgaaagaataaacagggttgacagaataaacagtaaatcctgattgtcagggaaggtttacaagtcagcttccttctgcagctttaactcgaatgtctggccttcagggaacatgccgaagctttccctttgtgaactggtggaaacgactaagtgcctctgatttgtttggtttcccattgaccagtgcagggtcctaggcaggctccagtggatggaggctgccattggaagagaccagagagctggacatcacacagtgaacaaagcatgcagggatatgctggggaaagagtgggacacagcatagtgcctgcacacacacacacacacacaataacaaaatggaaaacaaatgaatttattgattatagatcattatggctgatacctcaaatgaaatgtcgtatttgtctaaaacgttttccattttatatttgtcacctgctctcctctaaggagctttaaaggcatgcaccgcttcctatgagccgaccacttggcactgttaaatgagcaagttgggtgaggatgggcaggtaagggacattgaagagggagttgaaaagaaaagggaagcacaaacctcaagtgctgacggtggtcactcagcatcaggaataagaatgtgaggagagcaatgagtcgacagtagagctccctttatcaccagggcagcctgggcacctgaggggcctgggcacttcttgctgttctcagctgttatctgggagtgagttcctaaaccttaaagt

SEQ ID NO: 26706 - DNA, 731 bp, Bovine  19866880857717
  misc_feature (1)..(1): n is a, c, g, or t
nactttctttaatttttatggtgaattgacatgatgccatggaatgctgattaagatgaaatattaaacccaactgcattttaaaatccacatcctttatggagtcagaggaaaactacgtctgtctccaccaggcagtgtccttcaaggccttacataatgcccacagtcagagtattttaccatctggtcattaatttttcagcattataaaaatgcagaaacttcattcatttgcaaaaacatttaactgagcctaatactgaactctacactaaaaacaaaaactaacaatgtctagaaacacgttctgttccattacatcttccattgttgaaataagcatttccttggaacaaactgctgttgaaattcaaatgctccttagagcaaaagaaatcattctccaacataggagccctctcttggtatgatttatttcacagcaaattaattcagtgacgattttggaggctgtaaactggggtgctccttccaaaacccaaacaaatctcagatacaaaaacactggcaacaggtagagaaaagaggcatgtagctcactaaggttgactgtttgcaggcttttgttttgtttttcatgctttccttattcttttcataaagattggactttgtagcagcaggtataaccaaactcaacccactctaaagttcaagtctttctagttcatactgtctcctttcatagaatgacttcagatggtccg

SEQ ID NO: 26707 - DNA, 1075 bp, Bovine  19866880992011
  misc_feature (1)..(1): n is a, c, g, or t
naatttatatcactcctcttaaatttctgtagaattcaccagtgaaagcatctgggccagtagtttactttctagtttttaaactacaaaattcaacttttgatatagatataggattattcaggttatctttttttttttcccttgagtgaactttactaatttgtatgtttcatggaatttaccctttttaacctatgtttttgaatttgatggcataaaattgcttgtaacatttccttattattatcttaatagctgttaaatttataatgatgtcacttttctcattcctgatattgttaatttgctaaagtatatttcttgtaagtggtatgtagttgagttcttttgtccaatatgacagtctttgctttttaataagggtgtttagctcctttacttttaatatgattattgtggttagaggtatatctgttatattgctgtttgttttctgtttgctccatcttttttgttcctctttcctcattttgatcgttaagatactgccaagctttaaaagtcttgtctaggcaacacgagaatttcaattttatgttgaatctaaagcttctcccctctctctgcacagatctgacccatggttcaagggcccttttatgttctttgttgctcttttacttattttttttttttttcttttacttttcttcccctgctctttctgatccttttgcacttctccatggttgaggtagggtgaagctagattagggtaaaaaagaccatgagtcttttattcaatggtagcaatagccaccaaaatctttgttttatcttatttatggaggtctttggtgtttagtccacagaaagctttagatattgaaaagtatactctggtattagtccatttacaacttttgcaagcctgttggatttaaacacagaagataatggatgttagagattggtatacagttgcttaccttaaacagttattagtaacaattattcattgagtcttatcattcagaactaagataggatgtttattaagacaataggagctactataacaaaaaatcttaaaaatggtttattttatcat

SEQ ID NO: 26708 - DNA, 1780 bp, Bovine  19866881015343
  misc_feature (1)..(1): n is a, c, g, or t
ncagaagcattggtgacttgccccatagtcctacagagcgtttgtggcaaggccaaggataggacaggagctttaagattgctggctcagtgctccttcttctaggcactaagtctccgtgctgagttgccttgcaacgttaattaattcaaatatgtctgcttatttcatccaaaacaagacttgaaaaattaccagtggttctcagcttgaacctaattttgaatgaagggaaagaactgttctgcaaactctccattttccttgtaacacatgacaagcactcgggctctttgcagaggtccctcatggtaaaaacaaaacaaaacgtagtgctcattccaataaacttgcagtcaaccctagcccagaagcaaaatcccatgcagagaatataaccccttgttcctcacaaatctaaaagagagagagatttgtgagtagcactttcagctgtgcgaatagaccattgttcgtgaggcttctcgttgaaaattctgctttagaactttttttttcccccactgacaccctaaattttttccttgtgtacctatcaatagcagaaaggagggttcaaaaacagaaaggaaatgcagagaatgagaggcacagagtggcaaagtcagggagagggggagaaagagagaggaaaaatgcaccgtgaagttcaaatgaacctggagctaatgacatctgcactttgccaactccagttcgttcatactctataaaaatgccacatttaggagtgtaatgaaccttgattccttgtcagattagcaaaggtttcgctatctgactctcacgtttctaatgcttacatcttgaaggctcagagttgagcaagacagggatcgtagacgaaaggccccaggacacaaacccttctggattgcttttctggattctaagaccccaggtggaagtgcggctgactgctacctgtgtttccaaatctcttctcccacctttagctgagcacttggctatccaggcaacgacttcattttctatcctttctagcggctacatgaaaccggtgactgggtccgtacaaacaggatccggtctgaactggtgtgcgccatgcttggatcctgctttaagataattaggtgggcacgcccccagatgacttcctcctactcatcctctgcaaaacaatgagaatggagtagtcccttcaaatccagaaacggaagccatgggttaagaatgtcagagtctcctcactggccctgaatcattcttgtctgagcaataaagtgagagagcaataaatttccatcttatttacaccacagtactgcgggtcttctttgctatagcaccttacctcctccctaaggatcccactgtttgagatccaggaccagcctatagatctatctgtgctttctcagggacatagttccacttaggcattgagagtgggcaaagcagaaccgagccagtttcagagaagttaccacatgaagtattcatttttagatatctgcctaaggaaattccaaaatcagaaaaaaatcaacatggcatgtattctttatgaaactaagaattgaacttgatcaccctgaacaacaatagggcggtaatgaattaagatataggccatctacctaacactttatcttattccagaaaggacataaagtataaccagtgaggagggacatgtttctgtagaatgtgcttgtgtatgtatatgtatgtgggggtgggggtggttctgtgtgtaggagtgtgtgtgtgtgtgtgtgtgtagggagagact

SEQ ID NO: 26709 - DNA, 814 bp, Bovine  19866881032128
  misc_feature (1)..(1): n is a, c, g, or t
ncttgaagctaacatgtgaacattggtgatgaattcagtctttctccgatagtccacatagagatctaatctacacacatgtggaaactcacaggagatccataaactagcctagaaataatgtcttcgatatagacagtgtcacttgattatgcaaaactgattttttttgactgattgaaacaaggcacttggagattcgagatgattggtgaaataataaagtgccatcatctcttcaaagaagtaataaacaagaggcaaggaggacaaaaccatctatgatgcacattatggaaatctctgcaaaatatatcccaaaagggagccatctctagaccttgagacatgcatcattgactgtaaagtagtcttttttctagctcttgttgatctctacccaaataaaataatcatacttgagtaaactatttctcacactgtgtctcatagagaacactgaaatcactgtgaagctgaaaaattactgacagacataggggacgtgctactctaagtagcctggaaaggtttctaaacaggtgagtgacttagtgtgattaatgagcctgtttgagtcaacagtagtggctggagttctgaggtcagtttcatttccttcatgataataagcatggaatggggactagcttagacttgggaagttgaattagggtctggataatttagagtcatgatgggatagctcgaaggaaaagttttgccaccttcaaccaattgccagcttggacctttttaattgagtgactatttttggggggagataaagggaaaaatagcattaaaataaatg

SEQ ID NO: 26710 - DNA, 942 bp, Bovine  19866881094787
  misc_feature (1)..(1): n is a, c, g, or t
ntttattagtaatgctcaaatataacagtagaatcaactcagtgtgtgtgctggaaattccagccccttttccaaaaacactcacttgtcgtcacctcagacactgccattgcaatcagtgtcgtgctccagacgataaaacggcagaggacgaggaagaagaaaaactactgctcagaaacctaaccactaccaacaccaacatctccaaattagggttcttgcaaagttacccagctccctctggggtgaatcactccagtttgggactcatctgcatgtctgggtgaggacatttttcaaatgtcatgtcataggacacatcagctgtctacgtttcttcacctcccactcactcccccaattcattccagtctggccttactaccccaccaaaacagctttcacaaaggccaccgagacctgagatgaccatgtgtccactcctcatctcactaggcttctcagcagcgtctgaccttagtgaccactcctcccttgaaggcttctcttcctttggtttctctgacatcactctctggattttcgtctcagttctttgctgctcctttctctccctctcactctctctctctctctctctctctctctctctctctctctctctcgatagctcctccttctctgcctggcctttaaattttgaagtaattcaatatttgatcctcaaagctaaacttccttctcgctccatattccctcaataggtcatccatggccatcatggtgcacaattccaggagacactaggcacaccactgtctgtgtaactggctcaccctcaatctgtacaatgcatggcttgtgtggccaaaagggcagtttctatccactcctgtggctttaattaccatatacattagacctttacctggggcttccctgggggctcagctgatgaaaaacctgcctgcaatgcag

SEQ ID NO: 26711 - DNA, 723 bp, Bovine  19866881152964
  misc_feature (1)..(1): n is a, c, g, or t
ntattcttgcctggagaatcccattgacagagaagcctgatgggcttcagtcttgggctcacaaagagttggacacaactgaaacaacttagcacggaagcaaaagaaaatggttcagctgatggactgacagccaatagtgtctgccccaaacaggcgacaggaaggtaagaaagaaaataggtgcacgccaaactctaccaaaaaatgctggagaagtactggtgagctgtagggagtaatctgacatatactccagtagcagacacttggtaggtgcccacagacccaaatccatcccttctggccgcctccctgacccccgccatagggccctcccaatgctggcccatcctgtgtgcaagtgagcatgtgtacagacatgccaggacccctacgcctgtgctgggaccgcttctgccagaaaaaggaccgtaaaactaccacccaccgtttttcagaagttgccaccccctgctgtaaagactgtctgcaaagccataagctccagcttcagcttcagaaagccattcctttttgctcatgggtttctgttcaactaggatgcagagaatttccaagtgtgctctggagctgccatgggttatgagatgttaatcaaacacccactttgaagtgctttggaagcacctctggtttttgggttattgatgtactcatgttgagtgaaggtatatttctggtccaatcatgagttcattt

SEQ ID NO: 26712 - DNA, 1988 bp, Bovine  19866881273953
  misc_feature (1)..(1): n is a, c, g, or t
nttaaaaaagcacaaagtagagaaaggaattgatatggggactggccaacaatcaactgaaagaactttaataatacagcagtcaactcctgtcaattcttttcttgatcgtaatgaattcaatagtagttatatcatagatggtcctaggtctcccaaattagttgatagcattaacataatactgtatttatgggtaggctacattatgcagggaaccaaacaagccctaaacctcagtagctttcaaaaattttaagtacttattcttcttactatattttcttttcttttcttttttttttttagggcttagtattggttgctatatattttttttaacaagttgcccatgagaggagcaaatggcaaagtcctctggtggcagtgaagtactcaggtaagaaagacatgcaacaaaggacagcaaaacccaggtacataagccaacgaggaggaacagcaagcaatttaaattcaaagcaaattcacaagtctcataaggaatattttaaggaaacacagctatgaattaaaaatttgtggtaactgttgagaagatagtgaagtggtaacggaagaacctgctgagaaaagttctccatttcttttccctctttcatcttctctttgacaatgaattgtctcaggtttctcttgagctccttatcaagtactgctctttgctttatgtgcctggatatggctgcagcttgaattcgttcttcaaaccatcctctggcactctgaggttgtgtgtcatcaccagacactgtcatggccccatttactgtagggacaactcagaaatgtgattgagcgtgaagcaaatacccacatggtgtcagggagcagtttatgtggcttgggcccatgagattaccaggtcaatatggtccagctgcctaaattgatagaaccactgtgtctcccaatcatttcctcatgtagagccaaaacttaaaactaccagcaacagggaaatatctgggctgagcatggaatcaagccaagtgtgtccacagtcaattgagaagaaaatggcctaattggaagctcaggtcatctgtcttcttcagatctaatgtcagtcaccataacgtccactgtgccttgacctgagggaatttcctctgctccatgtgtgcccaaattcccctgagactttcctcccacccccagtctctagtttgttagtttagctggtgtattttcactggtatattctgtcctctcagattccagacctgttcttcaggagtagggctggaaaattgcttcattgcttcactcagataaacctctaggaaaaagttgcctctgcagatcaagctcacgctcttatgcatctcattcactgggtctgtttctccgagtctctctctcacacgcacatttatgatgtttccatgttccatgttttctctgtctttgctctctccttatttttataagtgtttcctcctatctttcacacacaagtttcctgctaactgttattatttcccttgtattaatattaactttcattatgggtcctatgctcatggtcatcttctttcattgcctcaatctattttcagtcttgctgaaactatacttgtgtgtgcgtgttcagtcactcagtcttcctgatccagggattgaacctgcatctcttgcatttccttctttggcagacagattctttacactagcgccacctgggaagcccgtatgtatgtgtatgaagttattaatatatatatatatatatatatatatatacatacacatattatatcggagaaggcaatggcaccccactccagtactcttgcctggaaaatcccatggatggaggagcctggtaggctacagtccatggggtcgtgaaaagtcggacacgactgagcgacttcactttcacttttcactttcatgaattgaagaaggaaatggcaacccactccagtgttcttgcctggagaatcccagggatggaggag

SEQ ID NO: 26713 - DNA, 1104 bp, Bovine  19866881352339
  misc_feature (1)..(1): n is a, c, g, or t
ntgaaataaatacatatgtaagatagataggtagtgatagatagatagtgaagtcgctcagtcgtgtccgactctttgcgaccccatggacaatagccaaccaggcttctctgtctgtgggattttccagacaagaatactggagtgggttgccattgccttctccaggggatcttcccgacccaaggatcgaatccgggtctcccacattataggcagacactttaccgtctgagccaccaggaaagtccaaatatgtaacacatatgtaatgtacacttcaaatatcattagcactcaataaatgtcctaagtaaggaagactggttaatcaagttgtagtccaattcagaagaggaaagagataatgaaatatttaataaacactactagcatcctgccatggaaaacaatgtgagttttaaaaattacaggcagacccatattcatgccatagaaagacattaacacagcacaaggtattattcaatattaaaggtgaaatgaatttgtaaagcagtatccatctttgaaaagatatttgtaattatatttgtgtacaaaaatgtctggaaataagcaaaacaaaaggataacactggttatctctgaactgtggaaatgttttttgaggttcgttttttaatccatctgtgtttcctaatttttccacaatgagaaagtatttctgtataatttttaaacttttcaaaagcatgtagggtggataagtatctggagtacagaattccagctccttattttaatagcaatgtgacattatgtacttaactttttaaaaacatgttttttcatctgctgattaattacatggaaacaaaataacccacccactggtgattccaaatcaataggtatttactctccttaaatccatgggcaggggtgcaagagatggggcatgctgacatttgctcacactagcaaaatttttatgttgccctagtacatattcgaaagactggatcagatactgaaacttgtgtggttattttcaaacatctcatgacttaagagaacaggtgttggaggaaactgtgtctacatatttgctaggaaagcattctcaggtttctttcctaa

SEQ ID NO: 26714 - DNA, 1214 bp, Bovine  19866881390602
  misc_feature (1)..(1): n is a, c, g, or t
natgcttgcttaaccctaattaaaataaattatgtatgcgccttgaaatcctgtgtcggtttcattatattgtagaacactgccaaattagtaattaaacatgccacccttggttagtaccagatgatttctcttcgttgttttttaatatccaaagtgctccttttctctcttatagccagttcctacaactttggaatttacagtattttcatatttccataatgacacctgctggtaggagaagaacggatgaactgcaggaattttattcaactagctgtagccagtcatgctgcagtctgaagtaactaacattcctgaacatacaaagagtagagctcagtgacttcaaatactcaagcactaaaaatttgacaatataaggtaagtactatttcttttccaaccagaattaaaacttatcccagtaacctcagctcaaagcaaaactgctgcaatcgagagtagttattattaagggccttaaaattatcaattaacttctgttccatagtcaaaatttaaaatatggctgtctgaaacaatcattcttttaaatttttctgttgttttatatgagtaattaatagatcaaggtttaagtggcccagaagacaacgaatggggcatttgtctctggtaacctgcatgtcttgtcagttgacagagcaaacccagcaacctctggacacactgctggaagcttagcattagccccaggtctcctacaaaacccaataaagagatatggctgcatggtcctatcttctgatcagggccaaggtgatgtctgctcacgcccgcagtcctccgcacacccttgccacaaggtgtacatggataaatattcttaaacaagtgtgtgtctgtctgtgtgtgtttagcagccaaatagactagatcccaggtagatctcacccagacaccatgtcaaccagattaagtgggttgactttgacaacctgagtgagtttatttcactcagtagttcagaaaacaggaaaattaaccaagattgtctcaaacaaatttggataagctatatgcacccagctttctttaatatgcagagggtaaacaaataatccattagaacatatattacatagactctttcttacttgaccaacaattcctcttcattagaaatcagtcatgtatgacagttacagggggacagaggtaatctcaaaaaacaagtttcctttcta

SEQ ID NO: 26715 - DNA, 1227 bp, Bovine  19866881424019
  misc_feature (1)..(1): n is a, c, g, or t
nactcgctcttatgttcttcttttcttgatcaagcatccttaagatctaattccattggtactcccctgctcctgtgaataaaatgctagttaatttttgcaactgtcttggagtataatctctttctttctttctttttttatcagacccaacatgaattcagcagggctattctgagggaggtgttcagtagaaaggtagggacatgtcctggagaagagtttctttcccctctcttttctttctgcaggggaaagtactaacttttattttatttttttttattttttttaaataaattcaggacgaggtgggtccctacccccacagcaatcagtcccaccgcacaggccaaatgcaaaaaaagagaagtttctagtaagccttgatcccaggacacacatgcctcacaaagagcaatgcttcctttgagcctcttcctatgcacctccagggctcccagaattgccctctcactatcagtactaacttttaataaggaggatgagggatgaattacctctaaagctccaagtgtttcagggaattctagagagccacagtcttcgacaatatctgggcttcccaggtggcacagtggtaaagaaccctcctgtcgatgcagagaagctggagactgggtttgatcccttggtcaggaagatcccctggagtaggaaatggcaacccactccagtttcctgcctgggaaatcccatggacagaggagcctggcgggctaaagtccatggagtcgcaaagagtcaaacaggaccgagtgacagaggatacacgcatgacctttgcactgcattcagagctcctgctggcattaccactatgacgggttgctgggctgcttgggcagccgactctgctacattgcttgattgtttccatgatatgggctgaaatccacaatagctaggttggcatctttgcagttactttgtgtgtgtctcttgtagatggtcatgatctagcccttcagatggtgctttacactcagcatcttggtctcactctggtgaagtctttcctttgctttataacataaatctgcattggtgataactaactctggaatttttattatttttcattatggtaaaaaatatataacatggaatttaccatcttaactatttctaagtgtacagcccaatagcattattcccattgtttgtaaaccaatttcaaggtcttttccatctgcaaaactaaag

SEQ ID NO: 26716 - DNA, 1203 bp, Bovine  19866881580841
  misc_feature (1)..(1): n is a, c, g, or t
ntgctgtacacctaaagctaacataatattgtaactcaaccaaacttcaattaaaagaaaaaaataaatatgtaggctagcagatagtggatagaaaaacagaaggactaaaacaagccagtaacaatgtacaatgtacaggtctgaaattggggtattgatcgaagtttgtctgtttttttcaaagaaaatgcattaaagcaatgcttttgctgggacttccctggtggctcagtggctaagacttggagctccccatgcagggggcctgggtttgatccttggtctgggaacaagatcccatatgccacaactctgacctggtgcaggcaaaaaatacatatatacgtgtatattttaaaaggcagtgctttggaattaaaaatgaaaaaaatacccatttttttaaaaggaaaaaagaaagggagactgcagacaatctggtggtgaaagcaaagggtgcaactttaagttgtcttttctgggagagcaactggtttagaagactaaactatgcatatgtaaagcaaagattttgaatcattttctgggttacacttacatctttagtttcacgaaggatgacttgaagcagccacatttgtgatgtaaaacttattcttcagtgttattttccatttgcaaattggttggatccacttgagtcaaactgtgctttggtagatgtcattgctgcttttggacgtgttctctcaaattaggttacagaaacaagagctgaattatacacacagctgcagaaatagatttctacttgcaaatgtaagatgaaaaataggaaacttgagagagctcctttaatgttgaaaccaaccgaccaactttctgggtaaagttctgtttcttaacacattcagaaatcggtgggttggtgtccacatggcctgaggaggcaggcagtccccttttagagcataagctggggtcgcacagatagatgtttgaatccagttctgctcttcctagttgggtgaccccggtcaagtcatttaaccctgttactttcctcatctgcaaaaacccctgtgcccagagctccctcatggggtggctgtgaagattaattgagatgactgagtgatttgcttgataaatggaagtcattgtaaactgttagcagactccttcttgctttcatgcacttgtggtttttgttcttgctctgttcacaggcagcatgaa

SEQ ID NO: 26717 - DNA, 1516 bp, Bovine  19866881595443
  misc_feature (1)..(1): n is a, c, g, or t
ncagagggaatggcattggcaggtgtctgaagggcacaggacttgggaggaactgaaagaagacctctgtaatcctgaggtgtgggcgcaggtgccagggtggagggagaagattgatgtacgattaagctggagaagtaggaaggggccattaggaagtcactgaaagtttttaagcctggaggtgttttggtcagaagtggattcaaaaaataattctctttgcagtgcacagaatggatgggggagcaacagtggagtgggtaggctggggaggaggctaatacaggggctcagagagggagactgtggtcaggaacagtgaatcaagctgagaaaaaactgggaggtggaatcaacgagaagattatgcagtgataaagaacataatttatacatacaaaaaacacaaatacagttttactaaaagatatcaacaccacgtgtttgttaaaaagcaaaagacaaagcaacagactaacaacacaaggaaaaaggaaaaccactgttctgatctgaaaaaccagaagtccagatagaataatgaaatgcttgtttttttttttttaaggcacaattattctttcaaaatagacacaacagtgtttttcaaaaagttggcttgttccttatcaaattatgaaatttgtcacatatgatttgtgtctgttttccactttgccagtggtttggggagtcgtgatgtgtcttacgaagttagactgaagagagtgctgatgtgaaaggaacttgctgaggcaggcctggcccagccgatggggtcagcgcccagtgagacagcttggggacccggtcccagcgagggtgttcagtgacaagacaggccccggggcagggtcagctgtgactgcagacagactcacacccacagcgtctacaatacccacagctgccgccgggttgcattacaaaggtgtcttggcagaagcattttggctgtctgaaataacggccttcacacaatccttagactatattttacaagttcgttttctaacacacaggcacgcttttatggcagctggagcattttgctgaatgacttgtagtgcactgctgaccagacagggcatttccagatttagattataagagaaagacagcaagtggtaagttcagctgcaggtcagtggacacttgcaccatagttccctccccaagcaccgggcgcctttatcccagggggacgctcactgtaaagcacattagacagagacggtcctgggtggtggcttttatgactgttggttccatttgcacagggactgtgttgttatcacattgtaaacattgttcttaatatcaaagaaagactgggcagagtgtcgagaagtggcatgcaaaaactagaatagaatcgccagtggttggttttaactctcttccgagcaccgatgagctacaaggggcaagtgctgcttgtgaaaagcagcgatggtgacagaaaccgatgtttactcattttccttcaaattgtgtgcatcctttttttttt

SEQ ID NO: 26718 - DNA, 745 bp, Bovine  19866881772716
  misc_feature (1)..(1): n is a, c, g, or t
ncctgacattctcttttgctgccgaggtatcctgcccgtctgcagggggcagggcacggggaaatgcagagaaagcatatatttttcagcaggtccatatgtgagatgagcacgggaagaagtcaggcactatttaagctcatgtctcccgatgtcagctggtatatcataatagcttgtctgttaagagtgtcaagtaacccgtaggaaagaaaacatttctccaacacctgtaagtccactccagggggcagatatggcatcctctcccaccagggaccactgcaaagttaaagtcaacaattaagaacagctgcagccttgcaaccagctgcccttgctaacccccttggagggaggagagggaaagttctaagagtggtaatcagcagaggagactgaaattactctttctttgcattactttctcttgtaaaatgtgttgaaactgcccctgtatactgaagggagtcgcaaggctgcttttcaatttaccaaatgccctgtagtatttccaagccttatagactctggtgatatctaagaatccatttcacagagttggagctcacagcttcaaattgctgcaggagaagattcaaatatgcaaggaaattcttttgcatttgaataagttcctttgggaagaaatcacaaaaaagtgccattcagtcacaagctgtgggacctctcaagagctaagaagggcccaacagtaagggtccaatataatgataaaattata

SEQ ID NO: 26719 - DNA, 949 bp, Bovine  19866881776467
  misc_feature (1)..(1): n is a, c, g, or t
naatccttctgtatacagtagagctggatttaatttctaaaaattcccattattttatgtttttattattttggtttcaagaggccataacatctcccctattccttgctctatcaagactaaagtcccctaatttgcctaatatctaggccaaggcccaatgacttagttctaacctagttatctaaattcatgtgacctttgccttgggtgttaaggcaaaggtcccaagttacttttgggggaatactgcattctattttggcttaggatcttacccacaaaccagaaaagtccagtacttgacaactcaaagcatcttaatttacaagcgtacaggccacaaattacaaaatgaagacattttttactgagtcagcagagacatctgtctaatgcccctgcaattccctagttacttacagttttgaactgaggagatcatcacatgtggcctttattgccttttactagaacgagctgttgtctggcactttgctctgtatggacaatgtctgttttctgcttctggtgtcagtcctttctccacatggtctaggtacacaagatacgatttttttttttttttttgatgggggcagtggtgatgtcaaaataagtgcctagaaaacaggtcataatgcaaatcagtataaaggggaaactgcttcaccatgggaatcattatttaattgctggttgaattcctgactgctggctaaatatgtctggtaaatatgtcaacctccctcaaagccaaatcaaacccaaaagcaacattagacttttcaaaaaaaatgtaatttatatataggttttggaaatcagacaaaaatgtcctataggttttatataaaagctctaagggtacataaaaataaatccttatcacattataacttaaatgtcctagcagaaaacaaacaagttccatattgatccacaattt

SEQ ID NO: 26720 - DNA, 2667 bp, Bovine  19866880362633
  misc_feature (1)..(1): n is a, c, g, or t
ntgctcttcctatcagaaaaggcaatggcaacccactccagtactcttgcctggaaaatcccatggaggaggagcctggtgggctgcagtccatggggtcgctaagagtcggacacgactgagcgacttcactttcactcttcactttcatgcattggagaaggaaatggcaacccattccagtgttcttgcctggagaatcccagggacggtggagcctggtgggctgccatctatggggtcacacagagttggacacgactgaagcgacttagcagcagcagcagcagctcttcctatgccaggtggcttgccagtattgctatttatttgtgctttgtaaacattaaggaattgcaatcttggatttgaaattcggctctcactcttttttctctaaatacataccaaagcatctggttttcaccttggttaggcatgccacagttccaacagacccacctacagagtttcgttcccctcctaactttgcagtcttcagaaagggtgagggtagaaaccttctcttattctgatatcacattttaaagaacttgcaaagttctgcaagtctgcctgatttgcatgtgcctaaaaagctgtggtttaccctttcaactcttcttgatcatccaacacagccacagcatgacagggtcgattcaagttttgaatttatggatgattcagggtttccaagtttcaaaaagcacctttgatgatggaaatatcgtgggcaagggatgtgggcagcgggagagataagaatttctgtgggctggagctcaaacagtcctgttcatgcccatgttttgatgtggtaacttcacttgctgctgcatctacatctcatttggggctgtaggagcctattggcagcctgggtaaacatttttttttttttaatgcattctatggcgctaaaggaccctttcttccctttctcagacacaccctagtgatggaggagaccagagcctgaattagcctgttggggctaccatatcaaagtaccatggactggcactgttttctcacagttctagagcttgaagttcaaaatcagggtgctggtgggattggtttcttgtctcttctgatgcttctgtccttgacttgtagaagctgtcttcccttgtgtttccatattaccttccctctctatgtgtctgcacccaagtttcctcttcttataaggatgccagtcactttgcattcaaatgcaccctaatgccctcattttaacttaattcactctttaaagactatctcaaatatagttatattctgggatactggggttaggacttcaatgtacgagtgttcagaggcagtcaaacagcccattcctgcagctttgttacaagcaagaatgcagtcaatcaaacacatccaagaaggctccgtatacttcatggtggccattagcattcttcagtcttggtttagttcttcattacaccttgcgggcctggaagtgaggggcaattctgcttgcatttgctacaaccacagccaggctcctccgtcatacaggtggccatatggggtgatcttggtgccatgggataccccacaacattcacctcttttcactcctatgctctgttgtgttccttttacatagttctgtggagggaaattgctgtctcccaatgatataagccccccatctgcaggaaatgattctcaccctgttcctcgtaatgcatctaatgctccacttcattatccaacttgtgctgtcagtttctgagagttcatgtttttcaagaaagtcaacatagattttctaggtcttggatcagagggcaataggaggggctgttgcattattactcgggtattgtgaggccaagaaatcaagagatgctttccaatgaaaagattgtttgttacagttcccaagaggaatgggaatgccacactgtgcgaggccaaataaggaggcaccagggctagactagggcagagtgaacaaggggaaagtgtgggcaaggatgtttattcgtggtttctgtagacagaaacaggtgagtcagggtgaggaggcttatggttggctggttcaaatcatttcagtaggctccgaggtgcagtgactatcctaggttgtctagtacctggccctgggcgattaggagagggaaagcagttcagttcagtcgctcagtcgtgtccaacccctctcaaccccaaggactgcagtatggcaggcttccctgtccatcaccaactcctggagcttggatctccatcgagttggtgatgccatccacccatctcatcctctgtcgtccccttctcctcctgccttcaatctttccccagtatcagggtcttttccagtgagtcagttcttcacatcagggggccaaagtattggagtttcagcttcagcatcagggaggggaatatttgcctggaattcaagagtccaatagaggagaaggttgggtgtgggctttggattagttgggttgcatgtaaacccatcccattagttgggatgcacttgtaggacagtcctttactctctaagaatgggctagtcctgggaagggcagtcttcccaaggtcagtatgaccccagaggctaaacagccatctggagatattgatgctgcagtggcggccatgcagttgtttatgttcactcataaatac

SEQ ID NO: 26721 - DNA, 2481 bp, Bovine  19866880581501
  misc_feature (1)..(1): n is a, c, g, or t
ngaaccccttaagggcaaaaactcaggtttcccagagaagaaggaattctacctcaagactgagatgtctaaattgcaatgggtggtttcttgtgaaggccacattaggttcagtccaccaggagggaaatgtctgttctaccatagacacggttaaagggtggggattagggatttcttcctgggggattgggagaattgggagaatcttctgtatttagaagagaggccacaggatggaaggtttacaagatgtctgagattcctttccagctgctcagcacccaaaagaaaatctgtctatatatctatctatctgtctacttgactgactctttggaaaagaccctgatgctgggatagattgaaggcagaaggagaaggggatgacagaggatgagatggttggatgacatcactgacttattggacacgagtctgagcaagctctgggagctggtgatggacagggaagcctggtgtgctgcagtccatggggtcacaaagagtcagacacgactgagcaactgaactgatctgtctacttatgttgaattaagatgaaaataaattatgagactttgcacattaactggcccttcaggatggaaaatggtcacctcttttagaaacgattaactatattttaaagtgtgagcatttgggttcaggttcatgttagagaatatcttttcagttacaagataatcacttcaggaaacaaatttttctctttactttggatttcagttgattcaatcatttcatttgcttttgtttccgcttgtttaagaattcccagattttgtttgtttttgctttttacataatctactttttgttcaacttggtggtaagcaaattggcctatttcagtgcggttttctgtatttaatgattggttcagttcaaacctgtgcttttaaaatgttgaaattttgcaattaagtagtaaaataattgtttgtttgcttgttttctaatttagatttttgtcaggttctttgatagataatttcctttgattaaagtttaacaaatgtactctcatttaaagaatatttaagtactaatcactgatttatttatctactatgaaaaaagcacttttttccccaagaggttcattttatctgttcatccagaacaaggtttccaagcttttatcataaccataccagatagatggtgtagaaatgccacaatctgatattgccagagggatattttaatggcaatgagcagaaatgtcagggcatttatatttttgcccaagactgatccatttatagcttggactaccaggagagtattatcctttctgccaaaaagggtttgaaatgtttattccttatttttacagacttgaggaagaaaaagcaggctctgtctgagatatagatatggcgatgaggttaaatagacaccagaaaatcacatcgctattttcgctaagatataaattttgccagcattttccagatcacactggagaagggaaagcttccacagaatctgagagtgatgggttcatgggttctgattgcgtgattaatatacactcatggtatttttcggtgtgtcagcaaaacgtacaggtctctgagcctgacatttaattattacacggatggttgcatgaactagaggagtgaacacagactttggagtcccagttcatcattaatggtgaggattccagtctccatttcttccattcagtctccatcactcttactatctaccacctgtaatccttttagagccagtataagaggaggaagggcttcccaggtgccactagtgagaaagaagctcctgccaatgcaggagacatgagacacaggttcaatccctgggtcaggaagatcccctggaggagggcatgaaaacccacttcagtattcttgcctggagaatccctgacttcccagaggagcctggtgggctacagttcacagggtcataaagagttggacacaactgaagcaacttagcacacacaaatccaggagaagaggagaggaaattaaaaattcataattattaacaaatatttgaataacaaaacaaagaagaagctgcatgtattttaaagtcttattctgtttgtttgcaactgcagtgaggctcctgttgttcagaacttccatcttgcactatctgacctatgacccctttgccctcagcctgctatggtttttctctgatggagggacaaaatttccctcttgtaatgtgatcctgcctgtatgtactcagtcatttcttaaggtattctatacagaatggaattacaagacacctccccgcaaagatacattttcctagatttcagatagatacttccttgatagatactccttggaacccattcccacacatatttcttcagtatctaccaacactaatgaaaacaatattattttggtatgtaaactcccctccccaggtcagaccttgtacacatttctttttttt

SEQ ID NO: 26722 - DNA, 3483 bp, Bovine  19866880674466
  misc_feature (1)..(1): n is a, c, g, or t
ncactactgagtgacttcactttcacttttactttcatgcattggagaaggaaatggcaacccactccagtgttcttgcctggagaatcccagggacgggggagcctggtgggctgccatctatggggtcgcacagagttggacacgactgaagcgacttagcagcagcagcaggaggctttttcaggctcttctctgcaggaagctgttagcaaagcagtgggatcagccagagggtgttgctgagattctccttggggaccacatgtatgcccagagaccctctctctctttcaagctggcacccaccctcccctgtacagtaagagtcccctgcaactggcaggatggtaaagcagaaggtgccttgtcttcactgtggctgcaatatctgggaaggcttttatataaataactgtaagtagcttagtacttttccagagagacagcatacccaggacagagaacgattttctccgacttgaaattatagcatcttttccatctgtctctttccctcaacacctggcctcctgtttagtcaatgctgggcgcttgttaggtgaatggaactgaactgaaaccgggatttctagaagagttggatattttatgcccaggagctgattggaagccagatgtattagggggatgatctcgaccttgactctacggcatgaccctcccgggaccagtccagctttgtccctctgcacccactgctcacgccccgcccttctgttgcaacatcagccatccggttcctcccctgagatgctgctcacaacctccacccccggggttctgctcggggctcaagcctcctctccacccagcccctcactaaatggatctgggcctgagtcccttggcttttccttaccattccccgcctccccgtcatgccccaacctgatgccccaagtcaaatgagaaaacaagcccagcaagaagattgcagacctcttcccttgaatctttagaggagtcaggcaaagaaatgttcaggagcccatggatgggtaaaatatatgtttggaaaaggataggggaggagtttcatcatttccctccattccagctaactgctgctgtacagctaaaccatgccaaattcagtggccccaaaccacaagtttttattatgcttacaggttctgtgggacagaaatatggacagattcaatcagtccagaaacaactgggttgtttctgctccgtgacatctgggacctcaactgagaagtttccaatggctgagggtgagtccagtgggctggggctggaatcatctggatgcatttgttttgaagtggctgggagaggatgacttagaagctgagtatagctgagctcagagtatccaccagagcatctccctatggcctctctgtgaggcttgggcgtcctcatgacatggtggccatgctgcttacatggagcctaggagttctaagagaaagccaagggtatctgaagaccacagaagaccatttttgccaaagactcttcgtcaaagcagtcataaaggtgtctagattcaaaatgtgaggacatggaccccacctctcagtaggaggagtgtcatataatctgtgtattagaataatttgtgctttagaacctcccaactcccctacagttttttgttgttttttcttaaatttatttaaagtgctgggcacaaactttttttacttgcaatgagcaggagctaatctttgctgaggttctcaggcttctccttgtgcttgtttctcttgctgtggagcacagactctagaccatgggctcattagttgtggcacacaggcttagctcctcacccgcatgtgggatcttcctggaccagggatcgaacccgtgtcccctgcattggcaggtggattccgaaccactggaccaccagggaagtcccaccccacaaatcgtttgttgggaagttgtctggtggaggagagtggtgtctcaaggagcatcagaccaaggccctttgtgacccttacgttcccttctcagcacctccctgggagccctccacggcagcacatgagaaatgtgctgctgaatttcaaggggagatacagagtttggatctcaaatcccacactgagatattttgatttgattctcttcttggcgatgaggctcctgcaggggcaacttggagaagaatgctgtcctgggaggatcagaagtgtggcagcaagctgggtggaagaaggaggggctgctgtaggcaggaagatggatgagatgaccacacgaaggctcagaaccttcacagctggatctgtgtccacagagccgagagaaggaccgtatctcaaaggccaaagaacaagatgtgggagagacagctgttttcaagaaacagatcatctggtcaatcggtcctgcggctggactccagggcgaggtcaataaggatgtgtagcatccttacgccatcccatggaatgactttttgagtgacagctgcagcatctcaggcccatagagatgccatccaaaaccagccagctgttccaaagctcttcttgctaatgagccccaagtgcaggggtcctggcccctccacctccattgtccttatgaatttttaaacatacagaaagcacgttgtttgtgattacattagaccttccaaaggcagcccgaacataaattctgagatgaacagccgagggctggaagcctgcctcttggtttcacttcagtaacttgtctcaatgaatccccagcagaaagcatcttacatacttcagttcttgagaagatgagacgtgaatgccagggaattataagacagaggggctttattgcaacagtgaacaagctggaaattacaaggtaatggaatctcagtgggagggccctgtaccctgccattagctaactcagacagtgattgcagcaggatccgctcaggtgatgcaagtgccacacgggtttctgcactttgcaccctcatctggtgaagcccagacacaatcatacttgaaggcaaagggtacacctggctgctgggagccctgatctcacaggaaaagtctagggaattacctgccctgggaatcctttattctacaggagatggtttccttccgagcccttgtggtgcacaaatacttgctgactttaaaaaaaaaaaaaaaaaaggacatgttacttgcaagttaaattttatctggggcaaaatgactgcagctggggaaatagcatctcagatagctctgagagaccattccaaagaggaaggagggaaggtcagaatagatgtgattttggtgaatggggagtacatgcaatcaagcacgtactttttcagaaggtttctgcgagttatgaggaacaggcaccaccatgaaggattttagcgtttttctatatatgagaagatacaagaatcaggctcataaaatcggctcctgaaactatctgcagaagacctgtcctgccagtttttttcctagtacagag

SEQ ID NO: 26723 - DNA, 1724 bp, Bovine  19866880831021
  misc_feature (1)..(1): n is a, c, g, or t
nattagtgcccttataaggagggactagggactttcctgatggtccagtggccaagactctgcagggggcagagcttgcatccttggtcaggggactagatcccacaagttgtaactaagagttcacatgccacagctaaatatcctgatagcacaactaaaagatctcactgttgttgttgtctaatcactaggtcatgtccaactctctgtgacaccatgaactacatatagctcaccaggttcttctgtccatggatttcttcaggcaagaatactggagtgggttgctgtgttctccccctggggaatcttcctgacccaggggttgaactcgcatctcctgcattgtaggcagattctttaccactgagccacttgggaagccaaaagatcccacacgtagcaactaaagatcccggcacagccaaattaataataaaataaataagtattaaaaaaagaagaaaaaaaacacgagggagcagaggagttgtttgccctcgcgcgctctctctctcctctgtgagaaacagaaggaaggcagcttcctgcatgccaggaagcaggctctcaccatgaacagcatctaccagcaccttgaccttgggcttgtaccctccagaactgtgagaaataaaagtctattttctaagcctcccattctgtggcattttgtttttgcagcccaagctaagacacttccattgttggcagagtgaatgaattgttgaaaaggtaagtaaggtgcctaaatcagagctggcatatcattgttgttcaggcactcagtcgtgtccaactctttgtgaccccatggactgcagcacaccaggcttccctgtcctctactatctcccggagcttactcaaactcatgaccattgagtcagtgatgccatccaaccatctcatcctccatcatatccttctcctcctgccttcaatcttcccaagaatcagggtcttttccaatgagttggctttttgcatcaagtggccaaagtattggaacttcagctttagcatcagtccttcaaatgagtattcagggttgatttcctttagggttgactggtttgatcttgcttccaagggactctcaagagtcttctccagcactacagttcaaaagcatcaagtcttctccagcaacacacctcgaaagcatattataggtgctcaacatacagtaacaatgatatcatcgtcacaatcatttccacccttgtttttatcaggtaacccctgccctcaaggagctcacagtctggtaagggaaacagatatggaaaacaatgcctgggggcataatgacaaacgcatgcgccagcacttcagcagccctgggggtttcagaaataagagtagggactcctgggcaggcgggtgaagctgccaaatgcatcctgccccttggcttcacaactcgctgggtaccactcccggcagacacagcaggcacggagaagccggccacctcccaagttgcggtacacgatggcacccttctgggtgcacaagctgtctctgttctgacgccagaaacatagctgtggcgatgtcatatggagatgggtttcatcccccctccctctccactatgcctggcaaaaagttaactgtgctttatttcacttcaggtccatatggcgcctcaatttccgatcagaggtattacaaattacagtctgtctctacagaacattaaagtaggctcattt

SEQ ID NO: 26724 - DNA, 925 bp, Bovine  19866880844510
  misc_feature (1)..(1): n is a, c, g, or t
nggaaggatatgccctggaagatagacctggaaattctggtctttccctggccggggaatagactgtcactcagacttatacatcaggctcttgtgagtttgatccacatgaatcaggtctcctaagactcactgtatctccctgtgacctgaaacaaccagatagaagaaccaaagctaagaactagactctaaacagtggtaaccccaacacacactactgtagtagacccttctgattcttttctggcccccttgtccctatctcacattgccaccaggaatctacaggaatattagaaccggaagcagtccaacgttggagaaagagaattacttttagacatagacagatgcagcttaagttccatcgtaccacttacttcacaagtaattctgagcaagttgctaacctctgtggcttccatcttctagtctttaaaatgggaatattaaaacctatgtcccagggttgggaaaaagaaggcatcacacaaagtgcagagctcagaacgtgtatgtaacagatgacagcttcctgccccagcttgtagatggtcctgggattggatgaatatatggctcactctgttcagttatctcctcttaccagtagctgatggttgttcagggaatgaaaattaatttttacattagcccaagaaaaacataattaggaagtcaaatctgttgctgtaccagccacaacagttaaaaaaaaaaaaaaagactctgcatcatagataatggtgtactagcagctttgaagtgtccatgtatcccaaccctcgcccagatggctgaattgatgggcgatctcatggcacaaaggaaagagcctggtcctgcttctgtcatcttgctggagaccttgagtatttcacctccttctctgggcttccctttccttctcttaatatggcag

SEQ ID NO: 26725 - DNA, 1284 bp, Bovine  19866880900833
  misc_feature (1)..(1): n is a, c, g, or t
ntttttacacagaattaaaatagattgagtttccctccacagaagaaaagagtcacttgtttggaatcacattaagggtagaatgggatgtattccactcccagagccaagtcaccaaccttgctggtgaacaccctccccagcagcctttcccagttggcagagcatggtagaagagacagaaaaatattaggtatgtttcctatgagctgaagtgcagccaaatagcatacttccagggtatactcttgcaggctggcattctgaaagatgcaatttctccatttccaaaactcaacaatttttcagtagcacagcatcgttccaataaaacactggtattttattcatctcttcctgaagtaccatacttttattttgtaggcgtctctaaatcacatcaattcacaaaagatcaatttcttgctgctatagtcaaatcagatgttacatgcacacacacacacaccatgggttttttcccttgcttgtgccagttattcatagattagaaatttgtagtcggagtcacaaagctccctgaggcagggaacagggctaataaatgcaggctacctatccaacagccctatcctacccagactcaggctgcttccctctacccttcttccaggctcacgggtttaactgtctcttcttcagggaatgttgtctctgttacaggaactcttgtctagctcatctttgtaattattatttgtcagagcttatacaagtgtgaaggtactgatatcatcaaaacatatttcacaagtaactatcttttatagttcctgtaaaaccttagggcttcccagatggctcagtggtaaaggatccacctacaatgcaggagacacaagagacgcgagttccacccctggatcaggaagatcccctggagaaggaaatggcaacccactccagtattcttgcctggagaatcccatggacagaggagcctggtgggctacagtccaggggatcacagagtcagacacgacttagcaacttaacaacaggatagttcctgcaaaatctgaggaaaagagtagctccctctcaccgcaactagagaaagtccgtgggcacagagtcagacacgacttagcaactgaacaacaggatagttcctgcaaaatctgaggaaaagagtagctccctctcaccgcaactagagaaagtccgtgggcaacaacagagacccagcacaaccaaaaataatttttttttaattaaaaaacaaaaacaacagactgcagacaggatttgactcaggggcta

SEQ ID NO: 26726 - DNA, 1437 bp, Bovine  19866880905860
  misc_feature (1)..(1): n is a, c, g, or t
nagaggctcaggggaggtcagcgaccatcacacagtactttgaattggaaaaggaagctgcagagtcagtagcttcataagcaagagtggaaagaaagaatcacagcggtgttctgtgccaacgtcaaatcagaggccgttcaccctggatgagaattttaagagtttccaagctctcggtcgagataacgttaactcaaccgagcatccatttgcctttctgctgttgttctgtatggtcacagaacctgatgatgggagctattggagggaagccacgcagagaaaggcacatggtcataaaatcaagcagtgttagtacagaggtgtgggggctcaggaagtgcctgtcctgaatgcatcatcattttctgttcaggtcttgcctcgccctctttaagtttgcttttagatcttgcccttgtgctgtaggtccattggcatgaggcagttggaacagaagttgtaaaacatgctttgggcaaagtgaggatacattatttgaaaacatcattcattttgagatcctgtagcatttcaccaaaatgaacattagcgatcatttagctgaaaatacactacccattaaataaaaaaaaaaaaagagcccaatatcctgtgcccagatagacttgggcagggtgactgctcagctttgtgtctaacctccaacggctagctacctgcttaaccaccaccgtggctcagacacaaggctgagggccagacctgtcatattctggaagaggcaatcgagctgcctagcaaagaaaacagaggcagcgagaaggcgtgatgccatgaaataaattagaacgaacatcccatttttatctccatggcagtcagcccattccattctttgcatgctattttcatatgttaacaacagtttgagagctgagtagaaggagaagtggaatgtttaatggaatgagagtgagacagagacagagaggaagaaaaacccttgctgactattaatccagacccagtaaaacccagttgtgtctgttgaaaccaaatagactggaaattgattcaggggctcactgttgaaatgaataaggcactgccctcatccttcctggccctgtctgctctctgttgaatctggcttccattgcaacagtcttcattgaaggagacatgacccttgggttttccccagtggtctggtccagttgaggctatggaactctgaactgggggcttggaactctcccagaagaagggagaggcttctccaagctcggcggtcctccggtgcactcgtccttcttatctcacaagctggtgcagcactgcggaaagcatgatgcgtatgatgggcctgggtgccaggcactgagatcgcgttagaaaatggccagtttcaatggcagattttatccattaaaacctattactagttccctcccagagcccagctggttc

SEQ ID NO: 26727 - DNA, 695 bp, Bovine  19866881008390
  misc_feature (1)..(1): n is a, c, g, or t
nggtctcctgcattgcaggcaggttctttaccatctgagtcccagagtaagccccctacaaactctagagtgtcctttctcttagactccagagctttctttctatacaagtattgatctttggcagggttgagattgctctttacattaagaatgaacttgttcaccaaaatataattagcacaagaagacggaatattattaggggcctcattaatttcaccaagtttatttaaattgcagcaggatgtcaaatcaataatgatggctaattaagaaaaacccatctgatttccttaaagtacatggagggggtgccacaaaggctgcagtggggaggaaggtgagaagtttctgataaacagagatggtacctcctctcttaaatggaggggaccgaaggtgagctaggtaggtgtccttgctgaattagggaaagggttgcctgcagtaggtgtgaaatttgaagtgattaactccagaggcactagaggcttgagaccccatgtcatcatgagacgtccctcttcccctctcagatttcattagaagactgtgaattagggtgaaaaataaggaatcagaaccagctggttttgaatcctggtccttccacttatcccttgggcaggaagatcccctggagtaggaaatggcaacccactccagtatccttgcctggaaaatcccatggt

SEQ ID NO: 26728 - DNA, 1815 bp, Bovine  19866881014463
  misc_feature (1)..(1): n is a, c, g, or t
nccttttatagatgacccgactaaggatggtgaaccagccatcagtagaggctgcagcaagaattccttgtgagacaagcgtcccctcccctctgtgtgcaccagaaagatacaagagggcacgtggtgaggccatactgcttgacaagtgagggttattgttccagctgactcaaggaaaaacactgaaaatgaccttaattagcatcgagaagcttgtagagatgaacagaataaacacatcttaacctcaacataacatctactgatgtacgattcacttgatgagaattatacatacaaagtattaaggggtgggcgggatgggcaggaagggatgctggctcagcatctagtggatgatctcattcagtggttctcaaaggagtagtgaaatcctgggactttcaaaagatagctgtgccctgggccccctacctggagttctgattcagtgattcaggatgtgtcctgggccagtagagattcgaaaaagctatgcaaataaggctgattcataccccaggtggtgtgtgtatgctgctcgtgtccaactctttgccaccccatggactgtagcccaccaggtttctctgtctatggaattttccaggcaagaatactggagtgggttgccatttcctactctagggatcttcccaacccaaggactgaacccatgtctcttgcatctcctgaactggcaggtggattctttaccactgcgccccctgggaagcctgaaattgagctgctaaattaagtcttggacaagtttacatttcctttctaccttttctatctgcttctgtctgcctcatgaccatttaaaagattttttttaacacatcactaagagaatgccagggaaaagtacaaactccaaaggatgctcagattcttataggcagttcagataaggtttcagtgatggagactgaggatgatgaaaccaatgactcaaggcctgtgtattgtgagtacgctttcatagtccacttaccgaatataaccaggactcactctacagaaggaaaatggtcttaaaaattaaaaaccatcgaaatcaaacagtggtactattcggaaacgtcagttgatggataatgagtgactaagtggctgtttcagaaagaaatggaggtatagacttttacttcctctatcccattttttttgttgttgctcggtcatccagtcatgtctgactcttcgagaccccatggactgcagcataccaggcttccctgtccctcaccatatcccagagtttgcccaagttcatgtccattgaatcagtaatgccatccaactgtctcatcctctgttgccctcttctccttctgccttcaatctctcccagcatcagggtctttttcagtgagtcagctgttcacatcatgtggccacagtattggagcttcagcatcagtccttccaagtagaaagagtctcagttttctaggatgggagcactggtaacaaagttggcgttctgtttttgtaatgacttagtgaggacaaagaaagctggaacagtaagccgttttgcagaagcagacccagatatggactgtcaggagagtatctgactggatcacaaggacatctccacagtggatcatgacatcatttggcacttgaatttagacatcctggaggtccatgccacatcagacaaaggccagcttcttggtgtcacctggggccttgccaactagccattcctgtggttctgggaggcgtccttctgcatagcagtcagttcacggaatttatatttatgtaaaaggcaacgggctatattactcagtc

SEQ ID NO: 26729 - DNA, 1211 bp, Bovine  19866881064972
  misc_feature (1)..(1): n is a, c, g, or t
ncctgtgtgacagtgggccagccacttactctgagtctcaaagtccttatttagacaacagccacaatatgtctccaatacttggccacctattgcaaaaagccaaattattggaaaagaccctgacgctggggaagattgagggcaagaggagaagaggggcacagaggataagatggttagatagcatctcggactcaatggacatgagtctgagtaagctccaggagatagtgaaggacagggaagcctggcatgctgcagtccatgaggtcgcaaagagtcagcatgacttaccggctgaacaacaacagcaacaatatgtcatcacaggatattttggagactcacattctgcaccattaattttcttggaaccagcacagttagagacactcaataaccattagccctctctttcccacaccctcctggcatgtgattgccatgcatttgatgactttggcctgagccaactcccttaacaaatgtttctaccttagattgaaattaattcaaagacagagaccaggaacacatcctgtaagggactaagaaaatggcattaattttgtaaattaataaatatgcaaatggaagctttgtatggaataggctatataagcaggaagtaaattgtgttgtaaattatgcattgccatatggagcggatccccttgacttagcatgcaaggcagggaatgctgaagcggaccctgccataatggtttctgagagtgactggcatgctggttcaacagcagtccctgggtgctgagtcacgcagctggctccggggatggctaaggggcagtggaagccccgcagtgagcaggctgctaccctgatctagggactgagaatgatctagggacgaccatcctgctgccaccaagaggatgggcaaccttgagctcctgggggatagctccgggtgcaccgagcactctgcccaaggctacaggctgggagggctctcctgggctgccagagccttggctgatggcaccacagtcccaactctgaggcaggtgtgactggcctggggagacgtgcctggctgctggattgatccatcaatcatgaagaaacaaatagtctgagaaccgtccaagtgttccacgtcgcactacagagaggctggagggcagtgcttccctctgatgacgattcagcagaatcacccagggagcttttcaaaaatagattcc

SEQ ID NO: 26730 - DNA, 1225 bp, Bovine  19866881201331
  misc_feature (1)..(1): n is a, c, g, or t
nagaggagcccggcagggttacagtctatgggatcagaaagagctggacacggctgagtgactgagcatgcacctgaggataccctctcccctttccaacagcgctgtcggagaagtggggctcataccaggtcttcctttgaccctagagtaaggtttccatgcccttccgttgaattcacagtccatggtgagttaggagatagcttggatttcagaatcagacagacttgggctagaatcctagctcaacctacgttttctatgaacactgtgtttcgtctctcccagccatctgtatttgtcaaatcgggacagcagtttaaacctcttagtgtggtaaacatgaaggaaggcaatacgtgtaaagttcctaatgtcattctcccagggccgctgtgtacagttgctcaggttgcatattgctcaagagcacccaagtccaggggacgactgggggcagaaatccagccagtgctcagatctgctgcagcctgaaatgaagaaggaccttgtagtcatttgtgcaccaatactggatactttctcctaagtctgagaaaggctctggatgttgtaagaaggtccttccttcttttccatgccttccctttggtcatttccccttcaatgaacctgggtggtgaaatatactacccgaagctgctcacaattctccaccagctgctcagcccccatggactggactgcaacttcttccaagcaaacgagaggaggaagatttctcgttacctccagggccttgacaaggattggttctgtctctaaatgaaataccctttaaattgccctgaaattgcatcacttgtctcagttaagtggaatcctatggactataaatctgacttgaaagggctgtttaatttgactaagatgttacaaagggtttaccaaaatttaaagcatttgtctatggaaaatcaattatggtctaatccatctccctgatgacaggagtgttctcattttcgaatggtgcttgtgcacaggcacacatgtacacatgcacgcacacaaacgtacatttggaatgcagtggctggagtctcatgttgcagaaattccatgtagattaagtagggcttagtgactaatgagaagttatcaactgcagtgattttagcacattgctcattgtttctagaatgctgggagtttacccaccagccacagaccaggtgtcagctgcgtttagaggaaaaaa

SEQ ID NO: 26731 - DNA, 1112 bp, Bovine  19866881256276
  misc_feature (1)..(1): n is a, c, g, or t
ntagaatggcccacccaaggtcacctggaagcacatacctatgggctcctaaacccttggttgggttgccccacatctgtgctgagcatgcgtgtttgatgagtcagttcccactgacgtcaggggtgtcagagaaacactaggggtaggaatcaaaggccgttgtgggcacttggggtgagctactggaaacccactcaggaaattttcattatccctgtggttaaaaatgaatagggagcaagagagtgtgagttggggccctgaaggtgtgtgatacactctccagaggtccgttggtttgcagactgctgccttctcgctctgtcttcacatggtctttcctctgtgtagaggcgtgacagtccacagggtcataaaagtcttggacacaatttagtgactaaacaacaacacatttccaaagaacttgttctatcctccttactgtttccttctgggctgtgttttagacaaagtgtttcctgcaattaggtcgctggatctgtgccttatttcctttacctttaatcttttataaactatgacatttacaaacctccccatgaccaatctgtgaaacccaccatctctcgctgctgttgactgaacgttgctgcttagagatgctctaccgataccacctgaacgatttcaatgactgtttctctcctgctcattacaagaatgctaatcttcagatctctctctgtgagtgcattcatgaaaggactccaggctctccacgctgcagtggaggtgaaattcagcatggtatttgctgacattactgtggtctgctcacaaggaattatctgatgatgcggtgttaaagaattaggtcaaataatctggataaaccttcaggattaaaagatctgtggttgtctcactgaccaatattttgaaaatctagttatagtcagatgcagacagtatagtcattgttcattcattccacagattgaaacgtgcgcttgctgagtgtttgggaactcttctaagcaccagagagatagctctggcattccaggaacttgcagccaagggaggtgggaggcaaagcacattgatgataacacttagatggggatcagtggcaaggggacctg

SEQ ID NO: 26732 - DNA, 852 bp, Bovine  19866881407085
  misc_feature (1)..(1): n is a, c, g, or t
ncttagtgatttgcaagatatgtgaattagacaataactttaatgagctttatttctttcgtgtgtatagattcttcagggttggaagagagcttaataatcatccaggaaaaacattttagtttataaatgagaaaactcaagtccaaagagctaattgggcacaggaatgagagcaaagctcatatccctggatgctgaatcctgttggttgttccctgatgccagcatgtgggcaccatctccacattcttgactgcctacaagctagccatagtcaaccccattgccatattcagtatgacttgtcttctatggaacacaagacacagtgtaattatactgtgatttacattatttatttatctggctgtgtgagatcttttgttgagatgcacaggctcttcacttgcagctcgaaggcttagattctccaatgtgggatcttagttcctggaccagggattgaacctgtgtcccccacattgcaagacagactcttaaccactggaccaccagggaaatccctgtaatttacatttttaaaagatacaggaagtcaaacggatctgagttcacatttggcactgcctcataataaccctgtgaccagggcagtgcccagcttttatgaagttcagattcttgtctataatagagaggaagcagtacctgtgtcatgagttgcttgtgggaatttagtggatcatttcccacgaagcacccagcatagtgggctttcctggtggctcacggtaaagaatctgcctgcaatgcaacagacccgggttcaatccctgggtcaggaagatcccctggagacgggaatggctatccactccagcatactta

SEQ ID NO: 26733 - DNA, 783 bp, Bovine  19866881920836
  misc_feature (1)..(1): n is a, c, g, or t
naaatgctctgatgactgaggaaagaatagacacgcctgcagtacaagacattatcttaaagccactacaaaagacctcgtccagctttattaaaagtggcagacaatgccagagcacccgagcgctgggccaaggagcttgcaagggcaatcctcaccaccattcagtgttaacaggtgacaagttctgatagcccaagaacgtctaattcgtggctgccttcactttcctagagcagatacccaaattgattctgcctccttcaggctcgatgtgtgaaaaggctgattgacagaaacacctaagggtaatacgcctgccaagtgattggttaaacagctattcattttgaaatatatcttcgagaggcagaataacagagggccgctgtagtgtgcagcccattaattattcagttgacaagaaaattacccttcggatcaacattagtggaggcttgtcgggatggggtggggtgggggaggcaagtggaggacaacattccacagggttatctgcacagacagccacgaggccctcctaggtctggaaggagtgggtttgtgtatacagcggaaagagtgtgaggatgaagcctcccacccaagttcctgtttgtgtgatttagtggaattgattgaaccttgttaaacctcgtggtcctgatccataaaatggggatgccaaaagcagcctcaaggggacttccccggtggtccagggataagaacccacctgccaatgcagggggccgggttcgatcctggtccgggaagatccca

SEQ ID NO: 26734 - DNA, 1215 bp, Bovine  19866880581701
  misc_feature (1)..(1): n is a, c, g, or t
ntgctaaggctgaaactcccaggtactttggccacctcatgtgacgagttgactcattggaaaagactctgatgctgggagggattgggggcaggaggagaaggggacgacagaggatgagatggctggatggcatcaccgactcgatgaacgtgagtctgagtgaactctgggagttggtgatggacagggaggcctggcatgctgcgattcatggggtcgcaaagagttggacacgactgagtgactgaactgaactgaagaccgcagaacaagggacctattgctagggaggaaagggagttaaggaggatgccaaaaacgcccagataaaatacaggctttgctgaaggccccatttacttccttgcccttcagatccagggctctctctgaccagatcccaggtttcattcccccttctttacttcatttccattactgtgtcctgtgtctccaggatgttcacatggaattctgtgaaaactgtcttttgtgtgtctttcttgctttacgtcctcttctgggactgacggccacctgtccagggttcttggtcttttcacgacaaacgaccctcagcaggtttctctgaggcctgtttacttacaggcttccgagtctttgcggggatgcagaccagactctcctgctctgcaacacaccagtcatactgatacattggaatgctcttggtacctggtgtgtttcccatgtggtggcagggaagaacagggttctttggttattttgtgaacctggagccagcgcccttggagaagattctgtcacttgtgctgattcaaaaagagagttgcctaacgaagggggaaaacagttatggaccaaggcttgagctgggcagttccaagatgcagccttagaaaatgtcccccaagggcaccgtgtgtacatcaccagtcaggaaagtttcctcttcccctgtcttggtgaggtgagcagcacattcgatttcagctgctggggcctctgctctactccattcctcagctgtgtttgctcctctgctctcagagcatttgcacttggtataaactgtgaggcacggtctgagcagacatactggttactaataaggaaactggcactgacagctttttagtctctgatgagagaaaagagatgtcttcacatcagaacagttaactctcagtgtagcatatccatggtgaaatttaaagagaaagagagaaa

SEQ ID NO: 26735 - DNA, 1791 bp, Bovine  19866880614167
  misc_feature (1)..(1): n is a, c, g, or t
ntggtaaagaagctgcctgctgtgcaaacccaggccctagttcgatccctgggttgggaagatcccctggagaagggaatggcaacccactccagtattcttgcctggagaattccacggacagaggtccatggagtcgcaaagagttggagatcactgagcaactaaccgctttcatttccattcatcactaagatattttgttaaaatgaaggttctgagtcataacatctgggctaaggccagagattcttcatttctaacaagctcccagatgatactgtactgctggtcaacagatcacacttttcgagtatcaagaatctggaacacattgcagagaatatgtgtgtagtcttagagccagagtttagatctctcctgctcccacacttcctggctgtataaccttagacaagtcattttacttctctgagcctgcttctgtcatcagtggaatatagtgaataacaatagccaacacttactgaatgcttacaatgtaccaggaactaatgcttcatgttcatcaacttatgaataggacttaagttaaacaacctgaccaatgtgggtacaagaaacccagatcttattctaggtagcttgattcaagaacctggtatttaatcactgtataagactgccttttcagcagagttcccagagccatgatgagaattaaataataattcgtatttagctcacatttattgagcactcatatgctcaagaccccagtgtaagctcccctgggagcatattaactcatttatcttcacggcagacctgggagggaatatttgcaatcccatcttacaggtttaaaaataggcacaaacaagttacacagccgaaggtcacaacaccagagcggtcaaggtcggaacccaggcggtttaacagctgagccccgcgctcttctgccatcagccaggagaggaagtggccccggattccggggaccagatcgccgggatgggggcacagccgcgccccttcagggcggactaacctccaggcccgctcgctcccaaagaaaaccaagtctccctctccacttagctttctgtacatccccggggtgaagtgcccacacccaggggcacaccatgaacaggtgtcagggctctggtgaaaatgactggctaaacatcttgagaactgactttctacacacactaaaactaacagtcgctccgggacccccttaatccgcggcccccaaacttgcccagctcgcacaggaccactccctcccgcagctgcatcctgggagccaaggtcccaatcaggcgtcggaattcgtagattcggctccgcctacctccggcctccaccccaaaggccgcctctaatctcatctgctctctaacaccgccctctgccggccgttcctcgggtagccggctccttgagccccttccggggtgccccggaagcggaactttctcttccgggtcgagcgtccgggaagtcgcacgtgtttgtggtgcgcggctttaacccgtgtgggaggagacgtgactggaactgtctcccagaggcagcgagccgaaccggagccatggagggccagagcgtggaagagctgctggcaaaggcggagcgggacgaggcagagaagttgcagcgcatcacggtgcagaaggaattggagctggagttcgacctgggtaatttgctggcctctgaccggaaccccccgaccggcctgcggctcgcgggacccacacaggaggccgagctgagggccctggcgcgggacaacacgcagctgctcatcaacca

SEQ ID NO: 26736 - DNA, 1160 bp, Bovine  19866880661173
  misc_feature (1)..(1): n is a, c, g, or t
ntgttttctatctattcttccattatttctacatctttgaccacaccggggtagaccttagctcttgctatttagctcatgctatgcccttacttggagaaggcaatggcaccccactccagtactcttgcctggaaaatcccatggatggaggagcctggtgggctgcagtccatggggtcgctaggagtcagacacgactgagcgacttcactttcacttttcactttatgcattggagaaggaaatggcaaaccactccagcgttcttgcctggagaatcccagggacgggggagcctggtgggctgccgtctatggggtcgcacagagttggacatgactgaagtggcttagcagcagcatgcccttactaggtgctgaacagatgtttcttggaccacatataaaatgaaacaggcaaaagaaagtgcatgtattggcgatgatgtagcagtgcagcaggacagctgccaggccaggtgaggcaaagatctaagagcaaatggcctcagaccacctcaaagcacacacgctctattttccagaacagaatctgctggcagcttgctagccctgtctgcctcctagaggggacagatttctgctcccccccaaaccttttcctttcttttttgagacccaggcacctgcatccctctcatatagaataaaggaagaattggaaataaaagacacgcttaaagaaaagaagtactaattttgaaagattatgctgtggttaggttaatcttacaatcccaggagtttagttttgatcactttctgcttatcatttgcttaaaaaaaaaaaaagacaaccatcatatttaaaacaagctataggaccttgtgggcactaagccagtgtcttccacgcttggatgagcaaacaccccttcagaggattcactaaaacgcaaaacctgaaattgcctgctccagtggttagaacttcatgttgccatttcaccgggcatgggttctaaccctggtcagggaattagatcctgcaatcatgcggcggggtcaaaaaagaaaattgcagaaggtctgggcagagtttatcatctttacaattctaacaagctcccgggtgacgcctgtattctggttctgtggactacaccttgagaagcaaggatttatacatattttcaa

SEQ ID NO: 26737 - DNA, 2777 bp, Bovine  19866880717074
  misc_feature (1)..(1): n is a, c, g, or t
ngtctcagtggctatggtcccatcaagattgttcgggtgatcaggaactcttatttgtttgctttagcttttagttcttggttatatcttcaaatatgagagagctcagaggctcctgctgtcccggcaaaggaattaacagcaagcagactccagttttttggaataattacgagtgagtatcttgaccaaataaaccctgtagccagaagagtagcttcagctgtgctgagtttttctgcaggtctggccatgccagctggttcagcgcacaccaatcctcattttgtaattggagcccagaaaaaaaccctgtgggaccggctgggtggttgtacaatggcctcaagttctcagacaggaggaactcccacttcatcaagaacctggttgtaggtggcctgcaggccctggatgccggcggctgacatttctatggatgagtgatcatgggcagccttgtgggagagtggccacatgcttgttcctagctggcggtgaagggtagctggtcatttcctccagcctcaatgcttcatcagagaagtcaatggcaccccactccagtactcttgcctagaaaatcccatggacagaggagcctggtaggctgcagtccatggggtcatgaagagttggacaactgagcaacttccctttcacttttcacttccatgcattggagaaggaaatggcaacccactccagtgttcttgcctggagaatcccagggacgggggaacctggtgggctgccgtctatggggttgcacagaatcggacacgactgaagcaacttagcaacagcagcagcaatgcttcatgccctactctcttaggggagagtagggtgcccttcccacagctcagcctgccccttgccgaccaccctttagtttgtgctcagagttctcagtttatcatgctttctttgatagagtaaagcaacagattctcatttttgcttatgctcatttgaattacatttctgtcaaatgtagtcagaaaaacgtgcaggcactaagctatgtaccagtgacttaaagagaaatatactaaggtctttatctccaagaacccatgttctagtgaaacagcatgttttaggccaatgattacttttgtggtcttccctggtggctcagatggcaaagaatctgcctaccacacaggagacccaggtttgatcgctgagttgtgaagatcccctggagaagggaatggctacccactccagtattcttgcctggagaattccatagacagaggagcctggcaggctacacattatatctcatttattattttagcaactctgtgaaatagatattatcattgtagtagactcctgtttttcacaatagatatatggagagatcgtgggaatcccaaagttgaaaatatagcagagaagtagaccttgcattatgtatcttaaattaacaaatggaagattgaatttgatggtatactcattcatgttatagtattgcaagatgcaatcaaattaaacacccttctattttatttattcaaaacttttattaagagctacatttttttttattgaatgtttttctctaagaaaataaattttaaccaaaccatgaaaataactgacataacattaaggagaaaactaagctctattgagttgtatgcagatgttgataagttgactaggtacagcagcctctggataaacataatttaaatggatacctcagccaaatggcacagtatttcatgtcacgaaccttcaggatgattctaatataaatgtagccatgaatcttaaattatggagtattcatatcctactgtatttataaatgaggaaacagacaatcagagaaagaaagtgacaccaagataataatacatcagttaaggaggctagacttgggcttcaatcatattggtctgtcttctggttcagaattccctgacctgttacagtaaggagagcaaagattcagctctaaggtgggttaaagatggtcacaaagatgttggcacttctcccactgcaagtgtctcttccactggaacctaggtgggctctgtgactgctttaaaggacagaacatggtgaagatgacactctgaccatcttggggcccaggccttaggaaactgatggcttctgctttctgtcgtttggaacactcattcatagaagccatcctccaggaagaagtatgaccaccctgagagcaccatgttgtgagaagtcgaagccctgtggagaggacctggagaatgagacaccacatggtgcatgaccaagaagtgctgaaacgctaaacatgtgaggagatacatgagccggcttgtgagtggacactcaaccttagtgaccccaactgacagcaaatggatcagaaacacaagttgcccagttgaggtcatccaaattctgaaccgccgaattctgagtacataaaatagctgtttgggatacataattttgtggtagtttgtaatgcagtaatcgaaaacaggaacggatgtagttgctctcattataaaaatggaaaatatgtggcattgattttgaaactggacagtgggctgagactgaaaaagagtgttaatggagaaagacaggaggttagtattgaggtttggcaagagggcaacctctgttttgtattcatagtgaagtgaggtggctcagtcaggtccgactctttgaggccccgtggactgtagaccaccaggctcctccatccatggaattttccaggcaagagtactggagtgggttgccatttc

SEQ ID NO: 26738 - DNA, 750 bp, Bovine  19866880756045
  misc_feature (1)..(1): n is a, c, g, or t
ncccgtgaagctgcctgcggctcatccgtgtcccgggcagggacacgaacaagctcagccagaccagcagcagcccacagactcagggctccgcacacatgtgttgcttcaaaacactaactttggggcggttagttttaaagccatagctgatataactgagagaaaaggtaacaagttcccgtataaatattactcttaaatgtaaggttagaatcacttacctaaaaatctacgaagtttcatcatatctaaatggaagtactcaattaatccatggagactaaataaatgaaaggttaaacttactagactatttcctaaaaagaaaggagaggagacattagtaggaatacaagatattaataacataactgcactgtgcttccaaataagggtttgaatatacaacataaagagtaccaagtcctaccttgttgtccatctaaaatttacatcttatcttcccagttttgaattttaaatatcacatctttttttccattctaagaaaaaacttttttttggttttatttttcaaaaaccaaacaaatggatgataaataattagaattgatagaaaacttcgaaaattatccacactgcagtaagtttaattcaatttcccaaagcacttaaaacctccttgcaaccatccccctaactgagcaggtgtgtcccagagcaaagcgtcttgactacaaatgctgtattatttaacaattaaatagactctatatttaaaggtgt

SEQ ID NO: 26739 - DNA, 1145 bp, Bovine  19866880789375
  misc_feature (1)..(1): n is a, c, g, or t
ncgatataaatactgataaagatttaagtataaaattaggattaggacttcccctggtggtccagtggccaggattccacactccccaatacagggggcctgggtttgatccctagtctgggaactagatcccacatactgcaactaagacccagcacagccaaataaacaaacattaaaaaaaaaaattacgattgaggattattaccattatttagtgaagcccaaatttatcatttacagcaaattaatgttttcagtgttgaaaagcatcaaattttatttttgaaagagacacactttcagtattatatctgacaccaaaagcaggatgagtttttctaataaaagttgtcttgctgaaatcataatttagctgctatgttttctagaaagtaaatgaaaataatctgtaccaggtatccaggtcattggttttacttaaaatgtaacctttctgttcccacatgctttagtaaatacacaaacttgtcatcaaaatgatgcaaaacccagctattaagtctctcccttaaaccccatccaaagtttaaagagagaaaaaaaaaaggctgtttaaaactcattcctagttttcacagattctttccctacttcagatgtccttaaatacaacctttaatctccagccagagttttggttgtggttaatacattaatgtgtccagtccaatatttacatatcatcttcagaggagggtagtcctggccctttaacctcaagctcaatgaaggcagtggccaaatcttgtgcatctgggtactgtatctagaacttagcataagtacagttcttggtttaggagaaggtccaaggatgaaatttacctcctcctctttcctccttggtgttgccccccttttctcttgccactcaggccgggaggcccggaattcatcttgcctcccagaccccctttcctcttccctccttggctgggagtgccccctttcctcttactcccgggaccctgtcggcccccctttctcttgcccttctgactcattttcctccgcttagccgcctcctcctggtcctcctctctcatctgcttattggtggccctcgtaatgtccatctgaggctttttgctgttcatcactcgcagcatctccaactggct

SEQ ID NO: 26740 - DNA, 1983 bp, Bovine  19866880801414
  misc_feature (1)..(1): n is a, c, g, or t
ncgaaatcaaattaatgcaggcatctttaaagtcagatattatgttcatctacaacattttcatgtttaaaaagtacaaaataaaggaaaagggatattttttaaccttggagaactgtgaaggggtggacaaaaacaagcattttcgtggaaaaataaacattatctgtgggaagaaatcctaattaaagaaaatggaaaggcaaagaaagaacaaaattccttaatgtacaaatgctttgctgagtctttaataggtaaagagtcagggtcccaaactgtgtttcctggttctgtgatagtagaacttcctgttctactgtagaactgtagaacttcctgttcctgtagaacttccaggtttctgggcaggattctcaaagcgatgtcctgaggcctcagaactggggttcttgagggcagggctggtgatctgtgttttcacaagccctccagactctcttgggcttccctggtggcttagctggtaaagaatctgcctgtaatgcgggagacccaggtttgatctctggtttaggaagatcctctagaggaggagatggcaacccactccagtattcttgcctggagaatcccatggacagagaagcctggtgggctacagtccacggggtcaccaagagtcagatacaactgagtgactaacactgtcactttctttttcaatcatttctctaagtttttatgaagacatttaggaggttagcaaagaagtatttatgatccatgggaataatttcttcttaatttctcaaaggactgcttaatggaattgccctcaagtgtgttcatggaccaaaggacaattcctcccatccccacggaagccctatgttggggaaaagtttggttggaagatctggtttgtagttaatgttacccttttcacgtaattagctttgtgatgttgtgcaagtcacaacctctgtaagctataattttctcacccataaaaatgtactaaaaatacactgcctcaccgagctgtgaagatgaaatgaaatgatgtatgtgaaggtggcttgtaaatgctaaagcatgatataaaacgttagtcgttggtattagaagagtgcaatatctcgtcccaccttgagagatttcgaaagcacaattctctagcttcacagatacaagtcgtttcgtgcaatgaatgcaggtaatttttgaataccatatggggacagtatctagagaaagtgaagagtatgaaaggaaagaattccagtgagagcctccctctttatagctcattccttcctgtgcccgcctcagcaaacactggggcctgatttggcactgcagcaacactaatcccgggcttttgagcttttctccttatcatcagatctcatgggcaacgtcgggtcacccagaagtcacattactggttaatctaggattggtctgctagctcaggatttctgagttcaggctaggatgagaatttgttatttctggcagcctatacattgttggaaaaacgaatgattttcactgagactctgttctctttctatatttcaaattgttcgaatggtctctttctgtgagtggattcgggtaagaattagccccattaggtgcttatcagaaaatggcgatgctgacaagatccagagagtacagcctagagtgaaaatggcatgtccagaagggtaggggacaaccctgaaagcacccagctttgagatgtatctctgacacttaaccaccctgggccttgatttcccagcttcaaagtcaggcagttagaccaaaactgagtcatgaggtctcctacatctctgcccacatttaagattctatcattccgtgggtcagtttagagactagggggtgtaccttcccaacctcctaccatggacaggagaggaagtgctccactggagggtcccagatgggcctttgggaggagtaaggattccactctggacatcacaatgtccagcccaggctcaa

SEQ ID NO: 26741 - DNA, 2163 bp, Bovine  19866880949355
  misc_feature (1)..(1): n is a, c, g, or t
ntttttgctaaataattagttcttgtaaagcatttaatgggcttccctagtggcactagtggtaaagaactcccttgccaatgaaggggacataaaagattcgggttcaatccctgggttgggaagatcccctggaggagggcatggcaacccaacccaccattgttgcctggagaatcccatggacagaggagcctggtgggctacagtcccatagcgttgcaaaagagccagatatgacggatgcgacttaggacgcatgcacatacaatgcatttaatatataatttacaaaatttcaattgcactagaaacacttcagtttcaaaattttaactgacctagaaacaatttctttgtacaaagtacatgtaggaaaccactaactttggattatttgctgctgctgctgctaagtcacttcagtcatgtctgactccgtgcgaccccatagacggcagcccaccaggctccccgacccctgggattctccaggcaagaatactggagtgggttgccatttccttctccaatgcatgaaagtgaaaagtgaaagtgaaattgctcagtcgtgtccgactccgtgcgaccccatggactgccgcctaccaggctcctccgtccatgggattttccaggcaagggtactggagtggggtgccattgccttctccaggattatttgctaggtctcatgttttcgttaacagaaattgttgaaactaaaggtctttgttcagacttttcactttctcttggttatttgtgcttctcttggaaactctagctcagcttttaaggccaagcataattctccaaagtaggagaaggtgtaagcaatagacctcattttaggatgattcagtctgggcgagagagcacaacctctggagtcaggtattcctcaggttgtctcgtcttcactcactaccacggagttcaaggaaaattttacttctctgaactatgtccttacaaattaatggcaataacaacacatctagctcacaagtgtggagaaggaaatggcaacctgctccagtgttcttgcctggcagcagcagctcacaagtgagtggtgagaagaaagtatatgttaagtacctaatcacaaagctcaataaatgatatattccttaactcctgagccatgattgtgtctgcttcttccacgggtgtaagcagtagtgaagaaggaaatggcaatccacttcagtattcttgcctgggaaatcccatgaacagaggagcctggtagggctgcagttcatggggtcacatgactgagcacacacgcgtgaggagggtggaggaagatgtgttggaaataatgcgctggcagtatacaggtagaactgaaaaaaaaattggaaaaattttcagaaaaggtgccttggtgagaaaattagatcaatatcagccttagtttttggagatgtagatcttcacagtgtgcctttatatttggcttaaagcatttctgaaagaacaggttgttatgccaaaatgggattacacaaatacattacaaaacaaaatatagtttttagaaatttcctaagatgtctgtgttattggtcctgtatataactttctgttcttcaaaaagagaggagtcatatagcaaaggggatcctcaaaggatcaccttacaggatctacactgaggagtccctacaacttgagttatgacacagtagaaaatgtctctgctaatgacttgagcgttctatttcttggatctgtgatcatttattattttaacctttcaaacccagtaattttaaagcattcgactcagctacagtacttttattggcctggaaatgttttattgcagcttggctgacattttcccttactaatgtcattagcactacttaaaaatgaattatgtaggggtgtacagtactacctttgttttgagaaaatcttacaatttttatgagcacatgaggtgggtctcgtgggagtaaacattagcaacatatatctttctgattcttcaggcatgcttacatttctaagaagcacaagtagtttggcttggaaaaaggcctggagttagatttatttttttcaagatcatgttgattctcataacatcccttaaagaaaagtccagctttcagggtcactaaggcttaattaaaatctctagca

SEQ ID NO: 26742 - DNA, 1286 bp, Bovine  19866881001228
  misc_feature (1)..(1): n is a, c, g, or t
naaaaacacacacatttctttgtccattagctattttttcttgttaaatgatatggaatgaagtatgactaatggacatattcataatccagcccaaacgtcccttttatggttgcctttcctgctgctgctccatacacacagtgtttcctaagtgttgaattattcttctgtttcttgaatatatgatatactttctcatttccagatcttccatcataaagtgggagaaataagaatgaaagtattagaaacattagacccaagctgacattgctctagaatctgtctcccaaccacatttttaaacgaataggaaaactgagtctggttcagggttgcaggacttgttttagttaatgtgaggatgtggtgggatatgacttttgacaggaaggagtgagatgcagagaacagcgttgacagggaagccctaccagtgagatgcaggaggaggggccaggtgcttctgagagtcgtgagttcattcgttcatttagtgtgtatcagtctgaatgtcaccaggtgagttaggcggtgacagaacagaaacgggtgaggaatattaaatagagagcagcttcattgaagattggaaatgtgaacatgcacggtgcgtttgggaagacagagcagttcagaatggctgacacatttgcagggctagcggaaatgagactgtgatgatcaggggggccagcttgtggaggggtttgcttatcatacttggttctctatttgaccaacaattactgaagacctactgtttgccaggagctatgccagcactggagacagaagagtgagaaagacagtgttcctgctctccaggagctacaggcatggaggaatggtgtgggttaaggctgtagactgatggaaagttcagtctcatggcacccaagccgaaggggactggaggcaaggagtccagacagataggaaatagcttcctgaattcaagggagaaatgatgcaagcctggactttggagagtgatggttgatggtaatggaaaggcatcatgggccagggagaaggtcaaggaggcaggacccagagagggaagcctgccaacagcctctgactgcatccatccttgtctggcctgaagatggtaataatgttgttgcatattagcttttgtttctgcttcttatgggttctcagagagagagtctaactgcccatccttcttcccatggcttgaagcattgcacctgtatttccagtaaacacagaatattgttagccacgttcacagtcaactagttcatcataattga

SEQ ID NO: 26743 - DNA, 1266 bp, Bovine  19866881126049
  misc_feature (1)..(1): n is a, c, g, or t
ntggttgggatatgtaaacttagcctaaatttcttgaatggatatgcaataaatctatttataacattttctctgtcctacttaacttatgactaatcctaaacaattagagagtcagatggctgagtatttaaagcagccaaacattccaaacaaacaaagggtaatttctactgaaagctggagacctgagcccccgtaggtatatgtttatgggacaactcaggaagagctgcaaatggaaactgcaaaaggaatctccagaatgctgcagtctcaatataaggaaaaaaggaggtgccttaaaatgtaagtggcatggtcaccttggtggcagggccaggaggactctccacttaataactttagaagcaactttcactgttttctgtgcatctcatgaaattctaccatgtggacctttctcttaaaaattttaaaaatagaaacctttatccactgctgtctttttaattgtgccaacatctctaaaatccctcaacacccccctccaagataaatcttttataaagaaccctaagactatcatttcacgaacacttgaaaatattttcttaacactgtccaacagtgctcaaaaaccagcctgatacatatagagcctcctttgtggaataacaagattatttttaccattttccgaatctcacaaatctgacctgtcaccagagaacttctaaaaatatcaggattataatgatatccttcatcacttccctcctagcttgtgccttcattactagcgttgagtttttatgtatttcctgagagccctctctgatcacagcactcgtcatttcactgcttcaagatgtgggacagaatagctatcttgggaaggtggctgattttttttccccacctttaaagacaaggtgtttttgcaaaacattcagttcagttcgctttctgcctatctcttaaatcacgtgtttgagttggaagtgtattggaaaggatcctggaaaacaaatgctgactgaggaggaacttgttttttcactgcagccaattcaattcagcagcaacatttatcaagcacctactatgtactaggaatgtaaagatgaataaaatactctttgccctcaagtagctcacagcttaccaggatagacaatcccagtaacaagtaataacagcaagccgtgacagggcaataaatcacactgcacactgctgtctgtgtaaacatatgagaacacctgtaagggagcagcaaatagtacgagggaaatcagaaag

SEQ ID NO: 26744 - DNA, 1532 bp, Bovine  19866881165181
  misc_feature (1)..(1): n is a, c, g, or t
ntgcacattagatccccaaattttgttcaataataatacataccatagacttatgatcattttaaaaaaactgaacacctcagatttctcacccaaattagattcgtttccagtgcatacaaaatctgattgaaataatcccacgtgaatggcaccccactccagtattcttgcctggagaatcccatggacagaaggagcctggtaggctgcagtccatggggtcgcagagtcggacacgactgaagcgacttagcagcagcagcagcagcagtgctgttttggcatgctaccaatatactaactcaacttccacacttaataagcacctacctatgaaaagcactgtggccacagtggtgaacaagataatttctggtctcacatttttgttttccaaataacaaaggtattctgcgagagaaatgtttaaattcagctaacaaaaatccccaaaatggccacacacacacacaaaaatctattatccttatttttcaaataattcaaaaacctcattatcaaccattcaagaaagtagtacatgacctgttttaaaacaaaaagttaatgcctcatttacttggcatccttgggagaactggtgctccacataaatgaactttccagataactcatgctttcccatttaagcaccaacacaaactggaggttttgtttgttttaaacagtatcaatctttaaacttttaaaaacagattctattaaatactattttgactaatgtcaaaaacatgattgtgctgtagacacttaagatgccaaactttttcaaagatgctggttttgaagagtgtttcttgcagtcttgagcttatggtgcatcagttgtcaacctttgccgctctcagtgtaaacctgactccagaagcctccaagccccctgcaaatgtgccgttacttggaaaaggagtttgtcagaactcagaggatctccaaatctcctttggctgctcagagtcttctgatttcctgaatctgttaaaaagtctacagttacaaactccaaagcaagttttggataaatcagttactgctagacctggatgaaagtctttatgttgatttcctattttcaactgaggctcagtcagtgataactgcattagctattcactcattcaaccagtatttactaagtccctactatgaactgggctccaatatgaaagtaaaaattgaaaaatgaaaagattgctagttgtgaacatattttaaaatagaagtactctaaaaaaaaaaaaaaaaatagaagtactctaaaatgacttctacttagtacctaaggaggaaaaaaacaagaacaggtttcctcaagtcttttcaatgaaactacaaaaccacctaaactttttataattcctgtagctctagacttagaaactcaagattcaagggtaaatgaagcttttgatttaaccaaatatttactttagaagctctgattaagggtccaagaatttgtctctttttcagtctattacaaattcccattggcctaaaacaaatca

SEQ ID NO: 26745 - DNA, 944 bp, Bovine  19866881323458
  misc_feature (1)..(1): n is a, c, g, or t
naaaaaaaaaaaagtcctggtttcaatgtggattggaattatcaatagaaacaaaactgcaaagagggaactcaagagatggaattatatcttatgctctgtctccataggaaactaagctaaaagactataattcctggaatcttgaaattctgggtgtaccaattgcactgaaatcgaaatgggtatgataattaaatgacagttgggtttgatcaattagatttcaatttgggggttgagaaaagaggttttgggggacccacgtataatatacaaaattaattctggtcaatagtttgccctttcttccattatctgctactttataagcaaactttgttttaggcttctgctatctacctgaccaaggccacagtctagtgagacaagcccaggaaagacgagggggcacaaatagacgctgagacaagaatgctggctgcattccttggcctgagcccttgtggagggtgggctgagctgaaacacgcactagatcgggcccacacacagagagctattcctttgcaaacctgaagggaactaaaatccactgcttttctctttttttgcttttgaatttatccatcctgtgaagggggaggtggtgcccactggctcccagcagaccacagagtctgaaactccagtcccagcagcaacggacactgcggagcccttgctttaccctagttggtataaaggccagacccggaaatccaccgccaacccaccttccgccccagggagcggaagtctcgcgcgcgtagggccttcaggttccaaggatgttcatgcgcggaaggctgaaggggcggaagccgcagccagggagagggcagcagtgagtggtaaggatgctagctcacctgcagctacttctcaggttagtgtcaatgaatgctctggggtctgaatgctccctgcgccgcctggtcctg

SEQ ID NO: 26746 - DNA, 850 bp, Bovine  19866881379749
  misc_feature (1)..(1): n is a, c, g, or t
ncaatttgtaaaataagataacctaccccccaactggggcctccttggtggctcagatagtaaagaatccacctgcaatgtgggatacctgggttcaatccctggatcaggaagatcccctagagaagggaatggctacccactccagtattcttgcctggacaatcccatggacagaggagcctggtgggctacagtccatgggattgcaaagagttggacacagctaagcgactttcattttcacccccaaattgtggaatacctgaatataacaacataatcttaaaaactttaaataattgtttttccaacttaatatccacagttcataaataattaattttgtcttaacctacctgctttctaatggcatatgtgagaataaaccagattctctcaataaccccactgcagatctccagtggtgattttccagaactgaggtattctaccaaaaaaacaaaacaaaacaaaacaaaaagggcagatctgaatcagcaaagggtaagtctttttctgaacataaagcaatatttctaagtaatatcaagctggttaaaattctaacattcactgagaaccaatttacttttactcctttaaaacgtgacccattttctagaatacaagaatattaaacttagaggaagagcttgcactcaccttgtataaagttgccaggtaatggttagttttaatgaggaaaggttgattaacacctggatgatccagatcatgagtggcagctgcaattaagctcagcaagacgtcccaaggagttacagagttggcaagctagacggtggcgaggaataacgattacagacgtgtctgcaacgaactgtac

SEQ ID NO: 26747 - DNA, 647 bp, Bovine  19866881403630
  misc_feature (1)..(1): n is a, c, g, or t
naattcttgtttttgtaggttgaaaataattatcaatttcatagggttcaacctaatatataatattatgctttccttcttttaatggaaatgtcatcatcaattctattatcaatgtcaatagccttaaaataataacatgattatgacagctaccatttattatatgcctcctgtgtgccaggtgcgattctgagcacttcacatacattatcccaatcttcctatcaactctgagtaggtggcctttcccatttagtagacacagctttaaagcagttaaatgacaagtctgaaggcacccaacccatagctggcatcatgggttcaatgcctatgtggtatctactcctttctacagaatattcagaacatagagaagatccaaggctagtaaataaacttcatcacaaatgctgctgctgctgctgctggctaagttgcttcagttgtgtcagactctgtgcgaccctatagacggcagcccaccaggctcccctgtccctgtgattctcaaggcaggaacacaggacataaatgattggcacaggctgcgtggagtgctgtgtggggctggaatctgagataaaggaatggtagtgatcaattggtaatgtctgcctgtggagctgattaatgggatgtgc

SEQ ID NO: 26748 - DNA, 1252 bp, Bovine  19866881461895
  misc_feature (1)..(1): n is a, c, g, or t
ntagaagacaaggtgtctttgaataacttgcctaatttttcttcagtttgagtagtgttttttttttcctcccccagatctttctctaaggcggctctatatttcagtaggaaatgccaatgttgatatgttattgttatgtatttatatcatccacagggctatcagaaatcctgatgatcttgaagcaaggtctaatatgcacttggcaagtgcttttgctggcattggctttggaaatgctggtgttcatctatggtgagcaaatctgagattttatttcttcacctaagctattgctctaaaattttattttagtgtctatcatttgggatgtgttgtaagattttaaacatgctacagaaaaaagaaatttaacttagggtcccataatattttcttagctcaaatgcagtttattgggtcatagattattttttctttttggtaacagccttattgacatattattcataccctataaaatttgcccattaaaaatttataattcagtgggttttagtatattcacaagttgtgctaccattacaataatcaatttagaacattttgtcacctttgaaagaaatcccatatatcttaactgtcaccccacccaatcctcctatacccccagtcttaaacaactactaatctactttgtctctatagatttgccttttccagacattttatagaatggaagcaaatgatatgtggtcttttctgtctggctttttaaatttagcatcatgtttccatggttcatcccatacacattatcagtacctctttcctttttcttgccaagtaatgttctattgcatggatataccacattttatttactcatcagacgatggacatttgggttgtttccactttttggctattattaatagtgctgttataaataatcatgtataagttttcctgtggacatacatttcacatctatggggtatatacctaggagtgaaattgctgggtcacgtggtaactctgtgtttacattctgaggcactgccaggctgttttccaaagaggctgtactgttttgcattcccaccagcagtggatgggggttatgatttctccacatctttggcacctgttatggatttttcaaacaccaaacgtaggattttcttcttctgatctctctcaaaaagaaaggaattagaatatttgttgatagcccagaattaatctgttgatcagaaatgtatggtatgtgctttaaaattaaaac

SEQ ID NO: 26749 - DNA, 1242 bp, Bovine  19866881626145
  misc_feature (1)..(1): n is a, c, g, or t
ntccattaatataccatggatctcatttttaaaatttttacagaggaattccctgacgattcaatggttaggacttggtggtctcattactgcgaccctgggttcactccctggtcaaggaactgagatcccacaagttgtgcaatgtggccaaaaagaaaaagaaaaaaaaaaatctttcaggattagctcatgatggtggacaaaatttttcaaaattctaatactcacttgaaagtttgaaatttatcattgacaacaaacactgttgttttccttgaagaaagatggccacttgggctggccaccacacagggtaatagacatttgttgctctattttgttgcccagcatctgaatcctcttataaatataggtattctttcattttatgagtcttttggagaggcaatcttgccacctcctatgaaagtcaaggaacaagtaccctgtgaccttgaaccctgcatataatctgggaatagccaaatgtacatgcctacctgagactttagacctggagcaagtaacttaagatgaagaggttgtattggcttgttagttcagcggcagtggagtatagtgataataaaggtggtggcatccatgccaaatgcttctgtctagcctgtaggttaccctgcccatttccaggctccgctccattttgtacatctccatctcatcatttgaaaaattgtttttgttgtcctctttaaaatagtcaaatttgtttgaaaagaatcatgactgattcagaagtctgaaatctgacctttgccctctgatatggcaattgccttgtacagtgaagatactgactatggggtacaaggacacttctagagaagagaattgcatgaacaaaggtgttggggtgggaaattcactcgtttaatctttcagtgtgtatttgctgattttccactttaggtaagacatcattcgagatactgtggatacagtagtggacaacatgagacattaatagttggttagggaaagggaaagggggtgagaaaaaagggttaaaatgacaatcatattacagaaatgaaattggcaaggctttgttaccgactggatctagacagtgaggagagcggagggttttgcacccaaatgaccaggaagacagtggtgtctttaccataaggagaacagaggaagaaagttgggtggggaagatgaccatttccactgtagatttagtgagtttaaggttaaaaggggcaacttgat

SEQ ID NO: 26750 - DNA, 2218 bp, Bovine  19866880182519
  misc_feature (1)..(1): n is a, c, g, or t
ncaggagaaggcaatggaaccccactccagtactcttgcctggaaaatcccatggacagaggagcctggtgggctgcagtccatggggttgctaggagtcggacacgactgagcaacttcactttcacttttcactttcaagcattggagaaggaaatggcaacccaccccagtgttcttgcctggagaatcccagggatgggggaacctggtgggctgctgtctatgggatcacacagagtcggacaccactgaagcaacttagcagcagcagcagtgtatgatccttgctgatgtaaagtattaagatgttatcagggttcattttgggtacgttcactgcaaaccaatggaatccaataagtcttcatagagaaagaaagactgaaattggccttgaaggatgccctcaattttcaaggggcaaaagagaaacagggaccacttctctatatagagaaaatgtctgtctatcttttctgctcctgacatgggttggcttgtggggcaggttgtccccgtgactcagaatagaagcctaatattgctgacttgggttttcctggtggcttagcagtaaagaatctgcttgctaaagcaggagacatgggtttgatccctgggttgggaagatcctctggagaaggaaatggcaactcactccagtaaactggcctggggaaaccccatggacagaggaacttggcgggctacagtccatggggtggcaaagagctggactccacttagtgactaaataacaacaattgctgacttaactgagttctacaactttctcgttttataaatgaggaaatcaagattcagggcacaaggtcacagactccaggtcttctgactcttgatctgttagtcctcctttacattctgtgtttaaaacctcctataattacactactagttctcgattggtcaggagttgacttcagaccataattgaattatgactaatgcaatgcaaagtgtaagctttgcatgagccataattatacaagaaacagttgttgattttaatttttctctactttggaactttctgatttagtgaaatccccgcagtaaataattagttggtatttgcaatgcttactctcttgagaaaggtgctatattaatacaaagaaaaaggccctttggtttcaagctcaagtacctctgagcctggaagtatcaattagccagcaaaataaactcatagaacaaaacttgatttgttgatctgatatacagaggagtcaaggcaaagacacaataatccaagtgattgggcctgggcaaaagagggaagactccatgaaccaccagaaaggactcttgattttcactcaatttttgatgatagttttagcaatatctgcggaggggggactatggtattttgagccacttttgtgtgaagataacaagctctgtctgtcatccctgtgcctcattgagcggatgctgtaacattgcagcgaagaatactatcaccaagttctagtaggtggaacctcaaggcagataaattgtcttttgaaataaatggaaaccatttgatcatagcctgagagattgcaaaaatcaggcatatattgaaaaagaagaatgggttttctcatagggcaactgggagctccaggaaataatgtgtgttacagtaactaaccgaatctcattcctcactctggaaccttcttccttgagtaaatactgtatattagctcttgcttggagctgcgtggaaaggcccagtcgtgtttctgggcctgagcctgggactgcaattctccagaagctgatttcttactgtcggccttgatttactaactggcccatctcctgcaattccagccatcaccctttggggttcatttcatcacagacctgcttcctccagccaaatgccacttctttcccgttattccacttctagtagaaattccaattttttttttttaggttaagggtttgaaaccatcaacttagagaaagtatttctttctgtttccaaattgatctctccttttctcttgaggatccacatccttaagccatgtactgagaggaggctgtgtgaatactggtgctcattcctggaaccctcaaagaaactgggaagtgatctcagataaagtatcattgtctctatttttaggatgaaactaaagaagcccagagaacttatcaattggggtcagagccatattaacgtaaa

SEQ ID NO: 26751 - DNA, 2581 bp, Bovine  19866880357450
  misc_feature (1)..(1): n is a, c, g, or t
ncagagaccctgattttaaaaaaaacaacagcgagttttcgtgttgagatagaaaccacagcagcgttgaaagatttatttcctgcctttataacctcaaggccaggcccatctctgcccagtagcccagttgcatgcatgcattagtgtctgcacgaatgccaagttgttctgtgatctcctccccttcagctcatgtaacttgtttaaactcagtgatgagggggctgaagttgggctcctttttagcagtgactttgggaggtagggaggactttggtaagacacgatgctgggctcagctcccctcgtgagtgaactgagataagaaatccaatagaaccagacattagagtgtcactgtttgtgtctgggagcgaagggttttatttggagacttgagaaggagtctctgctctttataaaacaacagagggaagtttagcatttgcgtgggcagctttcatcggggagcagatggggctttcaagacccaggaaagttgccagatgccacatgtgccttggaaggcaaaggccatgttctgtaaggagctgaacggaacaccggttgtccctgggccttgggagtcatgatccttcccaagaaggcataaagctcccctgtgtcccccctgcccaggaccaccctcagccaacactgccgacaagagcaaatcaggtaggactgatgtctcagaaggacagctggcagggagatagggaagaatccagatcagattaatgatctgacttgtcgtattgtcagagtggaagggcatgggcctgggggcatgcaacaaccttggtgcagcctgagtggatcacctttttttcttttttttttaaatattattttgatgtggaccatttttaaagtctccattgtatttgttacaatattgcttctgtttcacgttttggttttttggccataaggcatgtgggatctcagctccttgaccagggacggaacccacatcccctgctttggggggtgaagacccaaccactggacaaccagggaggtcccctgagtggatcacctttaacctgtgttaagacttgatcattattaccttgaactagttctgggagaggctgctgatagttggtaacttagctctgggctcagatggacacttttttggcctgcgtttgggctgtgtgtggtttgcccatgttgcgtcacgaactttcaggttcctaaggagctaaagacttccaggtggtgttacctgtctagcgttggggcagcagcaagcctatgatattcctctgatggtttgaagtgtgtagcagggctgctggaaaagacatagcctgagagcctgattcaaccttcacatcctgcctggtttggcagaaagaaaattaagggtgttctttgtatggccttagtcaccctccctggctacacgtgcgtgtttgtatatgtgcacttacgtgtgtgcgtgtgtatttgcgcctgcatatgcttcgtctgtttctcattatggcattaagggagaatttgtggagagtatgataatgggtattttccttctatacaatgaatctcaaaagtttaagagtgctaaaaagtataaaagaagttaggcatgtggctatgatatgagtaggccctgcagtccatctggctggtttgactctcagttctactccacacaccagctgtgtgatttgttgttgttgttgttgttatttaacttccctgagcaccaagtttcttatttcaaagacccggttaatcatgtaacttaccttaaagggttatggtgaggcttaaatgacataatccacggaaagtacttggcacactgcctgtcccattgtcaaggatttataaatgtaaattaccactgtgatgaatcaatatccctattaaactctcagtgttgtattatggatgggcatcctgtgtttaagtctttgctgaactcatgcatacttgtagcttcactagcctttggagaaaacttaccccagatggtgttcctgggcagcaggaagcccctgtgaacagcagcccttgtcccacatggcaaactgagtgcccgctggcttgggattttgagtgcctgtcctctcctggcctcattccaggctggcactgctggccaacgttactagagctctattctcaactaaaggatcaaagcaacccccctccaggatgaatgcacttccctccatgagttttaataagttaattatctaattgaaaaagccatgcaaatggcaagagatgttgtgggagagagtgcatgtggtgtgcaaatgtgtgtgtgtgaatgagtgtgtttatggctgtgtgcaccctcatggagtgaggtgaaggaaaatgaaaaccataaatcccacactgctgttcatggagcatctttggagtttgaagattatagtcgaactctgccagttcattcattattgaatcctttaattgacgaccgtggtggaaagacgacagcagcacatccttggcagggaggcaaattccatttgtttgtttattacagttgcacaatttatctagtggagagcgagggatgggaggtcacccgtgcttcatgggtcaatat

SEQ ID NO: 26752 - DNA, 1638 bp, Bovine  19866880556628
  misc_feature (1)..(1): n is a, c, g, or t
nctttgtgctggggagagtgcttgcattctcttaggggacagaaaccacctcatgtggagacctgctgtcagtcaaggagaatctctctgctgctgagcagcctctgtctgcacaaagagcctcctgctgaatttttgcagatttttactcctcttggagctgggagggaaagtggttttttgagtaagattgctgatcaacatgtgaaatcttcctcaggccatataattaaagtctctacatcaaatagatcctataatcatttcttagcctaagcagattataggagctagcaaattaaggcatcaaaagatccacacacaagagatccacaaacatcaggtttgccctcatttctagataaaggctaatatgtataaggtctgtagggtgtgatttgaatggaagttttcccttcatttttttagatcactgctcagagtctactgacagaatacagggagacagccttgattagattagaccagattggattaaatcaaatagttaaagcctttggagcctctagcttgtaggagacaccataatggccttcatagcgtccctaaatcctattaggtaagttaatcttattgaagaatttaggtctgcataaagtagcattgctctttatggggtggtctctggctcttaaggtgagctgttggtaactttcttggaataggttggttatgtgggtttggggtgagttattctaaacagcttgaaagtagatcctgcagttgatagaatatctcttgtagaaaactggtctgtctcctggctgctctttggcaaggttgctgttagtgtctgtgccaggggtgtttttagccctggtttgggggaaaaatgggcttcactggtggcacagatggtaaagactccgcctgcagtgcaggagacccaggttctatccctggtcacaaagatcccctggagaaggaaatagctcccactttcagtattcttgcctggagaattccagaggagcctggcaggctgcagtccagggagtcgcaaagagtcggacacaactgagcgactaacacttggaggtaaagagagtcaggagagatgtgtaaatagttgtaaaatcaactgctgtggcatgtggggatggattgatgggtgggagctttatttttaagctttgtgaaatcatcttttatagcctgtatccgttttagaggttgtcattaagaatcatgtgctgagtatatagcatggttgacatattgtattaaatgttgggaataaaataaagaatcttggaacttgggagctggaagcatctttgagatttttctggctgtgtttgtagttttattataagtttaagttggctcttggctgtttctacagatgcagtgaccatatttttctgaagtaaaacatctttttcatcacagaaatttttttttcaatttgtaaattatggacaggcaaagttttacaaaggcacataaattgtgtcagattttatcttagatttactatcttttggaaaaagaagagagtataagaaattgagactgtccaactctgagtgtgtgctttactgcatccagtgaggactatggtgggggtggggggagaagtaaattagacttacatctttgttacaggttgtctag

SEQ ID NO: 26753 - DNA, 1118 bp, Bovine  19866880562813
  misc_feature (1)..(1): n is a, c, g, or t
ncattttatttttcaagatgaagttgcagtcaaagtcttttcactctttcacactgagattttggcccctgttatacgtggattcttttaaagtagctcatttccattctccgatgccagtcagagccttctgtgcacgttgctctgcactgctaattgtgcttccacgggtgagggggctatacccaggcaactcactcaaagtgcgcttcccagtgacttggtgaccataaccttcaggagacaagacctgaacgtccacttgaattaatgtgctttgaacttttaggattctattagccttgactgtccagctatgcttattaatatggtttaatttatattgcttaactagaaagagtcaaggggggaggtttggggattccccttcctggagagctttgaaaaagaaatagaggagcatcagttctagactccagagactttcatctgcttgtaggtagagggtggaacttgtctgacgtcttcgaagcatcgtctggttatggcatgttcataagagccctggcatctccgagctgggactttcaacccccgacaacctctctttgccatttgcattgaccaggtagaaagggaaatggtacggtctacaatctttggagttggcactgattctcctctcctttggtttctgatgatgggctggctagtttacattcagtggttgagctaactgctatgctgtggatgcagaggaacctcttagccctctcctgtccacttattcttgctctgaccaccatgctgctgggagctttcattcttttctcatttatgtgttttccaaattagtagtttgctcttgtgtgttgacctttttaatattctgtattttgattggttggtcttaccattctctctcgttttcagcctggctaaccctccagggaagaggtgaaacagctatccaataaaaatacaaaatactgaaaaggtcaaaatgcactattacaataaattaccataactcaaacagggaagcaggcattaaaattctgatatgtacaaggagggagattggcgtaagagttgaaaatggcattgcattaatgcgctttggatggtcagagttcacccaaaagagagtaaacatt

SEQ ID NO: 26754 - DNA, 2393 bp, Bovine  19866880833056
  misc_feature (1)..(1): n is a, c, g, or t
ntgttgtattttatagatttggatacattagctagtggtcttgcttatttagcaagcattaatttgaccatctgttatttgccaggttctgtaagtgaagcactggggttactgatgcttagtacctgacctcattctttcagagaatcatgctaccagctgcctcagggcctttgcacaagctgttctctgtgcccagactttcaaatctaggtcaagtgccagtcatctcctgagccatggcacccctcctccagacagaccacttccccctattgtagcacctgtggtctttcttttaaaacagcttagtttgcaattacctgtttgtgtgattttattagtgatttgattatttgttccctaatttctaaattccatgaagttggggtctttttgccccacacagttgttttctcagcgcctgtaggatagtgccgagtttgtacttggcatataaagggtgaacaaaaaatatttgttgaatgagtggaaccctgagaacattgctttgcatcaccaaatgttctcctttaactggcaacattgggaggtggggtgtccttcaactagaaaagggaggaatatggaagagtgggcttttgaggtttaggcaaagcagatattaaaagtccaaggtccccaaatttggccatggttaaactggggaagacatcaaggagcactgtgtgtgttagttcgggagtgtggagatattggaaagatgtagaagagataactgcccccaagaatgctggctgttaagaaaagagagagtggtattttgagaatgagaaagggatgaaggggaatttttgttttggtcttactgtatttttaaatgtatgttcaggatcatagaaaccgagaaattgtgtgcagatgaggctccaggaaggaacattttcagtgtaaggaggaacacatccgtctgtgcgtgcttagtcactcagttgtgtctgactctttgcaaccccgtggactgtggcccaccaggtcctctgtccatggaatttcctaggcaagaatactggagtgggttgccatttcctcctccaggggatcttcctgacccaaggatagaacccaagtcttctgtgtctcctgtattggcaggcaaattctttaccgctgagccacctgggaaaccccaggaacatgttcacttatgaacaaatgattgaataccaaatcatttattttattgcttaatgtgtatatttctcagggttctgaaggactttgacaggtgtcaatcagcccatgaggaaaatgggctcagagttgcagggacttactctgagttttgtagtgaataatgtcagcgtcagaacccaggtcttcagcatctcaggatgccctgacctgcctgcaggcacagagctcacctgtgtcctgtgacttggaacacttgtctgtagttcctataggtgctgtcccctagtctagaaaatccattacccttttcccaccctctcccctcccccggccacagccaggaagaaatgacgagttactgttgatcttggtgatatggttgttacatattttgcaaaggagatgggaattaaggaactcggggtaagaggaacttggggtaaaaatataatgcactaaggaaatattttaatcttgtgaattgagtttctttcactctggctcacctccacctggccctcctggtatgttcagtgcatgcacttagtactccttttctgaaacatagttggtgtaccattttgagaagcaagtgtattaagcctgctagaggaatagtgtgtgctggacccagagcagaatcaaatggaaagctgctgtcccaggcagcagtgaaaccacttctattggacagatactttgtgctttgttgagttccccatccgcattccccccaacaagattagaaaggatacatctgtggtattacggattcagaaaattttggtttagtttcaggtagtctcatacctcactttcttgcctttaccgggctcccttctagtaaccccatttagcctctattttgggtgtgacgctagctacctatgtaaccaccacttccctttccttctctctcttttttcctacagaaagatgtagcacttaagcctcaggaacgcgtggagaaacgccagacccctctgaccaagaagaaacgagaagcacttaccaacggcctgtcctttcactccaagaagagccgactcagccacccgcaccactacagctcagaccgagaaaatgaccgcaacctctgccagcacctcgggaagagaaagaagatgccgaaggggctcagacaggtgagaacgcttagggcttgttccgtcctgtggctgctcttcctcaggtgcctacttgtctgggttcttcctaacaggggagaggagatc

SEQ ID NO: 26755 - DNA, 1379 bp, Bovine  19866880854867
  misc_feature (1)..(1): n is a, c, g, or t
ncatgagaattatagtgagcttagaaaagtaaaatttcaggctaatataaagaaaaaattacctattatactactactcagaaataataatgactcataacttgttgaatttcatgtatttatacatactgtacatattatataaaaatatacaaattggcatcatctgatataaaagaaacataatattttgcctttttctatgcataaccttcatcctagtcaaccttcatcagcctctaaggcccatctacctggaggggtttattagagaaagaaaccacagaaactaaagtaaaattcagcttctggaattcaaaaataggattttgccagataataccttgcaattccaggtattatctaaagaaagctttgtctaaacttcttaatctccctcactccaacacattccaaaccaatgatttttatgatccaaattaaacgtatatttaagagaagcaaaacaaagtaatctcactgggctgacagaccactagctcagtagttctcaaagtgtggtccttagaccagcggcatcagcaactccagaaactctgggaatgaggcctggtaacccgtgttaacaagccctccaggcgattctgtcacaagtgtaacaaccacccctctgacttgaacttgactttgacctgagccatagaaaagtgccctgtgtctactggtagcacttcattttagtggtaagcaaaccacccaaaaggaatatttgaaattctgacttgaaaaactaaaaacatagagtgatgatattaaaacttttgatacattctctctctgtgatatatcaaaatgatgatcagtgatgaacacagaatcacaaaatctctgatacagaagggatctcagagaccatcaagtccactcacccattttataaattggaaaactgaggtccgggaagagttcatgtggtcctaaggtgccacctcggtgggagagccagaccagaacgaacgtgagaatccagattcgtggtccagctgtctttttcatgagatcacatttgtgaaactctgaaaaatataaagtgtaaagtggttacattatatgaatattgaattgagttcagatcatttgaattccaaatcctaaagagccaaagttaaatgtatgtgcaaatttgttctctaagccctgtccaaatgcaaataaaaaatgaatgaacagcattgccttagaattacagaacacttcagaacattgttattgatattaagaaatgtaatgaaaaagcgtcaggcagtagcctccaatatcttcttttttgtgttttcttcccaaaatgtatgtgatgtcatagaaatctgagtgaaatttcctctgcctataggatcgatagacctgagtagagaaag

SEQ ID NO: 26756 - DNA, 1589 bp, Bovine  19866880877716
  misc_feature (1)..(1): n is a, c, g, or t
nttgtggttgcttactttatttttattgttaaagtgtcctatttaatgtgccaaactttgctctatacaccatcgtgtatggcttttagggaaagacattaaaaaaagagagagaaacatgaaccagcttacattagggattcctgagaaactgatggttatgagaacatgtagaacatttacactttatggtcatactttgcttcgtacttttcaggatgctcctctaactacaatatgttattctggtttcttcagatcagcgtctgcagttgttttctgtacctggttctggtctgcctctcatgctggaacactggggcgtgagaacagatccttcttctttgctgtctccccagcacctagagcaacatccaacacagctgacacagagcaagcattcaaaaaattttagtcgagtaaaatgaatgaaaaaatttatcttccaaatatcagtaatgactatataaaatttggtgtgctaccatttatgtacatttgcttttgctttgtgaccaggttttcacccaggttttatagtagttggttatccagggagaagttgatgggctacttttatttttaaaaagaggggatactgccataattaggttgaaactgtaagggcacttatatacttgtcctgcatcagtggtaacttttttgttttataataaaaagccaccataaatgattattcccacatctgaggcagacactctggcacctacaagggcttggctgagatcctggggccctgccaggagaaagggctttgtcctttcccccttccccacttcattctactgtcctgccccaggctgcagtcccagcagtaagtaagctgtggtagcaagtaattttggcagtggcaagtataacatattttggtgatttctgcatgatttgtatgactttctatatgacagtagtcacaacaaaaacatttcatgacttgtgtctaaagttatcagtcaactggagctgtgaaaatcagtttgcatatgtcaacaatttaatcttctaatatacttgccaatgaaaaaccaacactagaattatttttctgtatttattgactagaagaaagatatggctatcaagtgcactgattgaaaaatctttaaaatcccaatctttaagttgggaccatatgtgtgttttctttccctagccaaatctatttgcacatttatccacacatgtgtatatgtacacacacagcatacagttacactgatgagtgtttgtgttacattcgtatgtgcccacgcagagcacatgtgcttcatgcatatgcatgaactttgaaatgtaaggatgtcagggaggttcccttttaactgagaataatacaattatctacattccaggctcctagtaaggattaaattggttattgtgtatatagtccttagaacagtgcctagcatgtagtaggtcttttataaataccagctttctttattttcaagtatatcttcatctgtcagcctaagcaaaagactactggtctctctgtcacttcttcctgtaacagtttagcttcaaaggcggagtggtgaagtctcaaaattattgtgtaattg

SEQ ID NO: 26757 - DNA, 1688 bp, Bovine  19866880911911
  misc_feature (1)..(1): n is a, c, g, or t
naaatgttattcagccttaaaaaaaggaagggaaatcctgatatatactaaacttggatgaatcttggggacatcatgctaagcgaaataagccagtctcaaaaagacaaataccaaaattccacttatatgaagtacctcgagtagtgaagtacatggagacataaggcaaaatggtgtgccaggagcctggcagaggggagagtgggaagttagtgcttaacgagcaaagacttttagttttacaagatgaaagaaattctggagattggttgcacaacagggttagtgtacttcacactactgaactatgcatttaaaaacagatgagatggggcttccctggtgactcaatggtaatgaatctgcctgccagtgtgggagacactgattcgatccctggtccaggaagatcccacataccgtgagacaactaggcccatgtgccacaactattgagcccatgctctaaaacctgggagctgcaactactgagctccctcgccataactatggaagcctgtgcaccctagagccagtgctgttgacaagaaggcttcacatcgcaactagagagtaacccgcaaagcaacgaagatccagcatagccaaaaataaataaatatttttaaaaataggtaagatggtagattttatcttatgggcatttttaccacaatttttgaaaaactaagtaactggctggacttcacacatacaactgagaactttttgaaacccagttaaagcatttcccatatgatgcagcctatggggaaggtgtggatcaaagacaacataaccagcaaggagattttggcctaagcagaaaccaaaacagtatgcagtcaatcaagagataagagcaacatttctaaactatcaaggaggtccttctatcctccccagatccctctgaggaattcttaaaatctctcagaagcaatattagtacaattacatgagcagcctggagagagggacaggaagaccttgttgggtctgtgaaggacaatgaatcctcatctatccttgtctggatcccaggcccagagggaagtaagcacccttgacaaagctgcagtcttaggaccagagctgcttcatacttggcaagtttaaactcaaggagctatttgttcttccagagcccaaagtcaaagaactcatcagcttctcaacactggcttcccacaaccacatacttgtcaggccaacaacactctcctaatgtggtagggtttggctgataagtgaagtgcaatcttttgcatgacgaagtcagacaagttttgcaggagtcaaagcacttaccttgggaaagcagatctaacctggctggaaagttcttccccacacactcatcataaggtcttccccacacactcatcatttgtatattttaattacgtactttcaaccaaggtgtgagcctgccagaatgccctaaatcgcagttgtctctagaactgctgagggaaagatccacaaccagctagttcagtcctgcacctctccattcatcaccattcggactcccttgatggtttaaagggagggacgggagctcttgggaataaaagcagttcctctgaaaggcattcattattccagaagcacagctggtcttccagtgttcatcctagctagcaagggcccatgttacctaaatcacattcctgccacta

SEQ ID NO: 26758 - DNA, 1580 bp, Bovine  19866880940890
  misc_feature (1)..(1): n is a, c, g, or t
ncagacacaggagacacaggcagctgaccctctgatgcagctgtgactagttctgctctggacaaatgaccccagctgctttggcaggaaagcaactccaagtacaaccccccttccccccttcacatccagccctagccactttgcacttttctagatgtaccaggaagactaaagggggagaaagcctgctgcttaagtggggaagaaagcataggtttccttggcaggattagaaaatccagcctagatggcaacatgagagtcactgggttacagtgaggccaacgggagaggcttaaaagctgtaatgactggattaggaatcatttcctagcctctgttaagagcaggatgttgacagaaagcaccacccccagggaggtactgatgaaaaccacgactgtctgtcgaggcggcagtagctcgcacaggcagatgtggaatccatcctgtcattagccagcaaggagacaatgttctgaaaaggaaaggagagaaaggtgtggtcaaacaggagacagcaaataacaccacagtgcaggtttttatgacccagcaaaagaagcaacagcttctaaggataaccaagtaatattctttacaacattacccaacaaaaaacaaaaatttatttccatgaggggataatgcacttaatggtttctcattatatattgtttactctgcaagtacttatctggtaattcataatttaccataacaagtttctttctgcactgattgctaacagattgatattcttaagaattcacaactagtctagattactctggagagatgaggagttcacaagagccaccagcagcctcagaatcacctgaggcattaattttttgttgttgctgttgttggacttcatcttagatctactgaataaatctccaagggtgaagagtggccccatgcactactgtaaatcaacttgggtcacttgctcagccgtgtctgactctttgcaaccctatggagtgtagcccaccaggctcctcagtccatgggattctccaggcaagaatactggagtggggtgccatgtcctcctccagggaaatcaacttgactgtaatatcatttacttagaataaatacacccactccaggtatacagtttagctattctcacaaaatgggcttccgtggtggctcagacagtgaagaatctgcctgtaatgcaggagacattgattcctggtctgggaagaatccctgaaaaagggaatggttacccactccactattcttgcctggaaaattccacggacagaggagcttgatgggctatagtccacggggtcgcaaagattggacacaactgagtgactaacactttcactttctttcactcttaaaaaggcatacatgacaatcaagttatgaaatatttccatcattccaaaaaattccatcatgctgggcccatgaactttttctgagatttcccatttttcccatttgtttcaataataataacaattgcttgttgaagcatttttgtgatggctgctttgaagttctttcagaattccaacaccaggttcatctcactgttgagatct

SEQ ID NO: 26759 - DNA, 873 bp, Bovine  19866881056818
  misc_feature (1)..(1): n is a, c, g, or t
naaatggcaacccactccactattcttgctgaaaaatcccatggatagacagggcctgggggctacagtccatggggttgcaaagagttggacacaactgagcgactgagcatgcacacaacatatagaaaagcaatttaaaaataaattttcatccatattgtcactaaactttatatagagaatatataatttaacaatttaaaaaagcaattttagtcacacatacatacaagtctatgtcactgattaacaaatgcacatcctcacaaaactgtatgtataattttaatgaatccatgaaattataacatatttccatgttatattacttaattaccttttattgtaggacatttatgttgtttttctgttttttcctcattacaaatgataatgttataaatatctttgtatatataatattcctcttttaaatttaagaaatataactttgggggaaaacatacctatggtagaattgtattgacaacatataaacagttaaaattataaatattttcttctgctagtttcttatcagctaccctgctatttaaataactgtgacatgaaaattcctggtcatatgagcctattctagaaactggctactagtcttatttggctagttgaaacaatgtgtttatttgtttgttctgaatgtcagtaaattttcattacaaatgaaaatgttgtttcctctttttaggatttttcaaaagaataattgcacttggaggaaaatgaggtcactgggtaatcacaatttcataaagaaacatctactgtgttccaaaattgacagaggcatcgaggacacagaaatattaccaagtcattttgaaaacagatgtttggtaggagccaatt

SEQ ID NO: 26760 - DNA, 1146 bp, Bovine  19866881059794
  misc_feature (1)..(1): n is a, c, g, or t
ntaaaaaacagccttcctgtggagaactatccttactttctataatgtatagcccctgttagaacattaatactattggaagaaaaaagtgagtggttttgggatttgctgctaaggaaccccaaagaagataaacaaaccacaggaactgtgttttaacaacagtgaatgctgagaaactccctggtaccaaagtctaggaacactttgctgacaggggcaagaagaggatgatacagccactctggcaatgataatggtagtttatctgtgaggctcgtccttaacactgtctgctgtttacacaatgtagcaaagtttcatggatattgtgtttttttttctaactttttaaaaacatcccaatagggtgctctcttctgctacccaaacattttttttaaatggtgtcaggctgcagccttgactacttactcccttctcagagaaggttccactagggtcaccacattcaaacgtctttaccaactgggccgaggggacacctgggaaatatcgtcaaaatattgacaactggtcatcacttttatagacttcataaaatcaaagactcttaagttgaaagttcctaatgcaaatttcttctatacttaaaaggccacaaagagttaatcacatagggactacatcacagctttacaaaaacagttttcctttctgttctgttatcaaatttgccacccagtgatgacactgatgggaatgccaaggattcctatgccctagttcccaacagctattatctgaaagcctgtcatctctaccatcttgggagggaaatgacacgtcacctgtgggcacctcactgaaccaaagccaactccccacatcccaaaagtataaagaggaccaggcagaacacactagatgaaaacacatccagccctccataattagcaaaacccaagctgctaagtagaactgcctttgttcttcccagagacatccttaaatggaaactaaagcccaatctatattcaaggaaatagcactctcaccgttctctatacaccaggacttctctgccccatgagaaacaacatcctcttcctttaggcacaaatattaagaacaaaaactgtgccaagaaaaataaatttatattaagcatcatactttctggac

SEQ ID NO: 26761 - DNA, 1181 bp, Bovine  19866881068750
  misc_feature (1)..(1): n is a, c, g, or t
naatgaacatatcttaatactggagttaagaattgtgtccattgcctccacatctctctccaaccccaaagaacatacactttctaagcctcaacactactgagctaggcacaatgaggtatgggggggaaattgcaatttgttatgcaaagcacgtcttagcacatcacttaaagtaatcctcacgaagaatctgattcctattttacagataaggaaagggtggccttggcaagccagagactgacttgcctaaagtcacttaaataataaactgtagagctaaagctctaatattgaagggtctggaccctgtgtcacagtgctgtgtacaaggacaacccagctaaataagatacctttgtactcacacagggttttagagttaaatttgggtaagacgacactgatataaagatacatcacaaaggccaactaagtatacacagttgtgtaggtacctaaaaggaaacgacctcttgaggtgacaagtaaaaactccatggaacatttaaaaatccattctatataaagcacccagattcacaaatgaaaaccaccacattaaagggctctagaggtgatgaacgttacataaaggttaggttgataaaggtagtaaaaccagctacaatttactcagcatttcctgtgggtcaggcaccatgttgagcatttcacatacattttcttacttaattaaatggctcaccaaaattatttccattttataactgaggaaattgaggttagaaaggttaaaattacttatccaaagtcacataagtaagtggtacgtctaagttaaacaagtcaaagcccgtgttttcaggccgcttatatgtactgcctctattctatttccccaagtcatttttgttatagcgtccccagagtcctcactaagtactcagatctggggcacatactatgtatttctgatggacatcctcaacttgcaggtttttctatacccaggtccctaatatccacaaataataagggcaggggttagcttcaaaaaactccaaagatcccatgtgatctctaactactgagaaaaatccaagaaatgatggtacacacattcaatcaaaggttacagctatttggtattttaaacacttctagctgagattcttaacagtgcttaagagaaggcttaagtgcattaaaaggaa

SEQ ID NO: 26762 - DNA, 1377 bp, Bovine  19866881083215
  misc_feature (1)..(1): n is a, c, g, or t
ngttgaaacctatgtttaagctgatcccatttctccctgagatatctctcaagatctgagcattttctgctcacacaccaactcctaaataatctcactcacttactatacagtcatccttcagtatttgcaggggattggttctaggaccccacatacacattcctttggatactgaaatccacagatgctcaaggccttcaactcacttttggatcattctattcagttattcccataatttaacctaatattgcataccacctgcatacagaagacttatcctcattctgcttaatctgttcttggacaaacaccaccaattcccaatgtttgaacccatcttctatatatttctaaggaacattgtctctgaatgggaaaaacaaaacaaaattaaacaaaaaccagagaatacagtgaaatttaagtctattaagtcactccacaatccacatactaaaggcattttacaccaaaagtctgcttattttgaagtaagctttttcaagaactcagaagtttgcatctctgccaagcccagattccagctaatcagaattgaggcacaaactctctcgtgcactgagatttgctaatgaaaaccagacctactcttaacaatgcaaatttcttcaggagcctaaatcaaaatctccaacttgtgtgcatgaactcgcctcggtctgctgcagaacaaccggtgttagtgattgtaaagggtaaatggaccagacgccaaacccttgaccagcattgactatggatgccattattccatccctgctacattcctagcagaatccagggcttcaaatccctctctagccaaaagcctggtgatcaaggcagaaccccacatgggactcaaaagtcctcccatctctttactttaaggtctttaccttggaggaccatctgctttccttcacatggcagagaagagagacataccaagacacacccagggaggagggcttgaacctttatccctccccttcaatatccctgaggtctccactttgtgttggacccacagcagacctccctttccctgaggtctccaactgctcccctagatgagaccgtgcagccaacttaacgcggttctagctttaagcatcagacaacaaaaataatggaataaaacctctgacagtcttcccctctcaggagttcaaaggaaataagagatgtgattacagccactctaatttgtccatctgattattggtgctggtggtgatgtgctgctatttactgattcatggagtgataaggagcaaaagcagagagtctgagaatgtactatatatatatatatatatatattcctggagctgtgttctctctatgtagccactgaatcgagccata

SEQ ID NO: 26763 - DNA, 1913 bp, Bovine  19866881106351
  misc_feature (1)..(1): n is a, c, g, or t
ncaccacgtgaagctccaattctaaagacctggcactgagggtcagtcccttctcttcctagaaatcagtatacatctacagtggtatctgcaatgtcagctattaatcctctaccaagtttgactccaccataacagattttcaaagaaaggagaaaattttcgttccttacaagccaaacctacccagatcaacctgtataaagatatataaaccatgtaagacattcccacacaagtcattctcaccagcaatgttagagcctaactgccgggactcctcaaatattcccaaatctctttctttttctcccaaagtgttcacctactgctagaagcaatctcagtaggttgcttctctctgggaaattctgtccttagatgaatcacttttgggaacttaaaattcaattaggagggagactctgggatttattttggtgatccatcctggtatctgtttgttaggaaagttcatataatctaaaaattcctcctagttgatttaggcctatttcctctgcttcagttcatactagagagagagaggacagactaatggactaaatggagatttagaaatattcactcagagccaaatctgagagttctctgaacccttatcaacttttccctatcgcttctctatttttaaaaccccctggctctcagtgttttcaacgacaaagtattaaaattttaaagcatcccctgtggtctggaagtcagacatactgaaagaaaactaaactcagagcccttagaggagttaagttttcccaaagattaattagcttctgcagaacttagggcttgggtggaaagtctggcagcccgtgctttccttgtgttctttggtagtctcccaattaacagagtaaagattcttatgcagaggacctaacaacctctgttttgattttcccactcctaagtcaaattgggggaggggggacctaccatacccttattagtaagagccaaaactttgcaatataatgtctgagtactcacattgtaagcaaataattctgcataggataaacataagcacagggagatgagaaagacatgcactcttgtgtgtaatggttaacttgtcccttccttcactttttaaaacccttttgtaaagttttcaaatttgccatataaaaaagtggaacccttttataagacagctgctagttcagtatcttctaagtcagtatgtatttatatttaaaaacataacccaacaggtaagttccacgggggtagctaagtgctagttaaaaacactttcttttaacagtttggaaaagtttcatgagaagtgaggttttataatcaggcaagagaaggaaaaggggtttaatttcagaactacacacctctcttaaaaaaactatgtacttgcattctcacagtaaaaagattagttgccttcaatgaagtttcaggaaaaaaaaaaaacacacacacacacacaccttctattttctctgcactgaggagtaacatcttcccacagttacggaaagctgcacattaagtcccttgcttgctgctgctgctaagtcgcttcagtcgtgtccgactctgtgtgaccccatagacggcaagccaccaggctccccgtccctgggattctccaggcaagaacactggagtggttgccatttccttctccagtgcatgaaagtgaaaagtgaaagcaaagtcgctcagtcgtgtctgactctacgcgaccccatggactgcagcctaccaggttcctccgtccatggtattttctaggcaagagtactggagtggggtgccactgccttctccgaagtcccttgcttagggagtaccaattcctagtttcaaatctaatccactgtcaccaagtcaaaactaaagaataaattctcacctcctgctgctct

SEQ ID NO: 26764 - DNA, 1405 bp, Bovine  19866881239706
  misc_feature (1)..(1): n is a, c, g, or t
naagtagagtggagtatttctactttattcctggagtagaaaatggcaactcactccagtattcttgcctggaaaattccatggacagagaagcctggagggctacagtccatggggttgcaaaagaggcagatgtgactgagcaactgagcatacatattatacgccagatactatgttaggcactggggatacactggtgagaaggaagatataatagcctctgctctactttgttttttcaaaccgttgcagagatagagtaaaataaataaacatgtaactatatactcaaaaattttatattggcttgatattcaataaaaacttattaagcatctccaaatgctctaaactctatgataggctcttaaaagaaaaaacaccttacctaattcctgttgaaagtcaatggtttgtagtttacaaggaataaactggctgtgttaggttatagaattgagtaaaaccatttgatccacaatagctttagatactggtttagcacataggtctaagagcagcaagacagcattctcacagaatgtgtagttacacatctataaacctgatgtatttactgaagatattcctatatatccctgttcactggtattttcacaactttgggttttaagacctggtctgcttctccctaagtgtgtgaactggaaaaattagtcaacctatctgaatacagttttacatctgcgtactggaaatagttctactgctttgtgggattatgaagtttgaatgcagtcatgtatgtggaaatacttgggtgagattgtattattttcactgtcattcagattttctagagggaataatatgagagagaccacctatgttccattctcttaaatcagaaaaaaaagtcagaaaatagtccttagttcatgtagaaactggaaatcatcaggtctttcctctgtcagaggaagcatttgtatatataaccttgaagttagggtggaaatgaggttggataacaagcatcaacaagaatgtactgtccttggaatgtggtcttgtggcagcagtgacactaagctttgctatcttgaatttgttccccctagaaaagaatgaaattgaaaagagttattatgaatgcattctcagtgactgggttctgacaccttggccaagaggttcatactctgcagcattgaataaagtggtataattaaaagaagaatgagaaatatgaaactgcacaagaatagtcattatttaaatggtgaaccttcatgtgagattacactcggtgatactaatctgcacagttgtattttctgggtgaaaatcaatatgaatgtaacaagaactcagtgtgcttcctacggcgcgtgttgtatcttgtatgaaccgtgatgtgatctcttggccttttgaatcg

SEQ ID NO: 26765 - DNA, 1168 bp, Bovine  19866881254666
  misc_feature (1)..(1): n is a, c, g, or t
nctatttcaatgcattcccccatgccctgaatgaaaggaaagcaggtatgaaagcccatgttattccaaggagggcagggaaagacttaaaaactctccagaaagccttcagcactgtaactaaatgttaatgtttaaagatataccaatatttcaggaagccattggtagtgccacactaaaactcattctagttttgaagagaaatatttgacttggagggatggaccccatgctggctccaagataaactttcctagttctctcaggccaattttaatgctaagagcagctccatcagagtaaaagttcatttttgagagccaagctgtgaattatgctacaggctgagctgagcagttggtcttttgctgatgatggcagaagcctgaatatgatacagaagtagaggggggagccagggacatccgagggggattatcacagaaggtcagactaattaaatcgagagaagtcaccagagagccagagctcccacacacgccgtcttcaaatgctccgacacatgcagggtttgataagaaagaaagagttgaattgccactttcatcggcctggaaggacaacagtcaaacaaataaaactgtttagtgttggtttaagcccaggtggggagggaagaattgaaagtgctgccaattcctaattatgcagctgaatcacaaacagtaagtggaaagagacaaagtacaactgtctctctggttagccatttaatgtgtgtttgttgagcacctactatgtgccaggcagagcgctgggtgagagggacaaaacaaatatgaactgttccttgtcccctcaaggaactcacaaatagacatttatgtaacattattacgtagtgtgatcaatgttccaacagagtcatctaaagactgcacggagcactctagggcagtccccaatccctgggccatggactggtacggtccgtggcccattaggaaccaggcttcacagcagaaggtgagtggtgggtgagccagtgaagcttcatcggtatttacattacggcctgagctgatcagatcagcagcggcattagattctcttaggagcgcaaacacaactgtgaacaacgcaagtgagggatccagtttgcacactccttatgagaatctaatgcctaatacctaaggtagag

SEQ ID NO: 26766 - DNA, 1389 bp, Bovine  19866881285563
  misc_feature (1)..(1): n is a, c, g, or t
naaatggaaatgttgcacaaataataacccttgagagccttctgatttgaagaaatgcagacaaagctgggctcctggggttaagagatggtaccaggctgtagatttttgaaggagattagctgctgtgttactaggcagagtcctgttaaaggaaggttaacagaccaaggcatgcagggttggagaaggaaacatgcgcagattattgaaggaagtacaattggctggaccttaaaggaaaggtcttgaggaagggtgaggtgactggccttttttgccctttccaaagtctgttttcttaggaaaaatcgagcttagtatcttgatgaggttttcccttcttatgagtattaactttgtagggggtggactttggacactgggcagggctgactggcacactaggaaggctgaagccacatgggcttttttgttcctcctttattttattttttctggtggcctaattccttcactgaactaatatgaattccttacctatgattggtgataacaacatggatctagactacatgagatgttgattttgggaaacattatatccactagggaattgatggtaagattgtaaactactctagtggtcatatttggtttgaggattaagtgcttttttcctaaatattgtggaaacgagcctcatgctattgtattgtgtttccttgtaattccctgaaatcctggaaagatcaggtattcaagagattgggataatcacatttggaaggtgttaatgttcctgtgggaaatattccaggctgtgagaaagctgaaaaggaaacccaagtctcaaatgcacttcctttggtcagggttgagtggattcagaaggaaaggaaagaaatgagataactctgtgggttgggttggtattaaagctttaattgctctaaagtcacctgaatggatgagaagggaagataaacatacacagacatttaaatgttgcatcacaaataaaatggacaacttggaagaaatggacaaattcttagaaaagtacaactttccaaaatagaaccaggaagaaatagaaaatcttaacagacccatcacaagcatggaaattgaaactgtaatcagaaatcttccaacaaacaaaagcccaacaccagacggcttcacagctgaattctaccaaaaatttagagaataactaacacctaccgtactcaacggagaagacaatggcaacccactccagtactcttgcctggaaaatcccatggacgggggagcctggtgggctgccgtctctggggtcacacagagttggacaagactgaagcaacttagcagcagcagcagcatcctactcaaactcttccagaaaattgcagaagaaggtaaattgccaaactcatt

SEQ ID NO: 26767 - DNA, 979 bp, Bovine  19866881447456
  misc_feature (1)..(1): n is a, c, g, or t
nacctgacttttctgataagatattaaaaatttaagtagacttgtgaaatattcatcttttttatttaatattaaatatggtctatagttgagatacaacacacgtttttgccatataaatgcaaaaggtcttcctaaatgaaaccttctgatctgtgtggagcaatatgccttcttctatttcttgaaattcttgttatcatcagggcagagagcaggtgacttgttgtgaagcaagtgcaagagaagcaagaacaagaacccccgagctacaggaccttagattgaaaaacgaccccaccagtcaaagtcaatcctcaaacacccattattccagttacctctggaagaaattcaacaagtgagaaacagaaaaaggtcaaggaagatgcttagatccaagaattttaacttaagctggtttttcaaccaaaggagaaaaagaaagtctacctttacctgtaaactctggattctacagaaagtactgattccacacagcttttggaattgaatacacaagaacatgtaccagatcccctttcttacctccttcttctaacctccaagctaaataagggaaagtaaaaggagagattgttttcaataaaatgttgataaggttacacaaacaccccaaggcctgggcctctgtctatagtctaaatggttaaaaggttatgatgacgggtaggaatttattacaaggtttaccagcaacctatgaaattgaaagaaacacttctgaaaacaggaaaaagtagattaaaatccctggattcatgacgcaaaaaaaaaaaaaggtgtggtctgaatattaactactaaagaattgcaaagaaaactcctttcctcttccttctttcttgagtgagacagaaaacacagtgaaactccaggctgtcaaccactggtaccccactgctagccatggcaacagctgcacggctctgctgtaataaactggaacaatttaata

SEQ ID NO: 26768 - DNA, 1931 bp, Bovine  19866881498657
  misc_feature (1)..(1): n is a, c, g, or t
ntagagaattaacaactgttttcaatcagcaatcagcagggtatttcgccaatgtgtactgaaaccatgtacactatcagacttaaatttattcttatgatggctttgatgtacacacactcgcaatttaagaacagatccagctttctaattaggtgttttctccccaaaatccacgccacattagccccttaatatacaacagaaattttcattgagttgtttctaaaagcaatgtatttgtttaataatgcaactcattttgactcagattgccaaaagaatcccagtctgcagctccaaccattatagcaacatgtaaaggcaaccatcacaagaacactgaaagatgactagacatagcacattctcagatctgacaggttaacatgggatgaccagttaccattaagctgcttaataatactgtacctgctgctggggccgctgctaagtcacttcagtcatatccgactctgtgcgaccccatagatggcagcccactaggctcccccgtccctgggattctccaggcaagaacactggagtgggatgccatttccttctccaatgaatgaaagtgaaaagtgaaagtgaagtcgctcagtcgtgtccaacttttagtgacctcatggaccacagcctaccaggctcctccgtccatgggagtttccaggcaagagtactggagtgggttgccactgccttctctgaatacggtacctatttgttttgctattatataattttcccccaactgtacataatgtatccaactgaattctcacataaattttctggggtaagcaaagtaaactgtaatgtgtccccatcacaggacaagaaatgaaagttcagacatgagtgacccgaccaaaggcacctagagagatggtgataagcagagttacttaccaggattcctggccactggctgaatgttgcgtttactgtccctaaggtagtgtcataatctactgcactaagctactggttctttacacgacaactctgaggcagacatgattgttactatttaaggttaagtaagtggaggcaagtgttcaagttaaacagataggaagaggtagacctacagttcacaaccaggccttttatcctagggtccatgtgattccataatactacgctatcctccagagtatcattatcattcattggcaatgcagatatattttaaccaactgcaatgtgaccattcatctgggcaagtaacaacaataatttttagtttagtgaccaaatattttagtgggaacaattagcaaattagctataaatattctgaatctttgtaatggaaaaaaataagtaaatgttatcacccatcttgggttattttaaattatttaattttttttccagccttacctcaaggtgtgaaggatcctagttccctgaccaggaatcgaacccgtgctccccacagtggaactgtataatctcaaaacagtggacttccagacaagaccctatcttggttatttttatacctgtgtctctcaattctgaacaattaatacataatctaacgtgaaagtgaaagtcgctcagtcgtgtccaactctttgtgatcccatggactatacagtccatggaattctccaggccagaacactggagtgggcagcctttcccttctccaggggatcttcctaacctagggatcaaacccaggtcttctgcatagcaggtggattctttaccagctgagccacaagggaagcccaagaatcctgcagtgggtagccaatatcttctccagcagatcttccaaacccagaaatcaaatcagggtttcctgcattgcaggtagattctttaccaactgagctatcaggaaagtccataacctaatgtagctaaatcctaatatattaaaaatattaatctatgagctaaattctata

SEQ ID NO: 26769 - DNA, 796 bp, Bovine  19866881507069
  misc_feature (1)..(1): n is a, c, g, or t
ntgtgtctggcttatttacttagcatatccttaggaattcttgacagctcccgggaatttggcaatccctatgtcttggctacagatttctggagtatgtgatgtaattcttcaaatattttctcagaggtttttgctctacccgctcttgaaatggtatgtagaagtttctctccaaagaagccaccttacacacttttaatacaactttggattacagcagttgtgcgatggtgatcctggtgatggtttcaccttttgaattgtggtacacagctatgctgatccaccatgaaggcaccctatgtcatgtactcctggccagagaggggcttctgagaatccttcattatgtgatggaatgcctgggcttccttatcctgagtaattgtgacctggtcctgtgaacacatgtcacatgttgaaacacttcttcattttaatggctttaataaaattttgttacaagccccagttttttattattagattcacagacataaaactgctctgccaaattgccttaaaaagtttctgaatgcttattcccgatttccataattatctccttggggcccaggaatacatggtccccagaccaccctgagtaacacccctgtaggagatatcacatgtgggggcaggtttcttggaaacacactgaaatagagttttttgaaaggtattttctctcaaggaaactttccttcttactgacttttgactgtgggagaggatgagattgcttgaattaatctccagctattacccagcttctggataagaggctgccttc

SEQ ID NO: 26770 - DNA, 604 bp, Bovine  19866881686200
  misc_feature (1)..(1): n is a, c, g, or t
nttaattttgtgataaatctcatgtttaatcctctggttactctgtaatcatgtctctattgatcttttctgaatgactgcctgcagtttaataaactttgccattaacccagagcttctaaagggagagattgattccattatcaaatctgatagacccaataagtatctaaacatcactaaatctatctataggaagctttggtatagagacaaggctgtgacttgttcaacaaactgagtaaaagtttgggcatctttgcatgacataattgcctcaaacttagcgtccaggtctcttgtgcaaactgacactgcctctcaggtcaatgggtacctcttaagtacttttctgggttctgtgaaagcctgcagggtagttcattgtattttccctcatatgatgctaaaggaaaaaaaatgcttctggttaaaatctgaaatagaagatggggattgatgggaaaggcagtggaagggagagtgcattcagaggctggaaccatgtaaacaagctcccagactcgggaagtcttgccatgaaacctgggtttatgtctcatttagtgatagagcatttgcaatatatgccaaacaagaattt

SEQ ID NO: 26771 - DNA, 685 bp, Bovine  19866881777743
  misc_feature (1)..(1): n is a, c, g, or t
ntgttgaacccaggtatcctgtattacaggcaaattctttaccgtttgagccaccacgaagccctcaatacatgtgcaattcattcttgttaatagtaatggttgatatgattattattaatatcctacatgcaagtcatacctataaatagccacaatgattaattagcttatgatgtgcatggccagatacctgctatggaataagacacatttctcagatgattcaggttgaggcggaggagggggagggacaattagaaatccagaatgtttctaaattgagcattttgttttccccaaatggctcttttctgtctctccaaagaattctgctgttcttctaagaggagtgggtttttcttggtcaaaaataaatacaataacttgataaaggcaatgtaagactacaaacataatggttgaacgctctgagcatcatttcagctggtgattctgagtggggctctagcactttagccacacattccattaaaacactgagcaaatcatgtgttttaatcacacatgccagatttgggggaactgggctctctttaattatgaaacagtttgcacatttgctgggtgcacgtgaggtgatattttataaacacacaattatcagaaaaagatttaaaaaaataacacagagagagatgaatctggagcacaagaggagagg

SEQ ID NO: 26772 - DNA, 800 bp, Bovine  19866881907926
  misc_feature (1)..(1): n is a, c, g, or t
nacacacacaccccttgcttcactgtgcttaaaattatgggaccaatattaacagatcaagatatcccttaagagcaccagagcagatcacccggggagaaaagcttgccctagacactagttctatgcataactggactaacagtttttaccagtttacccaaagtcactgctcaaagttagggaaacagaagcagctgaaagaaacacctcactctccctcccctttctcaggtctgtcctagcttcttaatgagcaaggccatgccctagaaggttcccctttaaactgctacacaatcacaaaacgtctgatctgtgtgaagaggtgaagggaaacactgcatgctgatccagctacagaaagttcccctggtaccgcatgaatttttgaagctgtctcataaattagttgaaccaagaccacttaacttggtcttgttacaaattctcctgccacagtggacagtgtcagaaattgtaattttaaaatgcaaaccaaaaaaaaaaaagaggaaggaggagagacccttccaccaaagctggggtgaggagctaacagtgccatttctgaaggttctggatacacagtttgggatgcccgagaactcaaagatgagaaaatgttgttctgcgagttaacaagatgctttgtttcacttacacccatagatataacgcggagatagtctgaggaaagcttaggccagtcctcagagcataatctaagaacccacccctgacgtctccaccagttttgtgagggtgtacacacacactcagtcacgtctgactctttg

SEQ ID NO: 26773 - DNA, 3367 bp, Bovine  19866880186010
  misc_feature (1)..(1): n is a, c, g, or t
nttcctatttggaaccagtctgttgtcccatgtccagtctaactgttgcttcctgacctgcatataggtttctcaagaggcaggtcaggtggtctggtattcccatctctttcagaattttccacagtttattgtgatccacacggtcaaaggctttggcatagtcaataaagcagaaatagatgtttttctggaactctcttgttttttcgatgatccagcggatattggcaatttgatctctggttcctcttaccttaacatacttcttttttccttagtgctcatcaccttctaacgctttatattattttttgtcaatctttcactaggatgtaagctttacaggggcagagatttttcagttttatccatgatacatccccagttaaggatcccagtaatgcaataactcttaaaaggaatgagagaaacagtgaatgggcgctttctcccgcagtttgctggagacagatgcctgaagtcctacaatgccggagaagctgggtctgcttttctgtcccctgaccctgctttgtgttttccaggttcaagacaggaaagagggagaccagggatagagcacagaagcctaattacttggaagggactgtgtgttgatctttctagactcctaatgctctgtcatagcagcttacaacttattgatcagttctcctgtggccatcacggtaggtggccagaagttcttttctcttctgaaaatcaggacaaattgtttagaggttctataggtttagacattgattactcaatagacttttttttttcagctgcacaattcctattttctcattccttgaatttatggccatctctccctataacatcttctgatatttatatgctggaaggactggaaaaataaaaattgaatggaaatattaaaaatgcctttcacaaagagggtctcctttcatctctacaattaacacatcaaaactgtaaatatgacaaattagttgttggaaaacacaaatggtagacttcagttaatgatatggactcctgtaacagttagctgtggctgtgtaacattattagggatttccttctctaccactctcctttgggacatttctttcataatctctagcacccagaacatcctttttccagttctgctggccagaaagataagagctcctctggagtttgctgtcctttatatctgttgtgctgctctgtgcagctggggcagccctcagggcaatgttgaggagagagagaaaaactgacagagatcctccccctacttcatacaagtgtccctcttcccatctcctctgaccagagggataggttttctatcagggtctaattatccatgtcactgtactatagtaatgaagtactgtgactatgaaagctccaggacagagaagggagaaaaaaaaaacaatcatgaattttcacccctttctccacctcgtagcatccttttcatattttgtccagaggtttaagaggtaatcagtggcagacataggctgcaatggaattactccattttggccagaaccagaacttatcaatttaataaatgaaaaaaaagtattaatttatatttctcttattatgaatgatgagacatatgcatttcatttgctacaaattatttatgtattttggctacttttctactggatatagaaatacttcatataatcataaaaataattcctttcttagaaatgaatgtcaaaacttgttctcagtttgacatgccttttgagttctcttatgctattttacttgctttgttttttcccctttgattgttttggttttattggccatgcagacttttcccatttctaattggtcaatttttaccaaacttttgttttactacttactacatttagttacattatacttagacctacacctctcttgtattactctgaaaaatccttctatggtttcttcttcttctttttggaagaactttttattacttttatgtacagaaaactcaataatgtgcacttgaccaagtttggtggctagttctttgactttgccttctccggcttggcaatatgagctactgattttgaaccctggacactgcctccccaatgatggtagatctcaccatatctgtcattgtaattgatcctgatgacttccaccagtttagccagtgtgcccttgtcttctgagttgacttgcgtgaaggccacagtgtgtacaggtcttcccatggaccagacgctccagcctggccttctccttgattatgaaatagggaaccccaccttacaacacagggcaggcaggaagaccacgatctggaaaacaacattaactctagagtgtattttgagcaaaaacagtaacttaaaagctaatgtagagaacctactgtttagcaaagagaactctactcaaggatctgtggtgacctaaatgggaaaaaaatctaaaaaagagtgatatatgtataatggattcactttactgtacagcagaaactaacacaatggtgtaaagcaacttatttccaataatttttttttttaaagctaacatggtagcaattgctcagggttaaaaagctcatgtatttctacttgaaggtttaattgagaaattcacatgattgcaacatggtttcttcctaatgtttcatcatctcattttttttcctttaaaaattggacccatcaggaatttatttttgatccaagttacgtagtatagatccgactttacttgatatcttgatagctatgcatctgccctacctcatttactaactaatccatctttccctgatagattttaaatgtcactgttaccatatattaaatttacttctgtattttttgactttcacaatacatcattttgtttctttaaactctccaatataacccaccccgtcttgaatccctcattcccatcatgactgtctaggagagcagccactgaaggctcccctttagtaaacttgttcattccaggcaacaatgctgctgctgctgctgctgctgctaagtcacttcagtcgtgtccgactctgtgcaaccccatagacagcagtccaccaggctcctctgtccctgggattctccaggcaagaatactggagtggactgccatttccttctccatcaggcaaccacaggggattatttatgaaactttttccactgcatgccctagatttgctataacccatttcccctggtagctcagctggtaaagaatccacctgcaatgcaggagaccctggttcgattcctgggttgggaagatcccctggagaagggataggctacccactccagtattcttggactttcctggggctcagatggtcaagaatatgcctgca

SEQ ID NO: 26774 - DNA, 1687 bp, Bovine  19866880414848
  misc_feature (1)..(1): n is a, c, g, or t
nttgttttgtgaaagcctttctctttgagataggtttggactgtgaccttgtctagctcctatggaatttgtgcaattaataaaatctatattctgcttacctcctagtaagttgttccaggactccccaaaggctgaggcaggaaggttctgttagtggtagcagattcttgaagcacgggagtcccactgggtttataggcacacgagtgaggtgactatatttgtctttaaagtggtcacttgggtagtaatgtagataaaagatctgaggtagaaatgcatgacttggaactgggagaaccaggccatcgaaacaccttcccgtgctgctaattttgcttgaacaagtcctttgagatgtgaattgggaaaaaagaagaaagaagaaagtaggtgcatctttgacttttccctgtgatgtgaatggatgcatgttatttcttaagtaccatgcactgagcattctggctgagaccagaaaatacaacttgcagccaatttcctccagaaaaaaatgggaaaagaaagaaagactttttgctctttagtctgtaaaatgaactaatccccagcaggccttcctgtcagtgctaactatcagagcagaactgcggtgggaaagagaaggcaaggacgagaaaagaagtattagcattatcccaactggcccatttctctcccctcagtttttaaaatagaaatcccatatggttccatatgataggacatcttaatgtagtgttatatataagtctcttttctgctacagttgaattttttatttgtttgtactttcatccccaaataattgatgatgtataaatgtgaagccagagtgctaatgccagcagatagaggattcagcaggaagaagtttaaagtatgaggtcaagtaatagcagcctcttagcacttattcttcaatattaaaatatacatatgttttcctttaaggacacggctgcaacatgatttgtggagctcaatgcaaaatgaaaatgcagtgcctggtactgggattggggttggatgagaggccctctttgaattgtgccccccaaactcactgtggtttggaatgggcattgctttgtcccacccccagatcagcccctcctggtaccctcccctcctctgttcccaggctcctcaaaggagatggagaaaagggaccaaagaacaaagccttgagatgcggtaatcgttgccctgggtgaaggtttgtttccgagtggaggtctgttagcagccaactggggtgggaaaggagggagcggggctggggagtgaggaggcaatgaagcttctgggcacgaagcctaagtctccttgggaggtggcaagaggcaggagtctgtgctgtgtgatctcaggctccaggcctttccccttctgcgtgttccatttcatcagacatcacttaagaagcacacatagacacagttatgaagaacctcaagatggtgactaccgagcattaaactccaagtgcaggggcctttctgagcctggaaccctgcagaagtgtgcaggttatgagcccacgaatctgatcttcctggagagacactcctttggtgctgaccgggaagggcaggacagagttctcatcgaaggaaatgaaaaccagtgaaacagttgctaggcttgggaagaccacgggttagatctcggctccaacatc

SEQ ID NO: 26775 - DNA, 837 bp, Bovine  19866880557536
  misc_feature (1)..(1): n is a, c, g, or t
ntttccttatgtttgctcttcaggaaaaaaaaaaaaaagaaaacaactgtaacctttttaaaatcgaaaggatgatataaaaatgcccagcatcttcttccgtaacgcttacaaccccatcaagctgtattattaaaatgacagggaaccctgttatctagtagatgaaaacctcgccatgagagctttggagcagagggaaacctaatccctcttgttgccactgtgatgacaggtattgtattccaggtgcgggagcgataacacggttgcctcaccgtgtaattatcattgtttccgttggtgttatcctaagtagtaattatcactaactcacatatggcatttggtagtaacttggaaaacagcctgccactttggcttcatcatttggggtggatgttgatggcattatgctggaaatcctgagttgctagtagttgcttctgtgaggctcccaagagggctgtatacactggggactctagcaggttgggaagcaaagtgccgctttgtcattagctgtacgagtacctgattctccaatataaacctctggtaatgttcaggtagggggttcggcttcagcttgagaccttaaccaggctctcagcacccctctggctggctgcatgggcatgtgagtgatgtatatttttgttgctgctctttgtcgctctgttgtgtccgactcttttgcgaccccatggaccatagcccgccgggttcctctatccgtgggatttcccaggcaagaatactggagtgggttgccatttcctcctacaggggatcttcccgtatcagggatctaacccgcgtctcctacacaggcag

SEQ ID NO: 26776 - DNA, 931 bp, Bovine  19866880561786
  misc_feature (1)..(1): n is a, c, g, or t
ngagtgaggtgaaggtgcataaagaaggtattttctctgcggaagcaagtgttgctcccttcactgaaacagtgatctatagttgcccttccctttcttccccaacccagggccagcgatgcagctcggagcccggccagctgagctgtggcaaccaggctagcagcttcactctgccaactcagcactgctgaaagaagctaacagctcgaagccttctctcagaaaattacagggagctgttccggagaagacactgggggtaggggtaggggtagtcagcctgagctatgggacctttactgcataacttattcattcattgactcaatagccattcacctggcacccactgtatagtaagcatcatacgaggtactgcggacagaactgtgaaaaaggtagatgcaatctctctcattgtggagcttatagtctctctgggcatgtacttgggccttttcttcaagaaaaattgggtatttaggaggacccactgtggtcaatgcaattagaattcattgactatgtattggtctccttctatgtactcaacatactgaatactgaaatgagaaaggaaaaaaatgtccacagtccatgtcctcaagaaatgaacagagtaggcaatggcagactagttaacaagctcatcagtattcaatgtgataagtgttattacaggtacatacagtattcagaagaagtggagactagtttattccatgtggaactccttggccctgactctgagtgagatgggaaccactgaaaggttttgagcagaggagtgacataatttcacacattttaaaaagcttggaggatggatttaaggagcaaggtaagggaggaaacagggatgctggttagtaggtttaatgcaacaaaccaggtttgttgtcttggaccaaagaaccaataatgtagg

SEQ ID NO: 26777 - DNA, 722 bp, Bovine  19866880623483
  misc_feature (1)..(1): n is a, c, g, or t
ntgcaaatggaggtgatgttaccactttccagatgatggaaaggaggccgagacatcctacaatctgtcccatgtcacacagctgctcagagtaagagctcaggttggtatgacctgaatcctgtgttaattccaatctctcaccctcctaggaatgtgacagctcttcagctgtaggtgttttattattctcaaattcttcaggaaaaagaaaaaagacagttccaagagtaatgtattttggagacacttttctaaattggaaagcgaggacacacagtgacagaaaatcttaaatttgcaagcatcccaagttttgtaaccaaatatttcacaaaagaaaagctattataaatattgcagcaagttaaactttctttcaggatagttctgaattccatgcccatgaatatctaaaacctgggaactgcgaattagtatccatatgatgtgttaacagtcactgttcattctgtctcctgcttcactggtggaaaagattaatatatcattcagttaataccaagtataatttatttccgaagtggtatgtttcctttacaacatcaaatctggcagctctatgctgtgctgttctgtcagctggaataatgcctttaatgaacttgtctctggaatatcaaatgtgtaatctgctacatgacttgcagctctactgctcagaccctcgtcatcggcctccggctcccgcaatcaagaga

SEQ ID NO: 26778 - DNA, 1530 bp, Bovine  19866880647508
  misc_feature (1)..(1): n is a, c, g, or t
nttccacctgcaaaataacttgcatccttgcaacgctggtagatggctctttattggtcttcttaaacaaaagtcatgggtcttgcatcactgtggtgagaaacattgagtctgggtgagactttctttgattcctttggatgagaaatcagagcacaagagctagcctcctctttaattgactgcatgatgtgcatgagtcaaaattttacttttccactgagttaaagcaaaatttttagaggtgttgtgttctagttcctgatggaatccttggtgggttgtgactttgacacatcagggagtgatgtagggaggtgattagaagatggaatactagggtagaggtgaggagtcctagaattcccttgaattagctgtaacattatgcaaagcacaatctcttgagcatccatttcctcatctaccagatagactaatagtaatatacctgtcaggatcattgtgaagattagataaattgaaagtactgaacttggtaaacagtaagcacccaaatatttgttcttttctccttgatgaagagcagactttggatggtttgatacaagtctagatcctttgaacaaaacaaggaaccctcctgacttcagaaaaacaaaaacgaaaactctgtttctgaaagagccttaaaagaaagtcatgtatttaatccacttttctgccttagtgcataactgttacccaagagactccacttctttacctacttcaagaaaggtattctttctcttccaatgggcaattccagggttgtaaactcattatcaggaaacttaaccttattactgaaatacctcacagtgcaatttgaacctctttcttcttgatcccatcctccatgagaagaaaaattggttgatcctgtcttctttttaaagggccatgtttgccatttattattacccttttgcctcattttaaaaaagctgacagaaaaagttcattaaggtgataattattatccccttggggactgtcaggattcttatcgatagtgatcagatttagatcacaaacactgttgtaactcttcagttagtattttcttctttagttaacatattattgataaccaagtgtgcttctgaagacttattctggttgtgtggctcttgttttctcctcttggtaaaagtggagtcacgaatcccagctttgtcaactacttttagaatgtaatttcatatgtgacataatttgatggacataattaccaacacctaatattagcagggtttcttgccttttctacattctgaaataaaaatcagaataccaaatgcctaataaagcaaaaattcttgcacagaatagcaaaaggtaagaatctggtctgctagaataatttgtcactagttggttgaatggtgcagagcttttgtttaaagttacacagttatgcctggattaaataacaatagcaaaacttgagaagccctctgaaaaacagctgctaaacatactgctttctggaaagtaatcattaagaagtaaatattctcttgt

SEQ ID NO: 26779 - DNA, 725 bp, Bovine  19866880701401
  misc_feature (1)..(1): n is a, c, g, or t
natttaaactccaatatataaaacaaaacaaaaacactaaagtgaagtgcaaagatgtgtaacaggaattatattttaaaggatgaataggatgaatatgaaatacttttttaccaactattatttttccaaatttcttatagtcatttctttatatgtatatgtcacacacacacacacacatgtatgtgtgtttctgtgggtatctgtccaaaaagaaactgcaaatgaagtatctaaatgaactttaaaagatctgtacctaactttggacaaactgaagtctcgcaatagggggagaatatttaattctaaatcttaagtgctgtaaacactatgtttcaggctctgattatatcttgattagctcagtttttctcagagtgcgtttcatattatactaggcctagagaattttctgtgatcagataagtttggcaaatactgcaaattctatttccttattggagattcacagcacgtattagcataataaaggttttgcatttttctgcagttaaacacacacaggcattttaaccttgctgaaacctgggtttcccaaatgtatcaatatttgactatggaaacttgaaaaacatgtatatattagggtatgaacattctgtactcttcctgaattttaccaagaatatagacatttatcagaaacatgatggacacacctaacagctaatttacatgtctcagcacaacttctcttg

SEQ ID NO: 26780 - DNA, 1173 bp, Bovine  19866880710734
  misc_feature (1)..(1): n is a, c, g, or t
naaataccatttttctaatcctgtcattgcttctgcattagctgacatttgataaaacagagctattttcatcagttgggactatttagtaccctgaaatacaattctgttggaaaggcaagttaaatgttgagttctctgcttttttatttacaacttctaaatgaggagttggcttaataaataaatggtgaggaataaatatttttcttgctttctcttttttgatatccttatggagtaatggattttcatgaatcaattaaaatatggaatcaaatgttttaattagctacaatcattattctttttatgttccatttgttttatgttcaattaattaaaacttcagccaatgatagtcctttgaatagcatgaaataccaagatcctggcccttggaatgtcaattgttattgggatgatagaccttttcaatggtctttctagtccttgaatttcaatattgaaagtttcaataatgaaaatttaagtagtaagtaatgtctgtattttaaaaattgctaagttcatatactatttccaattcaattttaacattattatgtttttaagtggccacttgattttataattgtatattttacactgaaaatctcaaccaataacattgctttatcttaaaatatgaagaaaatgatttcaaaataacatcaatattactactactaatgaaaccaaatgaagtttgacatttttttatttttgtagcatagcttgatttgaatggaagaataatatatgtactttttagtttttaattactttcctttgaaatatgtcgtctgtttcttttttgtcataggttgatcactttggatttaatatcgatagaacttttaaacagcggtacctaatagctgataactactggaaggaagatggtggatccatacttttctacactggtaatgaaggggacattatttggttttgcaataacacggtatgtgcagatgtgctcaatttcttttttattatgatcaactagaaaaaaatcttttgtagtatatatgaccaaataattctgaagtttaaaaaaaaaagataaactcacaaataatagagaaacagcaaaagtatgtgaataggcagtttacaaaagaataaatacagacatccaatgagcctgttcagccttaaagaattaca

SEQ ID NO: 26781 - DNA, 1638 bp, Bovine  19866880844769
  misc_feature (1)..(1): n is a, c, g, or t
nagatctagtgatagctgccagaatcctggaaaataatctttgtcatggggctcaaaacaagaactgctgtcagggccacataagctgctgagatcgctattcgaactttctaaagcaagtaagtggctattaggtgtctgggagccacagcgaagtttcctgacagcagaaagcttcaaaagtcgacggaaatagtcaatgacagtgaagcctacaacatttgggtctggtggaatgatctggcaagctacgagtgctttaactactctcttgcggtctgagcactgctctgagaagttactggaacctgaaccttttccatgctggttttcaaaattctgtggaagaagtaaatgaatttaaatgagaataaatttttcttcctttgacttaaacatgaaacagggatttaaaaggttaaaacagatgtagctataactcccacccccataattcaattcctctagcatgatagggttatatggaattataattatggtgaaataaaccttggagtaaagagacttgtcttcaaattctgttccaaacatttcctaatgtggggactttggataagttattaggagcctcagttttttcatttataaagtaaggatacatagtcaggattattatattagcaataacacacaaaaaattgtggtgcttagcaaatagttgttgttcaataaatggtagttactattacatttctcactagcttccataaactttgaatgtttaaaggaatgttcttatatcgctaaaaacaaaaaaggaaaaaaagaggcatctaagattttaacacagaaaacctctgtagctcctagtttcaacttccctttgggttttctcactgttcagttgtgaagtgctgtgttccctttttaaagccctgatcgcaatacaggcaaaatattcatttgttcctgttagcatacaagagacagaaaaagattattccttaagagtcagcacgttctttagactttttctacagtcacttttatataagaccatccttcctaacctattctaagagttatcagtactcagttactttgctttcaatgttacttccctcctttttgtagataagagttgatcaaagttttactatagaatctaaaccgaatttagagagcacagtaaataccaaatatcaaaacaaaatacctaacgcttatgaatttataataaatttagatttctaaaactctgaaagcctttcaacagggctcgtctagcttttgaaagaggaacttgtcatatacatgatgttttaaaggatcatctatagcctatttttatgtagtttaaagggtttctacaggccctcacatttatgactcctaaaaactacttagaaaattaaaagtttcactacaatggaaatattagcataatactaagaacaaactagtctcaattaccgtcactccaaaaacaaagttttgtccgacaaagcaagtttccactgctttagttaataggttttgggttgtatcactgcccagagtttctggtatttcactgggatcctgaatgtaccttaattgaaaagaaaataaaaaatgggagagcatgaaacttttaagttacatataggaaaaagaaatgtgactttaacagctagg

SEQ ID NO: 26782 - DNA, 1632 bp, Bovine  19866880919848
  misc_feature (1)..(1): n is a, c, g, or t
ntaactgctgctgtaagcatagtctttaaatttaactccttcttaattaagcatttaccagttctttgcttgccatatttcagtttttttcttggtaactcattttgatcaggagaattataagcagcgtggcatttccttagacccggggcccggaatccaagcatatctgaaggaaacactttttgtgtggtaggagggacccactcattagcgtcagtttcaaggcactcagtgacaggatggttgttggagacctctggtggtgtaccagatacagtagggcttctggatttctggccaggtgtctttatattttttggacagacaggggtggcctgcagtgcgtcatttgcagaagaaatccttgtttttttatagttagcatcaaggtccaaataaaaggcaggtaatttttggaaagctcctttcattccatgaatcctactttggtggaatccagtaactggagttgactgtgaacacggaacaaagtcttggctatattcaatatcatattctgaatctgattgaaaatgaggtggagagggacaggttcttggatagagagaggcagatgtgttttgcaaggataatttttgtgatgaccggctggagttttcagaaagtgatctcagggaaaaatcagattctgtatgatgactttctgccaaagactttccccactgtaagaaaatattctgtgaccttttggtcatttctgttacaatgtccatctctttaggactatcatcaaagagatccacagaagcattgtaactgccttcatgaccagtagaacagttctgtgttgggttattaccagtgtgttcataaagcatttctctcaatatattcatacttctatttggagtactgtgaagagcttctaaaggatatgtgagtttcctgcaaattgtcaaactgttgccctgattctttggccgcctacagtattgtttattttctaagctgggaaacttggaaacaacattatacctcctagaatgcaaagttgtcaacttttcactcatttctgaaagtgatttttctccacatccattattatatttgctgctgagacaagaatggtcagcctctgaagtattgtgcttacatgaaatttcagtctcacatggtagaattctcgtagacttaagagcaactgttgtgcctgagccttttgaagatggaaacagagctgacagatgaacatttggtagagaatgttcagaaatatctcttttattaccactaaaagagagagcctctgctctgttctctggctgtgattccttatgaatgctaggacttggatttgcttcatggttggaaaggaagttctctctgctggagtttgctttgactgttgctggtggtgaccttaaggctatacgtggtgtatgcaaggctccaggggttctttgtggagtcagtgataacctgctgtggtccacatgcagtttactgatgtcattatctagacgacatttcctgctgctggcatctgtctggtttacagcgatttcactttcgatagctgccagaaatttgtttaggctttcagagagtggcaggtcatcccagatctcaaggtcacagtcctgggaaccactgactatttcctcaagt

SEQ ID NO: 26783 - DNA, 727 bp, Bovine  19866881164642
  misc_feature (1)..(1): n is a, c, g, or t
ntttgaacttgctgtcattgttctgagctttttggtttcagctgaggatatccttttcctttcctttatctttcttacagtgcccttatcattcagaccggatgaatgctgaaaacaatgagtagtctatagagtatatttttaaggtgatgattaagagtctctagagcccattttatagtgacaccgggactgaaaattggatgttggagctccccggaggaaaactgctgctattttcttcagttgcttgcttttgtggaggatcttcatgtggatatattgtaaagtttaatttggaatgctaaaagcctttaaagccatgtattagtcaatataagaaaaacttattttaagcaatctctgaagagagaatgctgtaagttgtctgtttcagcagttcttacagtgttattcacagaagatcctttgtggggcaggaggagttgtattttagcattgtgtagtagtatcttctttgtatgtattacttaaaacagtagtttattgttttgacagaggtaactaggtagagattgtggtccctgatgtcttttgtctcaccagagagaaacagagactgtcaagtttgagaacaattagattctcactttgtataatttcttgaaataggttttggataaaaagggtagaagtaaaatctgctttgttaatttccattaagtgctactgggagcctgatggccttggaactctttcaccattt

SEQ ID NO: 26784 - DNA, 1636 bp, Bovine  19866881310972
  misc_feature (1)..(1): n is a, c, g, or t
naacatacagatcctaggtactgatgtaaattacaccctttaaaattttgacctaacagaaatgattagctaatttacacatataagagccattaagaataatgtaaaaatactgcttttaaaggctgaaataattaaatattattgtttgtaagatgctgatttgcttgacctaggagagacagattcattctacacatcagcactcgggtgaatactatgtaattgtgctgtggttgagactcaaggtgcccgtttattgtggaaagtgaaagtgttagctcagtcatgtccagctctctgtgagcccatggactgtagctcaccagtctcctctatccatggagttctccaggcaagaatatgggagtggattgccctttccttctccaggggatcttcccaacccagggatcgaactcaggtctccttcattgcaggcagattctttaccatctgagtcaccagtggctactaatgaaaagttcaaggtgggtcttaaaattaacaggctggccacattcttttagagccatgtttcaagaggctgaaaattttctcctgcttagattattcaaaggaagtgaacattaaacattactgggtttttactcccattttatctcattaatatgttattttaataaggattagatgttgattagctgtaatgacagctaatgattgtatatactaaatttaggcagatgttaaggaatttattctaaaaaataccttccattataaatctcaggagaagctagtgagagaaagtcagagccttctgtgttcaccatgataatgaattaatcgtgacctggaaaggcaaaatgatatctattgcatatgattggctcacccacaggatgggaataacaggtgctctgagtgctttaaaattctaatgaaaaatatttttagaagcactgacaaacttgagatgaaagttttcagagtggaacaaagcagcctttggttgccatcatatatttgttttagaactagcagtgcctccatagatgtattagtccaatcccacccagtgaaatttccaattgatctgaagtcacatagagcgtgttcaaactagataccaagtctgtgtttttcttttccaaatggtccatttgcttgtgcaagtttcttggatatttaattcaacattttccattttgtaccactttatgtattgagcatttatgtgaaagcacagtagtgagtactgaacccctgatccatgtaaagaaattcctttgccactttaaaagtattctgaagactgaagtggaaaacaaaatggatggttaaccatccagtgcaggatcaatattaatatctttgaatttgaaggcagcaacacatatggtatatgataatccctgtatggtgtgtcaactattgtgagaaaactccagatctccgttgtttaaccagttaaggctcaatactcactcaggtcccattctctgtggggttgggtaagtagtcttcctcacaatgtcttgcaggcccaggtatcctcagtacagtaggtttcctatctaccagggctcagcatcctccactggattaaacgttgattgctcacaaggctaggaatttgagagtcacagaaaagagtttaagggtcagggtg

SEQ ID NO: 26785 - DNA, 860 bp, Bovine  19866881340608
  misc_feature (1)..(1): n is a, c, g, or t
ntgcctagcatgtagtaaagtgaagttgctcagttgagtgtgactttgtaatcccatgggcagtatagcctagcaggctcctccgaaggattaaaaaaatacagactaaataaaatagtgacagtttcacatttaattcagtctttattgacccttcttctgagtcaaagcccacagatgctgctgggttaactgattatctaccatgctcccagagcaacgtaaaatgtaatatccattaaaaaagttccatcattgtgttaattgtattgtattgaaattgtctattatatttctgtcttacctagtagactaaaatcttttgagatcagtgatcttgtagctttgtatcataaacccaacagtagctggcaggcattttctgatctaagttgaacaactaagaaagactacattttggtctgcaaaagctttatttctgcatgtatgtgtgatttaacaaatacttttaacaagcaaaattaacaatattactttagtacaatcaacaatacaagataaagtgccaaattatctgaaatcagagcattctggataaaacactgggaaaaacaatggcttccccttgtttataggcattaatagcacctcttttctatttgcttcaagtcttcaaaatggtaagtgtgctttccatgaccctggaggcagagtttccagagacacacctttaaaagctcagaaattgggtttaggtgacattttgtgagaagagttcaggagaccacgcacttttactttcaggtgctgacggtgaccagttttctgaaaatggaaggcaacatttgacttctgcacaagaaccacgtcccaaaacgactctttagaaatccagccta

SEQ ID NO: 26786 - DNA, 1279 bp, Bovine  19866881361858
  misc_feature (1)..(1): n is a, c, g, or t
nattaggcccttctcctactgatgccagtctggttgagacctgagttttccaagtcccgttctttttggactgctttaaggtctagcatgttttgtggccgaagtttctggcatgaaaggagaggaacaagaggatgatgggagaggccttctgcaggtttttaaggtttgagcagctccatctggatgaaactgaaacaaagaaaaattctgatcataaagacaatgccttatgcactttagggagatggatatgtcaacacaatagtgaagaagaaattgaaccatttgagaaattgagacatacagtatttttgagtaagtcagccattctcattcttcttttggacagctacagggtcatgccttcttaggggaattttagaactcactcagtgggctggctttaatcagactgcagccatttccttttctgttgccttgtcataaggaggggtttggtcagatgctgtctctccagcccataagttgtaatgcaggtttttatgcatggtctgaacacagaggtgatagatggtacccaggatgcttgggaagattgccttatgactttgccctcagcaaactgcccttcataagctgaaggcatcaccttcacaagggcagcttcagtgccttctttgaaaaagtaattttcttttgtgagtcacatgctgtgtcatggtttatcacaataggaagaactgaaagctatagaacccaggaggcaaaaaagagctgtctaaggaataacaagaactgattttattctctgtcacgcagtgataaaaaggcattttgtaaaagcttttagtttggttttctttttttcctaatcatgttcaggaatgcatctaatgcattttgtattgaaaggaaaaaggagaatcattttaaagaattgccttcctttaaaaagattttatctgactagagttggagatgtgggctccttatgaagtatacaagtcaacagaatgctatgggaacatggaaaagttagtacggactctgcttgagagaatctgggaaggtttcatacaggggtgaactcaagctgggcctcatagggtgtgtaggagttttctttgtgaaaatggagaaaggacattccaaacaagcaaaaaaccatgtgcaaagacacaaaagcatctctcaaacctctacacaatttttttttttttttggtaagcactgactatttttgctcctggacttggtataaaagaaatgctgcttaggtttacagaggagatatgaattccatatcagtaataat

SEQ ID NO: 26787 - DNA, 1860 bp, Bovine  19866881375917
  misc_feature (1)..(1): n is a, c, g, or t
naaaaaaattcccaggtatccaaaatgggcctaaactcccaaagagtgttgtgagagtttagattctctgcgttgtgttcttttagacctgacgcgttagaaaggtatgtcctgtggcgaatgcaagattgtgtgttgtccagtaggttgacagcacctcgtactgtgttgtatgcagtagatagatctggggacttcaggggagttggacagcctctctgaagtggggctagtaatagggcttaagggtgaattaaatgagacagtgtaagtcagacgtccagcataacactagaggttaaagcatctgcctccaatgtgggagacctgggttcgatccctgggtcgggaagatcccctggagaaggaaatggtaacccattccagtattcttgcctggagaatcctatggacggagaagcctggtaggctacagtccatggggtcacaaagagttcggacacgactgagcgacttcacttacttactgaagtggggctagtaatagggcttaagggtgaactaaatgagacagtgtaagtcaaatgtccatcgtaacacttggcactcagacatctgtagtgttggttctccttcccagctgctgtacctcaggagagcttaatagatatttttcacagatttttttcttcagaagctttaagggagtcagacttgactgtagcatcaatgtattttattttgttatctataaaatatttaggagtattgaaagaagtgttttcttatttcaagggcatcttgaattatttctggagattggctagctcagctggctatattcagcaagccatagccaacacttaagctatttattttagtatatttgctatgcacctgtgcctttcctgttggttcagatagaatggatttattttcaagtcaagaatgaacgcttatgtctaagactcagagtttgatgcagaattgcaagcattggtagtttaagagcgtaaatggtgctgcaacttgtctgtgagatggaaagtaataacttctctcatccattgcagtcctatctaaaaaggtctttgttttactattgaaaaatgtaacaattctttccatttctctaccattctgtatgttatataacatgttcacaggaactgcctcaaccaaatcttactacatttccttgaggaattgagattcaaaggcatttattattaaatcctcccctgtatgttagctttggttattagacttctgcataacactctcttgtgatctttgtcttcaacacttaatgaaggacaggtaattggaaagcagagtaaccaggactgaaacccaggtcttggatgcccagtccagtgctttttttggtaacagtcttgttcccctgggagacggtgtgatgctgtagaaagaacaccagcttgagtcagatgacagggcctctaatcacagcgacctgcttatggtggttcctttagggagtcatgccctctctatgggcctcatgtaattcaccagtaaaatgaggagtttagacatgatgacctctttggtctctccctaccctgacaatcaatccatttgcctataggacacactcttatcatgggaagattccaaagaggtgctttcattccaccgctggcctgattgggaaagaagtttatgaggcttccctggtgtctcagatgagaaagaatcttcccacaatgtgggaaacccagatttgatctctgggttgggaagatcccatggagaaggtaatggctacccactctagtattcttgcctagagaattccatggacaggggagcctggcaggctatagaccatgggatcgcacagagtcagacatgactgagagactaatactttca

SEQ ID NO: 26788 - DNA, 790 bp, Bovine  19866881385418
  misc_feature (1)..(1): n is a, c, g, or t
ntaattttatcagcctgaaaatcaaccattataaactagctgatatttcagattttatttcattaacctattcattcttcatggtggcaagggatctggttacatctagtagattgaaacctgagtcagtgtttattgggctgggcctcttctcagatgaacatttacatgttaaataagaggcattgtaccttccaagtttgcactttacagtgtggtatagatcgagatttgtttccatgccatttgatatactggttacagagtgatccacctccaattctttttacttgaatgtgccctattatcatttcatgattagtaggatatccagaaggttcaggcctcaggagattagagactgagtttatacacacaactttccattagggttatgcagatcatctatcattttgtcacaggttgttggattcgatgtgacttactcactcttctctgaaatcaccccttttgttaaaacatataaaaatgcatacaataatttttaaatacgacatgtatttaagtgaaatcaccatgtccctaattataagcctaattaaatacttatcatggtttagtatactcgccctacttaaattttcacactctaaattttattttaaagtttatatacttaattacaatctcatgttttttcacatatgcaattcaatgttattaattataattattttttagatatacaaattattacagtgtatctattagaaaccacatttagttaaatcctttgccttttaagataccactcagaacattttaaaag

SEQ ID NO: 26789 - DNA, 1289 bp, Bovine  19866881866419
  misc_feature (1)..(1): n is a, c, g, or t
ncttccactgagagattcaaatagaatttacagctccttatattaaaaatccctacaaactaaacattttaattgttcttataccacccaataaaagtagataattttgctatcatccccatttcattgtaaaagaaacaaaccccaagaaaatgaaatgacttgcccagtgtcacacagccagtatttggcacaagaatctagcctttaaaggcactgttctttcttcaatatattctatcatggtttttttttttaaattgtgtaatatataaatgtctatccttttcaaatattttaagcaaaacactttttttaaattcatttttcagttatataattagctataaagtaatttttttttctttctattggcaagcaaaagatcctcaagctcatataacagttgttagccttaaaatatgtaatgagttccaaattatctagccaaatgagttcagcaacaaatgccctgatggtcataacattaatataatcataaaagtaccattacattaattagaactttgtaaatgctgtaattaagatattccgtgacagctgtctttcctgtccctgagcgttcccaagaaatctcccaacaccacttatttctgaaccatcatctgcctagagttgggagaagccatctgttagtgtatttgaaatgttaagtgacaaaggggtttcaaaccattatatcccttagaatccttaatgggggagggggcggggggagaaatactcaggaaccatttcaaagtgatttttttgctagacgtggaaggaaggctaacttaatttacttatttttaatcttgcatgaggattaaatagtggagacattctggagttctgagtcaggtagatccgactttgctaagaaaagtttcttaaactctctgagcctcagtttcttcctcattataatagagaaacatcagaaacaagagcagacttatctatttttatcactgttaagaatataaaaggataaatgtcatgcctggtgtcttataaaattgtcactgaaggctaattgtatctcaaaatatcattagaatgactttaacaatgatacactgctggtctttttccagctattttatgcagctttggaaaatgtgattagtttagtcctcagaactactttttacggtggttatacttattttttactaaaactaagaggttgcataaagagtcttaaagtgtgacaaagaggtgttccatttctactataatccaccactcatttgattttaagcaaatcagttcactggacccca

SEQ ID NO: 26790 - DNA, 783 bp, Bovine  19866881958329
  misc_feature (1)..(1): n is a, c, g, or t
nctatggggttgcacagagtcagacacgactgaagcgacttagcagcatatatatatatatatcactatcatggaaataaatatagcttcacagttctttcttaatcagactctgcatgcttcactagatagtaagcttaattaaggttttgaattatttattgttctttcagtgtccactatggtggtggtggtttagttgctcagtcatgtctgactctttgcaaccccatggactttagtcctctaggctcctctgtccatgggatttcccaggcaagaatattggaatgagtggccattttcttttccaggggatcttcctgacccaggattgaacccacgtcttctatgctgtaccctaatgttgcctctttgttgctcgtaaatcctgatccagtctctgttaccgcacttatcactctgacttgtggtcttcctctaggctagttggctttccaagtctgttgggtagagtagttggagcacacttctctcctggcctgggcaggcaggagtgggaggctggcctgctgagccagctcaggaagaaatgctcccggagcacccagggccgaggcagttaattcgtcccagtggtgaggaggaaatttcttgtaaaagctagttcgcctcagaacaatgtggccttttattttttagctttggaatggagcctagctgtccgtggaaacaaagagaggagagaatcactgaaccagtctcgcacataaaaaactgaccatgtctgtctttgaagtctcctttatgtcgttttgaaaa

SEQ ID NO: 26791 - DNA, 614 bp, Bovine  19866882231982
  misc_feature (1)..(1): n is a, c, g, or t
ntcttttgtttctctgaagcaggatttctcttggttttgaagttgaagtctctttggtccatgtgtcactttccccttttctaccctcccaaaaggaaaagaagaagatggataaaaatgatgtaattgcagctggtaggaaggatatccaatgccaaaccaggaaatgggagtcgtttcttttgtgcttgattcaatgactttgaactgtgctgtaaataaataataggactgaaccttatacctgtgtgttgcttctgaagcttgctccagctgttaggaatgctgtgtgcactgggcttggctgtttttaaaggaaagtcctttaattttctctcttctatttggcagcttttcttattctgggatatttgccactgtggtactgccagtaagaaatctggccttttctgccccatttatctttgtttctaaggtaagttttgtggtaatttggttacattttgccagtttaggaaaatgactctgttctccttttctttttacatctaagcaagttttatattctccagtcgccaatgatacttcagtaagaagcctttaaaaattgatcaatcagctattcagaaggtaaaatgtagtagtgttcagtg

SEQ ID NO: 26792 - DNA, 1781 bp, Bovine  19866880397580
  misc_feature (1)..(1): n is a, c, g, or t
ncttcaaactccataatattctttttcatcactgttcttaatacactatactataatttcttggttgtgtcctggcatggccaccgtagcttgagctgccaggggccagatggctttgacgtttactttccaaagttggtttgcgcataacagacatgaatgaatgattgaatggatgaacaaatgaaagaatgtgagaccttctgactcccagtccagtgctccataccctattttctataaaccaccttcttcatgtcccttaaatggtttttctcttgagattttcaacaaattgagtagaattaacatttcctcatgatgtttaggactaatcacagtcattttccctgagatctcacaagaccttgaccaagtttacaaagcaaacaaaagacatcccagtttctttcttatctcttgaggtacaggcaggtctttcctgtagtgcaattggtagaaaagaggggaaaaaaaaaaaaaaaaaaacacatggtgatgctctcaggctatttgaaaatattggacaaaatgtcatcttaaatgattttaagcaagacatataaccctaggactgacattccccagtgatttatatagttaggggtgattttcccagagcaactacttaatatttctgtaacagcctgagagtgtgggattttgggggctgcttgcaagtatcgctgtgaattacattagtctaaggggtgtgtctttaccttgtccttttctgatcattgtcatagaaatgcactcataggatttagttttgtctacagtgcttttccatcaacatgtgtaacataagcattttccagggggttataaagtgctcgatgccttaattttaatggtccctaacattttccaagtgagtgtatcataatttattagctaaataaataataagaggctatttcctctattgtagggcatttatgttgtagccaatattatgatcctacaatatagcaatgtgataaataacccaaaggagagagctttctgtgaattctctccttggaccatttccttagggtcagttcccagcagcctgccatttattcttgataactggatttgtgggcaaaagatgagctcatcaggggacatggatcaagggaagaaagttaactcactattccctgaacactctgatgattgttctccagctgttgagatgtatgccctattccagggaaaaccttgcattttacattaatatttattttctaataaatttttattcaaaagcaatcctcttaaagagggatgcagaataaatatgtagaaaggaaaagtcaataactcccttttacagcccctttgttctcacccctctgatgacagatttttacagcttggtgtgtatccttccatacatttctccatgcccacacaaattaacacgtttttgaaaatacgaacaggctcctttataattctggatgacttatttatttattgcaattaacaatatatcatagaagtacttttaggtcagtaagagctcattctttataagacatgaataatattccataagaagggatatgccacaagttatccaactatttttgaattaatagaaattcaggttgtttccagacaaatacaattgctaccaagcttttagaagaaatgttgaggtaaattgtctttaaatatcactaggatcattttctctttcagttcagttcagttcagtcgctcagtcatgtccgactctttgcgaccccatgaattgcagcacgccaggccctgtccatcatcaactc

SEQ ID NO: 26793 - DNA, 1480 bp, Bovine  19866880438844
  misc_feature (1)..(1): n is a, c, g, or t
naatgatatgaaagatcgaaccaacaacagagtcagtacttcatgttcttgactgcaataatcaaaatggaccttgccatttcgccagactgccagaatggagtcttaagaaaaggctgtataaaatgttactgtctactacttttttgtgtgtggtgggaaaggagtattatatgcaaaatctttaattcttccaaagcagtgcataaatgctctcaaagctttacccgttactgcagtggaatattttagagattttacagtgtttttatgcattcaccaaagagctacgcttcatttttacacacacaaaaataagctttaaaaaaaaaatcttctaccaaattctttttgtcaccgactcacgagtaaaattacctcaaaaaagaaataggagggtgatggttaataattagcctgcattgaaatttagcattaataaaattaatttcccatcaagtatctctaaaaagatgactaatcaaacttttttaaaaaaagaaagttccctagaaacagaactcgtacatacaaatggcaactggtgaagaggaagcaatataaaaaaatgtgcttaatcatttatttcttaagtttcatcatgtgtgtggtatttggcatgtaaataggggtggtttgttgtggaaacagaacaaatgtggattgaattcatggccaaaaatagcaaacaaataggaatttttatatgctttaatgtttaatcacagtattatctttgaatgtaaatatatacatgtgtgtaaacaagcatacacacatacatatttacttgtgtattcacagagatagtttaattttgaatctccttttgctttcatttaaaatcaaaaaaggaaacaacaagaccctactgtatagcatagggcactatattcaatatctgtgacaagccccacgatggaaaagagcatgaaaaagcatattatacacacatatgtgtaaccaagtcacgtttctgtacagcagaaattaaacactgtcaattaaacattgtatacaactatacttcaataaaaatgttaaaaatgctaatcagaagaaagctgtagttagatggtgttggaacactagattgctatatgctaaaaaattaatcggcatcttacatcatatatatatatgtaaaattcaaagtagattttagatgtaaacggatgcatttttcaaacttccaaaataatatacagaaaaaaaaaaacaccaaaaaaaccaaaaatgtttagttaacatatcagattaaagatcagatttttataagtttaaatatcagattttttacagccagaatacaaacagcaagagggttaaaaagcagttgctacttgcttgcctgaaaagcatcttatctagagctgaccccattggccaacgccgtcttctcttgttcattgtacttgatttggtgtgtcacctgtctcttgttgtctatagattagcacaaaaagtcatgcaaactaag

SEQ ID NO: 26794 - DNA, 1343 bp, Bovine  19866880467365
  misc_feature (1)..(1): n is a, c, g, or t
naataaaaattgaatttcgtctgcctgttgacaagctgattgatctgggggctcttgtgactgaatcctctcctaagcacattctcatttatcatgtgcgagattgtttcagaatcgatagcagccctgagcagacacgtctctgctggggacccgtcagggcccacagccttccctgtaacactgctaatttttttgacagaattatttcaacagttaaatcgttctaggcctgttgttcccagcctttcactagaattgtttgttaaggtcatactttttaatatacttcctgtaaacactggaccttgaggagtttgccctttttctcatgaggttaatttctcacccccgctctgaaagtgaaagtgttagtcgctcagtcatgctaagagtcagtcatgtctgactcttggcgaccccatggactgtagccctccaggctcctctgtccatagaattctcgaggcaagaatactggagtgggtagccattcacttaatctgtggttgagcgatgttaaattttaggatgcccctgaggtgcaactctttatatacaacctgtgtcaaaggataagagcaagagaaagcaacttaactgccatcctagggcttcatggcctagctgtgtggctttggcaatgatctttccctctctgagcctcatgttaagaaattgggtcagatgaagtcttaagtagagtctatcttggatactctctttgtccaagtcagcagttgtgaaccagaggttcatgggtagaatttggtctgaagatggggttcatttagcttccagagtatctgctttttgtttgttaaatttgattcccttttttcttactttatttaaaaaattaatttgttaatattttaaaattacataaatacaattcattctttctgtgacacactaattttggtatgagttttgacacatgcgtaaatgcttgtacccacagtatacagaacaagataacatcccaagaactccttcatgtttctccctcaaaatcaagccctgcccccactcttaacccctgacaatcactaatatgttctctgttcctatagctttgtctctttcaggatatcacctgaatgaaattatatgattatataacctcttgaaaccaagttcatgagcacaatgcatttgatattcacccatgatgtatgtgtcggcgatttgctccttttatttctgaataatattccactggggcttcattgtttgtatgtatgtatcaccatgtgtttatatgttcatctactgaagggtatttgggctttttcaagtttttgatgatcatgaaaaacggtcccattagcatttgtggg

SEQ ID NO: 26795 - DNA, 3894 bp, Bovine  19866880493623
  misc_feature (1)..(1): n is a, c, g, or t
ntgtgacattttgttacagagtttaattacatgaatctaaaatattgctacaattttccaaactgttaaaccttaattaatatgaacccacagggaccaccttgatcgttctaaatattctgaggcacaactcctacagtagtgcttccatccgcctgaagtgctttgtaatttgcaaaaagtgattaattattagaaatgaaaccagacaaattaatttaatataaatgaggctgtacatgatttgattaattctttttaattacctatatgttatttttttcaatagctgaacaaaggactccattcttctcctgcatgttcatattcattaatctcattagcagagagtattaatataattttatcgcacgttccagaagtacggcacattgacaaaccgtaatgaatcgcggcattagtgccctatcactacattaatttcaagacatgcctggctcatctgcaatttactttgaggcttactttaaaatgagctgaataagcgtgtaattatgacatctgcttcttttcaggtacctcctttgtaaatcagtgacaaaggaatagcaggtttaaatatgtgttaacacctggatagcatgtataattgcaatatggcgatgtgtaatgaagattaaattagaccatactatacctgacatatgcaagaacataattgaactattgtcattattgcagtagaagcagctgcaaaatgctaatattggcattgaggaaaatgaaaccacgctggaaaagaaggctgaagaagatagtctcaaaaaaagtcaccaagcaaaaaaccgtatcaagattggatgctgcaaactctaggattttagcctcttccccctttgtggctgatgacagttggtcatgaatttcatgaaactttccaaaagggtccatttcggatgtcactggggcatgacctcacactgcatatcttgtatgctcagcacttctgctctaggagggccatggggtgggcaccctgcccagtgctcctttctagagcctcaggcaggaactggaatcctgggattgaaatccagactcttggtatggttaaccctagatttcccagagcaagacatcgagaataagagaatgctttgagatcacctgggaagcaaggtgaccttgggaagggttttaggggtttgcagtcatcagaggcccccagaaagctgggaaagagaagaaaattgcatcttctctctcaaatcccccctatcttccctgaaaacaaattgttaggatagcctttaggatttattcagtttcagataagaaattatcacaagccacatttactgtgaacctcatatcctcctgggccaagtgggtcgggggcgggggggacacttaaccacatctatggtttttccctcttggaagcacagtccctgggtgtttgcacatagagcttgacagcagccctgaaatattgcttttgaatttaacaaatactctaaaggaatttggggctctatctcaaaacagtgttaaggaattggctttctcaacaaaaatccccatgccagcctttttaagttgatggtaagggaatgtgaagagaaactaaaaagagatgaaaataagactacttcatccgagatgctggtgctgaaagaccaacacaactttctggcagagttgacaagaggaagtggggagcattacgttaattgattgagatgttcagctactcaaagtcatttcataacagcagggattgacatgacacctgattgaatgaaaaatagtttctgagagaggatgtgatatttataaaataattgtaataaaaccatttaaacaaatgtggtgcattggaggccacttaaaaatcctatgtttcaaagtgtggtttcagaagataagcatggttggattgtctgggaggtttgttaaagcatgagttcttaagatccaaccccagagcctaaggatcagaaactctggaagagccatttgggaatctacatgtttaaaaagctcctggtgacttttaatacacaattcctgatctaatgtagccacctcttttgacagaggaggaggaaacaaagaccctaaaaacggggaccagagcccaagcagcctctctcccgtgatgctgagtgtgcgtggaaaggaaaaggtgggatctggctttcagcagtcgacaggtacttgcacagcatcacttggtccattgagtttgtgcttcaccagatgtagcaaacagatgttataatgctacctggtttcatccactgaggcctgtcacagacccaggacttcagagcagctccactcttcagggctgatcagtagagagaatgatcacaggagagttttctgcaaagttttagaacaagaaagaggattatgacttcaacttgcagtgaggactgtttcagtgtcaactttcccccacagtcattcatttattccctaatgtatccatttatcttacaacccttatcaagctcgtccgatatgccaggtattaatgttaagcacctaggttacaaccttaagtaagaaggaaactgttctggtccccaataggaatcaattagatccaacctgtttggctttcaaaggagatgtgaaatgaagtgatcgtactacatgggttgtttcccctcttttctgagctctgtatgtacctagagttccaggtatataaaggatcattgggggatattcattttctccttatcctcttccttcttactttccctttaatatgagtgagaaatcagcttgtagaacaagtctgagtaattgatcctgtgctttgtaagtcctccccacttcctctcatcagctcttgccaggaagccccgatgtcagcaattccccgcgagcatcttcagatgaaaccgtgttcctttcatctccttttagttcctcttcacatttccttacctattactgacatgattgcttgtttaacaaacgtataccactgattggttaaatattaaataatcggtgccaaactaagtacaacattttgaacgacatggttttcattccatattatagctccttgttggaaagaaagcctattttagaatctctagctccatagggattgaaagaagtcggccaggacacatttaaagaagggtgtcagctgaatgaaagagcgagtgtatcaactagcgtagacaaggctgtattgcagtgacaataatacacctgtcttggtgacagcaaaccacaaaggctctgttcctcatttttagagcagcctccatcttaagagatgctgttaccatccagagactaagagtgagctctgagaccacaaattaaagctctggaatgaatggggcccgtgtcattttcactcataactcattggtcagagtcagttctctgatcctaccgcaactggaagggccaggaagtgcagtcctcccccatgcctgcagggagatggatggagagatttgagagacagcgctgatggcagcacaggagtaatcgaatgttatcatccttgctcgagcttcaagtcagcctgcttagaaggaggctgcaaattaggcaaaacatgtagcccccagcctgaatttcttggctgaaaattgagcacctcacctgcccaaataaagttacttggctgagctattctctgtctttgataaaagtggagtttcttggagagctgcaaggaaaaggcaggtccctcgtgttcctaactatgaattagagcgaaggatgtgaggaaagtgagttccctgttggctttaagtcatctcttcttatgtatgaaaactagagagagccccgactttgatatgggacatctcttgagtgataactagtcttgtcttgcagatttaggtgacaaatcagcaggtcagatactataaaaatggtgtgatg

SEQ ID NO: 26796 - DNA, 1559 bp, Bovine  19866880501025
  misc_feature (1)..(1): n is a, c, g, or t
naggaaagttcactcgccctggggtgaatgaagggtgagggaagacatccttaatgtcttccaatatcatcctaatgacatctcagaaacgaggaggatggacaggagtagctgggcaaaggatttactgatgacatcacagcactgagataagcatgtctaaggggagaggtgtgggaagcctggctttacaatggatgctggtacttccatttgagcgacatgtagactagactgtggagggactagttagcaagaaggctagagaagcaagcaggtgtcaggtcgtgctaaggtgaattttactggcaagagccagtaaaaggtttgaaggggaagagttttgagttttagaaagattattccatactatgtatggaaaacagattagagaaaaatagtactgaggacaagaaggtcaattaagacttgttgctgaaattccgtaagtgattatgaagacagataaagggactagaggcaagaacagagagaagggaatgaactcaaatggtcgagactgggatgcctaggtgtggtcaggagtaaaggaagggtccatggtaacccctgggtgtaatacttcagcttggacattcaacctcaggaacagatgtttagtccgcaactggataagaggcgatataacctattgaaaaaagacactcacactaattaattttcttctaaacaaaaatagaagtcaatagaaatgggacatattaatgactgttcacataaactgttaaaggaataagataatcctttaagattaagtattaaggactcccagcagactttaaaatgtaagcaaaggaatttctcacaaaaattaaagttgacaatatcacactctggacaggatgtgaggaaatggtaacttaggttcacttttgctggcaatgcatattgatacaatccagaaaatctgacctttttgtataaaccttagaagaactctggtgtacaggtacatgtacaggatattaattgaatcactgtatataaaaaatattcaaaagtgaatggataaaaatggtggtatgttcatataatagaagtggataaatatcaaaaagatcattttaactgaaaaaaatcaaattgctgaatgatattgaagcaatccattgtattacttatggatacttatgttagtagtaaatacattacagtagatataaaagaatatataaaagaattcctagggacacctaactcagggataaaggagaaatcaaggatggatattgaaaggtttccaaaatgtctggtttattaaaccatttatttattttttcaaccattccactgttgacattttgcaacagataattctttgttgtggaggattttcctgtgcatggcaagatgtttaccagcatctctggcctctacatactagaaaccagtaccactgccccttatcaaccatcaaaaacatctctagacactgtcaaattggtccctgggggcaaaaacatccttgtttacaaactactactttattagattgatattctttacagttttctttttaaaataatttatttatttta

SEQ ID NO: 26797 - DNA, 1117 bp, Bovine  19866880546047
  misc_feature (1)..(1): n is a, c, g, or t
ncaggtgagccaatcagattatctctttctggaattgccagttgtactggagccagaggaccaatagagcagaattcatattactacttctcagtgtctcttgtttttttctgttaagtatgctgattctaggctactccctgaaaattgagttgtttttgttgttatttttaaaaatttacttattttttaaattgaaggataattcctttacagaattttgttttccatcaaacataaatgtgaatcggtcataggtatacatatgtcccctccctcttgaacacttcctcctttaacaagcactcctaggtgagtcctatcaacccattgatgtggaatatactagttaagaaagagtctaggaacttctctatgggatctccatagtaggctgggttcttccttcccaaattcttgtgagtactcaactcttcactccatcaataagcttaatgcattctcttttgtctttaaattgatcagagatagtttttgttacttacaatgaaagactactaatatggaaatacacttggtgcttgaggcaccaaccaaagggtatgacttgctgaagtcagagttaccgatgagctaatagaataaacctgctagctggttgaagaagattctattctatagtatacccttcattcatttgccctggaaagaagaaaaacatgataaatgagggactttgaccctttaagcaaatgaacaaactgtagctattgttttgcagacctgtgtgacctactgttctgtgtctgctgccttattttgcttcctatcattttattttcagaaagtagccaattccctgggctctcttggtcaatatcccctttgtgtgagaatgaatgttcatctttggatgtaacattgatgtatgagataaacatgtggcgggaaaaaaaaagaaccatgatcccctgtttgacagctgggtcaagaaaggccaacaggccaaatgctttgacatgagcacatagtcagtggagttgttctattttcattcaaagtttcttaattcccaggcactggggaggtagcttctgccttcttaagtgaggtgagtctgctaaatggacatggatatgcttcccaaaaggccaaa

SEQ ID NO: 26798 - DNA, 1629 bp, Bovine  19866880558487
  misc_feature (1)..(1): n is a, c, g, or t
ntggctttaggtagtgcttaaaactgcccatcttgtcaacactgtgactagtgatgagggaacaaatgttccagggtagaaaccagagaatatccaagtatatgaagaactgagtggggctggaaaacagaatactctacacctaattcaatgtgacttttatatatacaacattgactctgtgccagcttttgtatgcagcattgaagatgcagggaggagttaaacatcacctctgtccttgggggagatcccagtgtggagggctgggcaaaaaacacacagcaagctagaccaggaacagtgttataagaggcatttgacgagacatttgttcttgatagtaattctcaagttagagtgagattactcattgagcattttcatgtgttccaaaaaaggaaaacattttcttgttctgtacagagatgatgctacagggaagggataaagttttctttcttctcttctcttttgtaaaacactgaatttgaactgctgaggtggcacaactataacagctcaaagtttcagtcctggtttgaagatgaaagccaaactgtgtacatgggttctttattcctttgctaaataaattcctctgtgaactacgggaaatgaaaggccccactgagggaggcagtggggtcaaagatggcagctcccccaccctctgtacggagcagcacctaatgctccttggggggtccttttctagactcctccccatcgctaacttttaggaactctctttatttatagacatgtcggccttgctcagtgctggagcttgtgtgtggcgttgaaggtacaggaagaattaaacatgacccctgtcccagtgtagagggcaaggtacaaacaaacagcgagtcagactaagaacggtgttccgagaagcacttgctaagacatctaaccggggccttagttagatctttgggactgcacttattaagaactaattttccactctttgcattaactgagaagccagagagggcccacagaagagggtgggttgaaaggggtggggttcccccctttagtatctagagtaaggctattattgtaagatatgtggatttaggaagctaccctttccttaatctggaatttattggaagaccaaggactatacctcttatggacattttgtttcaatctggctagtgtccattctcctgttttcctccatctgcactggattttatgtgggcaaccattagccctcacttgccttctcctagagttcaagctctctggagtgtaaaccgtgactcagagtttgatatcctcaggctactatgataggtgcagggaagacacaaggcctggactggaccagtgagagcaaatgggactctattctgagacttttgttgaaactactgggggaaagcattctttctcttgtatggtagtcaggggcctgagagataaacctggggctgcggacatcttgccaccacagagggagaagttatcttagagttcagccgttctagactaaagaagaaaaattggtgccagggtcctaatgatgttgtttttgaagcctcttatatgcatgaacttttcagttgtatgaaccagtctctttctttctggctggtggtcaagtcagtg

SEQ ID NO: 26799 - DNA, 930 bp, Bovine  19866880588053
  misc_feature (1)..(1): n is a, c, g, or t
naaataaaataataaatcaaattctacttcagacatctggccacttgttaagaagcgtgcagcctgccatcagcaactttaccagctacacctaaagggaaaaacatcaatttcaaatcagtggctactgtcaagcatgtataaatgtatttcattgcttctttgcaatcagagatagtggaggcctgaactacaaaggcaatagctaaagagagggtctcttctcacacctctgctactttctactgctgggacgttcatctgagtcccagtacaagtgcctgcacgcacgcgcgcacacacacacacaggccctttcaacgtttcccaattttttaaaaatattttccccactccctcccttccctgttataagtattaatactgcattaatttataacacaaacctgctaggtaaacccaaaaggaagagtaaatgagtttaaacaaacaaaaaaaatatacacacacattatatatacacacagacacacacacatcccactgaaagatacccacaactgaattatttctctctttaaatagcaaaaacattggtctgcccataaagaactaaatgttcacttgttttcctttagatcttccagaattggctctccaggaacttctcccatattggccaaagtagctacattttataagctactgctgcctctaaggcatgctccaacatttccactggcttaagtattctcatacttttttcaagtttgtagttgcccaagtttaattaccccagaacaattccgtcatcgacaactaactaaaagagtgtggaattccccacccccatccatctattcattgagattctaccatgtctggaatgtccagggaaagattcaataatcaagggagaaatgagttgcagaaactcaaagagcacagaatagccaaggcaggagatta

SEQ ID NO: 26800 - DNA, 1680 bp, Bovine  19866880646109
  misc_feature (1)..(1): n is a, c, g, or t
ntttgcttttcttttaaaattatatgtgttcttatgtgtgtgaatgtgtgtatgtctgtgtgtatgtctgtgtatgtatgtgtggtaaaagagtatggaaaataaaaggaaaatgtaccacaaatccattgcctacacatggacatgacatgaaaatacacatgtagtagtaacataagatgaaaaggaatagatttcactaatggtatttgtacattttcttctgtatcctaccaataacaaagtattctgtaatgacttgcaaaatacatgtatttcctcctccatattttgttttgtttgtttcctcctccatattgttcttcattcatgagacaatccaatatatgcaattgtaccctagcttttattatcatatattatatcctggtgctattttcctatatgtatgtaaatatgtatttttaaacaatcatttagtattccatcaacttatttaactagctcccaataagctaatttagattacataatttttttctaatgaaaaaattctgtgcaatgaatattcttaagcatatcttctgacatagttctgtgagtatatatccacagttttgtgattatatagcagtcagatatttttagtcaagaatcctatgcattgtttaaaattcctgcagatattgccaaatgtccttctaaagagcttgcatcaattcaccctctcgccaccagactgtgaccactgctttttactgtgtctgctaactttcacattcatgtcacccggtgatcccacgaaagttatgatgcaggttcaatatgggtgtcacccttgtttctagcatgaatcaaggctatgacccagatgttctgattctaagtacagaacgttttctcggacaaattaaagatgcaaagataaattgaaggttggtaccctctttttctgcctctgacagttgaagagagcaaatacaatggggaatctgtggttcagagctgtgggataagggctttcaccaagtttggaagctactaaaacaccatttacttagagtttggggttgagccataaccctctattgttgaaaggcattttcctttgtaatacttccatggaaagaaaaaggacttgaaagttgtatttattaaaaagccccaaaggcatgtgaacatcaatttacatttttcttttttatagaaaaaaataacgtagttaagtgtaaatgaatgtcaaacatgtggtttatatttcctttaagacgcatgtgggctttaaaaactaatggaaataccttaggagaaacacactccacaaaatggtgaatctaaaatatatagaacatttggagcaggttggttctggtagaggagatcctctgacgcctcacatgagatttcaaagagggaggcagtcctctaagctcagggctcacctctgtttgggttcatgacttagagagatgtgagatacttcaaagttaagaaggccattaccatttctccctatccatttaatgaacacttcttctgttccgggaatcagagaaatgaagacaaattagagacagccttgtcttcaaggagctgaagtcctagtaagaaactagatgaggagagagataacaaaaatggaatgtgattggtaaaataaaacatagtcaggacactacagagaggaaagttcactcgccctggggtgaatgaagggtg

SEQ ID NO: 26801 - DNA, 1044 bp, Bovine  19866880651367
  misc_feature (1)..(1): n is a, c, g, or t
ncttcttatgtgcataaactggtctgtttatacctattacttaaccaagagaagctcatcttttcttctttcccggaaaacaatctttaaaagcaataaaaagcctgccctccatgaattcaggagagataggagcctttagggagaaaagaagcagctgtgtaagtcagaaatgtcatttggagaacatgtcattcgttctgcccagctcagtaatcttgacacttaaaggggcaaggcatgctttgccccatgataaaacgtgaaatgaaatcgtacatttataaataaatgatctgactctaattggcatttccaagccctctctgggtagtagctttcttgttaacaagctacagcatttgacactagtgatataggagcctcagaagagaaattgcaagactatttctaaactcctatttagtaatagaacctggaaactttcttttaatacctgcacctctggactgacatatggagaagttaacaataaaagtttttgagcacagctagagctgaaaataagaagcaaaacattctcaaggaagaaaaaagtagatttttaaaggttccatatcttaggagaagtatacatttgggataagagatatacaaaatgagcctggagcatctcttcatagctgaaagcaaagatgtactaaaaaactaaaaagcatagaaaaacaaaaaatctacactgatatggacatatcaaagggacaaaggagccagctgaaagcactcccaactgacaatgctggaacaattaggcagcaatataaattaaataatattagattataactcaaagtatattataaatatccattagttcctatggacatagttgagcaaattaaattaggggagaagtgatgaatttgtcattcagaagaactgcaaatatttctatattattttctccttcatgggtgtgtgtgtgtgtgtatgtgagctcagtcgtatatgactcttagtggcaccatggactgtagcccgccaggcttctctgcccatggaattttccaagcagggacactg

SEQ ID NO: 26802 - DNA, 1590 bp, Bovine  19866880719714
  misc_feature (1)..(1): n is a, c, g, or t
naagggcaatgatgatcctaatagaatctgtgaggggcatattacatctggagtattgtttgctcagttctgggtgaaagagtgagcaattatatacagcagggatttgcaatgcatgtcacacaagaaatggttatcagcgctggggacaaatgagaacaaaatgataatattttcggggaataataatgacctcgatctatttgaagagcattcaggtgtaaaagggagtaaacctaatctttgttgctgtctgttttagtctgctattgccacattaatgctgcggcttattactacatttatttacctcataggtatctgcaggagaactggagtttgtctgatctgatgtaggcttgcctgggcttggctgcaggtcctgatttgggttcagttttgttctctatgttcctttttctttgagaatcagtaggtgccctggggaataattttttcatagtgatggaagaagcacagaaaggcacacaaaaatcagagcctcttctggtatcacatccaccaattctccaattgcccaaatcaaaccatctcaaagtcaaaggtcaagaaattactatgaggccatgggaaggaaactggatgtattagtattacagagtagtaaaaccaatcattcaacacaacccacccccagactaatagggcaaaactaagttcagtgggctaaagaacattgattctgctttaatgtaataaaaatggaatgatcgttgaaactgtccaatggtaggtgtaaactagcaaaacccttgtcccagatgaggttagagtccagtgattcactttctgagagcgtcataaatggaactccggcatcatttaggaattcagacactgaggcaactggtatctttccaactctaacatcctactattcttgatcctattctaccccacacccttctttccagactctgctgtcctgaggctatttctccccaagccatctgctgggaagtttatatatggcttttttgcgtccctgagagtttcacatgagcatcccttatcttcccaattgctttggaagcatttcagtggcacagactgggtcttaaacttcttttgccactgtctatagactagctcagggtcaggcaccaggttcttagcatggcattgaacaaccatccagcacccagcctggccccaagccatcttgtcagcttcatctcctacttttcacacactgtgctccaaccaacttgagctacttgcccttccttgtacatagcctctgcttctcaggattttgctcactcaaataccattctctcttatcctcacaggcacagatcctatcatctcacccagggaaaataatatgctatgttctccaagatattttcccactgatactccatccataaagaagtttcttactattctgaataccctaacctttttttgtgaaacttaagattttcatgggatataaaagtggttctcaattctaaccatattagggtggtttgagagtatatgaaacatttatatccagttcccatcccaaagtcatctcatattattgacctgttaagagaaactccaagtaacagggtttcg

SEQ ID NO: 26803 - DNA, 1248 bp, Bovine  19866880787252
  misc_feature (1)..(1): n is a, c, g, or t
ntgattgtttttggagatagggcctttaaagaagtgatcaagttcaaacaaagcatttagggtgtgttcataacacaacctgactggtgtccttataagaagagattaggacatgcagagagacagcatagaggctctagcacagagagatgaccacgagaagaggcagcgtgagggtggccatccacaagcaaaggacagaggtctcagcagaaaccagtcctgccaacaccttggtctggtgcttccagcctctgttgtgtaggccacccagtttttggtatttcatatggcagccctgaccaaccaagatagcaaattaagtgggtttcactgctctcagttgcaaggaacagaagacttcaacttaattgactcagaagatagaatatgtattatttcacatagctagaaatcaggaggaaaagagctccggggctggttaattcagtgactcatgacattgtcaaggatctgtgttctttgcatgtttctgcgttaccattcttatctcagtatgtcagctctgacctcaggctagactcccttcacgttgacaacatttccagacatgacactgtccagaagaagaaattattatatcttcttgtttccttttaagagcaaagaaactcttaacaagccctcctgcactcttttgcacgtctcatcaaacagaaatacatcacagccaaagactaaactaatcactggccatgaaaattggggacatcatgatagaatctactctgaatgaatacgagccagtggaggaaaatgggcctacataaaataaaggcggggttaagcagtaagaggaaatggatttgggccaggaaaacaactgtgtctttctggttccttttactatgtttcgtaggccacaaggagaaggaactggcaccccactccagtattcttgcctgggaaatcccaccgacaggaggagcctggcaggctacagtccacggggtctcaaagagacacgactcagtgacggagcacatgtgctagaccacaattctatgtacaagaaatttgacaaatgcattgcagaattagaaacacttctttaatatcactcctctaatctgttgatcttgttaatatttacccacagaaacaaataagtttggatgttgatattttcataaccttgcataatttaaaaaatttgtatacgtgctacagatcccttttataagaatgaggctcagagacttaaaataatttcctcaagaacataca

SEQ ID NO: 26804 - DNA, 1225 bp, Bovine  19866880825531
  misc_feature (1)..(1): n is a, c, g, or t
ngacatgaggaaattggaactactcaaaatatataattcaattccaagcaattgtttgtatctatgacagctcagatccagccaaatgaccaataactgcctttgaattagagacttaggtgattgttgcagttttgaaaacccagtcttgggagaactcaaaagaaaagtgggggtgttttttaacagaaaacctaacctgcctgactgtccctttcttctgaatctcttcttcttagtctacactgtaaggtgttaatgaaaagtaatgtgtacctacagcaacaagcattttccagagcatagtcccaaaaaagctgtcaagagagagaggtttgttgataaagaatttcatgatcaaatatgtctaggacattcaatattagcttccctttccaaccatttgaaaatccaccaggcatcttggcatattaaaggctctgaaaagtcctacagtaaagaaaacttttaaatgtgttccagcagcatttttcaagcttaattaagcacggggatatttgcttcccctacacacagatcgagtgttccataaagcatagttttagaaatattaacaaaaataaaaatactgagaaaactaaatatgtcaggtaaatatatttcttatcctaaaaaaaaaatggaaagcatctctcaatgttattatttgtcaagaaagaagaagctaaaggaacctttttcagtctcagcaaaaggaagctctccacatatctgactcaaatgttcttttctgtgcgtaggtcgtgtctgtgaacaaacgccagacacacactccttgcattgagtggcacatgccagagcaggcaggggctaggtgcccctcccactaaaaagtacagcttcaacactcattaacccactcagaaggaccttgtgcaggtattactacaggtacccagggaagaattaatagcacctttgtctgtgtccccaaaaggaacataaatgctcctcctgttcattcccagcatctaatccatcaagaaactgtctggaagataaattggagctaagctgacttttgttaataatgtaacaattttgaaagtgcagctttaatcaagggggaaattttctagaatttgacaaccttttccattccctttggtataggctccattcttttttcaaaactgtctaatgctgtttcttaaggtggggttcaatagaaaccagtctataatgcaatgcactctttttatgt

SEQ ID NO: 26805 - DNA, 901 bp, Bovine  19866880842749
  misc_feature (1)..(1): n is a, c, g, or t
ntaccatcagtcacatttcccatttcaggaccaaagttgaagcagaagtttctatctggtcttctggaacgaaaaaagaggtagtgaaaacatctatggctcttgaagcctctgctcacatcacttccactcacgtttcactagtcaaagtgagtcagataatcaggtggccacgcctgatgtcaatggggcagaaagtacagtcctccataggtaatggtctgatatggagggctcacaatattttgaaaaaatgaagtcagtgacaagggaagagttttttttaagagacttatcaaacgtctcaggcaacgagtaaaattatttagctggagcagtgagtgagtcttgaagagcttgatgagataagatgccagcaagttgtaggggggtggggggagaggcaggctgaaaagtgaaaggtaatgaagttttgaagtccctgcagctgagttagatttgatgcaagagtctacatggaggatgacatgaaaacatggctgggttctctgatctaaaatttgctttgactcatattcagcagactcatttaacatttaatgagtttatcctgtgtgccagttgtggtgcaatgtagacatttgcatatgtatatttaaaattttaatcctcatgacatctctctgaagtagatagtattattccgtatttttttttaagttgaagaagtaagctcacagaggttaaacgacttgcttaaggatacaaaaggagtacatacgagagccatgatgcaaattgaggtcttttctttctactgcatcactgcagggcaaagaaataaaaatgccacctttctttagtattgacttgttattctttatcttctccttatacccagagtctgaaagcaaggttaatatgatactttttctcctca

SEQ ID NO: 26806 - DNA, 1123 bp, Bovine  19866880857666
  misc_feature (1)..(1): n is a, c, g, or t
ntattactcgaaaagcaaacactcgtgtgtttggcacacacggatctatgtaaattaggggagattattttgctgctagtccttggctgttcggggatcaaaatgtaattgtttcctaattcttaagaaacagaatctctactggactcagttctttttttggtggtggtttttttttttttttttacaattttattgttctatggttattaaaaataacatgtcctataaattcaacctagagacttgggtgcttatcaaagaaaggatatcatcagaggctccaactatgggaggaatatatgtgcattggtatatagacctgttgtggaaggacttaatatctgtgtaatgattttttttgccttaatggccctatagctgaagaataaaaaacggactgactgccacccatcgctaagagagtcctgggtcttcagctttcattgttcagtcagtaggctttgtgggcgaccctgcagggcccctcttgctggaaaccctctgagcttcctgatttctagtcctgtaaaaacctcctcccccatcactacctttgtctctttggggggtggggagtggggaaaaaacctttttcacttgagcaaaataaaaactacccagtatttgtttctggagtgtaattataaacttcattgtacattcttcctggctttgatgcttatcttgaagagttcagtgaaaataaattgtttttatgaaagcagagaaaccatttgataaacacgctgtctctgaaaattgttcctgcaaaagaggtcattctttcactttaaaagaaatagaatatatttcagaaaacaggcaaggcaacagtttaggatttctgtgaatacaggacatattttttttaaaacagggtgtaaacacgttgaaaattgcacacctcctggttgtatggagtgtattggtttttaaaacagctttattgaagagctacttaggtcacaagcaaatactggctatatttcatatttctgggaatgaattctcagctcagtacttttttttttgctactaaggttttggggttactgtttcataattactgtatatctgtggaacctataggtatatctattcctagtaaaagtcaaactta

SEQ ID NO: 26807 - DNA, 1328 bp, Bovine  19866880914041
  misc_feature (1)..(1): n is a, c, g, or t
nttatgatctgaatagtgaacaatggtcccccaatctcttttactttagtgtccagattttatggttgaggaatctcttcctagtcttatactaagtctgaacaggccagttgctagattaaacctatctcccacctcagtgtgtggttgcttattcattcatccattcaataaatattattggacatcagctatactcttaactgtggagttccaatggtgaccaaaagaagctcttacaaaacttacagtcttatggtaattaaaatattggcttcataggtcaaaccagtgtttcacatttggtactagagttaaaaatgatttgggtcaaatcaacttaaaactcaaacgaaaggagaaataaaaagcaacgtgcacacacctgatgtgaatcagttcccgcaggccttagaatgctgcttggctcacagcccagtaaattatattaaagtagaagggagtacagagaaggcaatggcactccactccagtactcttgcctggaaaatcccatggacggaggagcctggtaggctgcagtccctggggtcgcgaagagtcggacatgactgagcgactttactttcacttttcacttccatgcattggagaaggaaatggcaacccactccagtattcttgcctggagaatcccagggatgggggagcctggtaggctgctgtctatggggtcgcgcagagtcggacacgactgaagcaacttagcagcagcagcagcagaaggaggtacaggaaaaagagaaaagctaaagaatggagaaattgccaaagaaggaaaaaaaggaaggggataaaaagactattcatgtgggtaactgatggttgaaaattttcctttttcacatagaggatggttgaatagagaatcttgcttctaaatgcatacatactgacctgctttaataattcaaatcggagtacaggttcacagagcttccagaatcctccataaaatcaaagatacataaggcaggaaaggctcagcctaattagagtttgtagaagccagccagcatgagttggggtgggagagtaaggtggggtcaccttctgcagcaccagggagagagagccctggactatgtcaggaacagctgggtacaggtaagaagtaggggaatctgaggcacctcaaattatttttactgtctatagattcctacgttagtggagtctttgaaaattttcagggtaatccatttgtcatcaaggcagataaagcacatttgcagtcagccaaggaaaatttagcaatggcctagttgtgtactgggtcggattttgagtactaggtctatgcagaa

SEQ ID NO: 26808 - DNA, 1229 bp, Bovine  19866880966608
  misc_feature (1)..(1): n is a, c, g, or t
ntaaaaatgaaaaatgcttagcctttggaattttagttgacagcttttgaaaattaaattataagtcaagtcctgataggtttgatatcttcccttgcagctttgccaatgatgtattgcagctttaatggaatatcatttatcatctgataataacaaatgtagtatttctgagcttgtcatctcttctgtgatgacaaatagtccaacttgtagcggtgataatggaattttataatgatctgtcctaaactgactcaactgcagcctgagctatttttcttaaatctcataatgcctattacatatagattacaacagtcagcgcctcccatcttagcatgggaacagatcagtgaatccagattttaggcaaacaacctcaaagtatcaaataatatttacttgtttatcaaaattatccctcttaggctaataagcaagcttgtcggagactgtcggaaatgggaaactataaaacctaatagttaaaaaaaaaaagtgatacaaactctgtttatctcttaaacagtaggtaatgcatttagttttcagctctactccttcaatccatcattttctagagatttatttaatgaaggcctacgtagtgctgagaacacaagttagagagcccaggtgcccttccactttatcttgaagcaggatttattttgtgtcttaactctcagcttgtctgatatcacagccttagttgataacatagttgcacctgtacattctgtagtcaaaaatctcttgccctcttggctctcttctgaaacttccaatcagcctgagacatcatagaaagcctaggtctggaggatgtgagcttcttaaaatgctctgatgatatgtggatgtaactgtagccgccatggtgctctgggggctgcctcacagaaagggactttgtcaacacagccaggggaggcatctcagtggacaggagggtgcactgtttctcctggcagatctgatgttctgtctgtggtcacagcagaccagcatatgacaaaggaacaggcccacgtgaggtctcggttttgaccctgagggagcagagaacactgttagtggcacaaactgatatgcagatcgatgtccgacaggtgttaagtgttccctggtggggaccgacaaaagtactggggagctgtgcatttcagatgggctatgatgacagagccagtagggatatttcatagctactcagtctttgatcg

SEQ ID NO: 26809 - DNA, 3476 bp, Bovine  19866880982483
  misc_feature (1)..(1): n is a, c, g, or t
nctgtaaaatgaagaggttggactgtttggtgctagcttgttgcttaccagctgtgtaccttgaagaagtatcagagcctctctgagctagattcccatctctgaaaagggcatcgttatttctgccttgcagggtggttaagaagaatatgggagaccatgtgtgaacagtgtggggccctgtgcctggcatgatagtgataagcgatgatggctattgtctcttcctgagagtgcctgagtctggagcggtttggaagaggactcacttgccaagcgagatcctacagggccttgcaagggcattctgatgacactgtggtgaggatgccacactagcataggcaggggataaagagaactttcagctaaaagggagcctaccaactgtttgagctgctgtttattaagctaccgctcttctctagatgctttacaaatacttcacacaaccttgactcagtctaatagggctgacattaatggcatccccatggccagtagtgagtggaagtacaagaattaaaaactctgctctttctcctttatcattttgctctgattatgcctaattagatctttaaaattacgtgcaccaattaattgattttttgattaaaaaatcaatttttaaattaccagtgaaatagttttttttcaggtgtacaccaaacacatgtgcaatatagcaaatacaagaaatacaagaaaaatccagaaaaatagacaatccactagcaaatctactatccaacatatagacacagctgtgactcaacatttttttctagatcttttttcttttttaaatttctttggcagtgttgggtcttagtgcagcgtgtgggctgttttgttgctgtgtgagaacatctctctagttctggtgcacgggctccagagtgcatgggttttgtttccctgcagcatgagggatctcagttccttgaccagggatcgaacctgagtcccctgcattggaaggcagattcttaaccactggaccatcaggaaagtccttagatctttttttctttgtatgtttttcttatattactgagatcagggaatggtaataggtttttaacatcagtgaaataatgaaataacctcagatgataaggaccttagattagaaagtactgaagttactttattgcaggaggtctcaattgtgggtcattttgcctccaaaggaacatttggcaagatctggtgctatagtatgggtgtttgtgttccccctaaattcatatgttgaaatcttagcacccagtatgatggtgttagaaagtaggacctttgggaggtgcttcggtcctaagggtggagcccccatgaatgggattaggccccagagaacttactgctgccttccaccatgtgaggacccagggataaagtgctggctatgaaccagaaagagagccactatcagaacaaaaccatgctggtaccttgacctgggactttccagccaccagaactctgagaaataaatttctgttgcttctgaggtacctcatctgtgatagtttgtaacagcagcctgaacagactaggcctccagagactgtttggttgtcacaacttgggaaggaaggccactgtcacctagtgggtagagaccagggatgctgctgaacatcccacagtgcagagggcagccagtccctacaacacagattatcctgctcgaatgtcagtagtgcctagatggggaaccctggtctgtctgatgcctccaaacacagtggctttgttggtgttggaaagcagttgcagcctgctcatctccatggcaacgcaccaaagcacaggggggtccagcctgattaagtggtcggggagggctggtagctttggctgcatttctgaggggctgggatccaggtccctgggggttggatttcagcacctccctctcaaagatggtttcccatcccggcagcattgcctccactttcacaaccactttgtcagtggtctgtagtgaagccagagggctgggagtgaagctggagtaccattcccactaattatgagaccctgggatttggcgggtcagaggtcagagacaggtggaaattaagaggaggacatcaagaccccagccaggagaggtgtcctgagtctgcccacgtggccatcagggccgtcttttgtttccttctgtcctgagggagttgggtcaggaacacactgctggtagagactgggtgggagaacaggcagagactttgccctcatgttagttttcggggctgccgtaacaatgcaccacaaatggagtggcttagtcttccctgatgactcagtgggtaaagaatctgcctgcagtgcaggagacagagatgcaggtttgatccctaggtcagaaaaatcccctagagaaggaaatgacaactcactccagtattcttgcctggaaaatttcatggacagaggagcttggtggtctacattccaaagggtccctttttcttcattcctgaattattcttatatactaaatgtgaccctaagctcccttaggatgactttgtttcatttatcttcctatttattccctgcaaacacatctttgggcaagaaagtaatgtaacttgaagtttaaatgtaacctggcttcaaatcatagtatttccaactcttagatgtaaccaggagatggtgcgggacagggaaacccggcgtgctatggtccacgggattgcaaagagttgcatatgattaagcgactgaacaacagcagctgtaaccctgagcaaggtatctcattctctaactgttagggttataatgtgatttaatgaaataatacgtgtaacatagtaagccttcaacaaatgttggatattattattttaaaaaatcttctggacagtatttctctttggtttgatgactcagcagggaatctatttcaacaataacaacaagtcttgtgtaccttggggatctttcctaagagcaatgataaaccatcgtccaatagatgagctaaacttctggtcaccagaaggttctggtcaatagattcagttttgtttcctgaatacttttttaacttcaattcatttccccttttcctagatggggaagaattggaaatacagcctgagttttgattttgcacctgtggattctctttaacagccacaagactactgggatgaaatgattttccagagctctctcatccttctctctgcttgccagccaagcctctgttcaattcatctcagaaaagtgttcatctcaaaacaatagaggagcttctgtaaggttctagaactctgaacttattaaccaagaactccaggggaataagctcttattctgaaagaggaaacagagattagggaccaaaaattatctttctcactctctctcactcacacacacacacatacacacatcctgctctgtttgtgagctataggattttttatttataagagaaatgcagcagt

SEQ ID NO: 26810 - DNA, 723 bp, Bovine  19866880982512
  misc_feature (1)..(1): n is a, c, g, or t
naaaaggaaaaaggatttgtattccaataaggacagtcatcccttagaatgaaaaattggcaatcttgtgctgacaaagagtggggtcctcgggcaaactgtgtaagccccatcacccaaagccagtccttctcctggccacgaacaggaagcgctgccctcacaaagccctctactccttctcattcaaggaggcagaaaagcagatccctcttgagacctgtttccatggtaaccagctagcaattgacaatgtggccggcagttgggcctcctgaaggggaaaatcttcaacggagaccaggccactgagaggcccaagaagggacagctcagacccaggcctcttggggaggacccaggaatcactgggctgtccctttcttgggaaaggccctggtgggttttcaaagaaatagatggagaaggaagaagggcctctctgaaggaggctggtccataaactagcaacaggcaaggtagtggtggccagagaaagaatgtgggcctgacagacaccacccttagaatcaacacaacttaaagcaacttccttgatctccataaggctcagtttcctccaaaagatcaggtaatcctgggcttctgcattgggtaactccagagggcatcactgaagttacagtctgtttgcttaccttcattccaaggagcgtgtgcttgccttccactctgcgctgagaaccaaaagggcaggagcag

SEQ ID NO: 26811 - DNA, 1781 bp, Bovine  19866881007570
  misc_feature (1)..(1): n is a, c, g, or t
nctggtttaagcttggttcaaaggctgaattttcatcttggttttgataagaattcacgtttacttaagacataatccagggacttccaaggagctagtggcagctcttctgtgaagctaagatattattttttatgtttaaaatgtaaatctttaatccttctggattttatttttctaatgtgacaacatgcctcaaatttaaaatatatagagtttttgtcccagaaatccctggtatggtaacctatcctaatgaaatactagctctgggacttttatgaacaagggcatttgtcaaggaaaaaacaaacaaaatgcatgatgtccatcaataagggaaatattgaataaatcctggtataatcatattatggaaaattaaatgtttcccaaagtagacgagttaaatagctattgatccaaagcactgtcaataatgtattgttatatgagcaaagtaccaaatgacaataacaatctcaaatcccttatatcagcatttactttttaaaagtagaaaagacatgactagaaaagctagacttccctggtggctcagacaggaaaacgtctgcctacaatgcgggagacctgggttcaatccctgggtcaggaagatctcctggagaaggaaatggaaacccactccagtattcttgcctggaaaatcccatggatggaggagtctggtaggctacaattcatggggtcgcaaagagtcggacacgactgaatgacttcactcactcttcactcagaaaaacatcaggttgggatattttacttttgtgggagattaagataggtaatattttctttacaagaatttatgttctttctctggtttcagtggttgtggtgaacacatgtcaattttgtaatttggtaaaagattatatctgacaagaaaaaattttaaaacataaaacaagtcaacaaactaaaaatgctcattctctccttgggaaattggtgccatttttggggggagccacacacatgaaaaaagagcaatcttatgtgattatcttataattttcttatgtgattatcttatcttataaggtatcttatgtgattattttataagattgcataaagaggagtctcatgtgatgttttgcctatagtcagtctttctgatagctgggacagttcaggcaaaggtgagagccccaggactgaactggtgacagaagggatcctagagccagtcatcttgaattctgatgacttgacttttatttttccctcaatggagtcccacgggcactcactgccctgctgactcatctaccacttaacccactagatgttaagatgatttcaatcaaacaatatcacagcaagtttttaacccgcccctttctgttgccttctgattttgagttgttgctctgctttcccgagagaaaaaaggattagacttggaggaccaacgtccgtgagttgagcctccctagcaccatgtatgtgaccttcaataaataacactacgcttaaatttctcatctacacaatgaagatgccttcagcagccctcacgcaggattagttcagttcagttcagtcgctcagtcgtgtccgactctttgtgaccccatgaattgcagcacgccaggctccctgtccatcaccaactcccggagttcactcagactcacgtccatcgagtcagtgatcccatacagccatctcatcctctgtcgtccccttctcctcctgcccccaatccctcccagcatcagagtctttcttagaaggagcctaaacaaatg

SEQ ID NO: 26812 - DNA, 1135 bp, Bovine  19866881090754
  misc_feature (1)..(1): n is a, c, g, or t
ncatgtgcttggttgctcagttgtgtctgactctttttgactcccatagactgtagcttgccaggctcctttgtccatgtgatttttctagcaagaatattgtaatgggtaaccatttcctcctccaggggatcttcctgacccaggcattgaacccatgtttcctacattgcagctggattcttccccactgatccaccatggtttttaattcaggcccctgcctaccctgagactcatttcctgcattggagtcatatcctcctttctttgccttaaatgtgcaaagggccttccttctgctggatcttttcacctggtacctggaaggatgcttttcatgggtgtgataacatatcagagtccctccctgtccatcctcgataaagtacttccttagctcctctgcccacagcccagccactctgcaccacactcccagtctcattcccttctcagcacttctcactctctctctgaattctcttctgtaggtctctgctttttggtgaattgtcagtcagcttgtggctcagctggtaaagaatctgcctgcaatgcaggagacctgggttcaatccctggattgggaagattcccttggagaagggagaggctacccattccagtgttctggcctggagaattccatggactgtatagtccatggggatgcaaagagtcggacatcactgagcaaatttcacttgactagaatgcctactccttaaatgtacatcagtatccctaagataaatactgggtacttactcaatatttattgaatagatgaatgaatgattgaatgagagagatttctagctcaggtttatctaaatctaaaacctgagcttaatgtactccacaacgtagtctcttttaatatgagcccagaggctctgaagtaagtgatacctttgggacaattgctgtgatcatgttctggaaggttggtggggagtttgttagcactttttgcctggctagaatttctgtgagtgccatgtgaccaaagagtccactctgaaacacaagggtaattgggatgatgaaaaaaatgtcacctagagacaaaaatcttttgaggaagaagagaagggaaataagaaaaagaagtaagaacgcaagaaagatt

SEQ ID NO: 26813 - DNA, 1333 bp, Bovine  19866881251389
  misc_feature (1)..(1): n is a, c, g, or t
ncaacaagcagccattgaacccctagttgacccctgcattgcacttttgaccatggctcttccctaatgccctgatcatgggtgggtaggggagcagaatccacgggatacttgccttccatcaaaatcaaccttccctgctccctttttttcaagaccctgtcttatcttctacttgtgatgagttaattggatgagataaacagtcagggggagagaaccaactaagttccctaaggcactggtagaaggataatctgagcgtaagtcctctctgaccagctgagttttgtggacaagcccttggcactagctcctcatctactccataaaggagtagatccgctggcccctcctgccctttgtctatgctcttcatgagtcaaacgtggctactgtgggcgacaagaaagcccaggagaccacacatctctcctagatgtggcagtgggtcttggttatccacctacttaggtacgtgactattttctccagcatcattggaagctggcccggtcaactggatgaaaacagaaatcctctgaattgcaaaattgatcctgaaagggcagcatgagattaagaaacatggatgccttgggcaaggtgctaattcgatacctctgtaaacatgttcctgataggcatatatgaggggcatgttggagaacctgatacatacaagaatgaaaattaattacaagtacaaaatccatatactttgcctttatgttcaaatgagaggcttattaaggccctgaaaaagatgtttctttaaagcatatgtttgttaaaaatacagatacagaaaaacgtgaaaagaattcagaatttcaccacccacataaactctgataatcccccaaagtaaaaatatatccctgcaattagaatatataaacaggtcagaaaggaagacgacacagagaaatcttatgtctggtctcttttcacaactatgttttcagtgattcttccagaaacattttatgtatttgcgagtacatttatgcctgagtgaacatatacatgtatgcacgcatacacatatacacatattaattgcagaaaaagaatttaacaaatgtgttacttccattgaatataatcttctatttcaacttttcatctcatagtttttctattactcaacacagtataatgtggatcccttaccatcgtcaacataaagggaatttaggcagatacattttctaagttttgttcaagcgatctctaaagtctctttatctggccttacagtgctgaatttttttagtaacccttgtcctctcctaagttctcttttgcaattttccaaatcagacatctt

SEQ ID NO: 26814 - DNA, 916 bp, Bovine  19866881574863
  misc_feature (1)..(1): n is a, c, g, or t
nagaaaagaaagggaagggaagggcaatcgagaaaaggagggaagtcaggatgggagcaggggaagaaagaacagaaaaagttgaagaggtttaactttgtgctgagtatgtgaaatgtaggtcttggatctaacttgcaacaaaatagagttctgtctctattcccaaggcctccagggattgagggaatatggcgtcaaattctactcccaactcaaggggaaataaccttggtggaaatttgctgaggcctccgtggaagttgaaacagcaactttgaactccaggtttggaaagaatccaggcttcctgcactggaacttcgctggtggcccagtggttaagattccaccctcccaatgcagggggcctgggcttgatccctggtcaaggaacaaagattctgcatgccacacatgcacagttaaacaaataaataaatgtgtttttttttttttaaatcaggtatttttgatataagtaagtgaggtaataattaaaaaaaaaaaaaaaaagacttcctgccatgggatgggctcctcaaggagcttggttgggggaggaggggtagagaattagggacaaccaaccccctctccccactgtacttatgtacccaagagtctgaaaggaatggagttatttttctgtgcctcattgtaatgcagccctaccaccacctggaagctttcctggattgctatcctgtctttctcttagaggtgttgccttgtttttcttccctttttgtttttcaaccctgtgctccaaatggtatctcccagagatgcgcataggaggtgctcagtaattactatttgttgagtgaacagttgaaggaagtactgcggtacaggtgggaaagcgcttgggactctttggaattctgtatccatttccagttgcaccattaat

SEQ ID NO: 26815 - DNA, 1020 bp, Bovine  19866881743865
  misc_feature (1)..(1): n is a, c, g, or t
naaaagtagttatgctgtgaacatgaaggatttacatacaattaagaaaacatacatagttaagaatctgtatctgcagtgaaaaatgtgcctcacctactgctactcttcctccttaaaggcttcgcttaggatgcagaatattagtataaccccggcaatcatagaaaaggctagaacacattcccactggctattagatttattagttcatcttgagcctctaccaacagggactgtctgctgtgtcaatcagtgatgagtgacatctggagagaagagaattttgatgtggtggcccttgtcagcatctatttgtcataggcgttattctctactgtgattcttgggagtagttctagtgctaaagaccatgaaagaaattctttgttaactgtgcactgccatgcccttgcacacctcagaaatggctcctgcaccctctgcagcaaggagttttatttggttaaaattatgtcttccatctgtcagaaagaatgactgttcattacttattcaaagagagttcctgatcttacatgatcggatcatggcattggcaatatggaaacaaccacaccctgttaatgccactggtcccagggaatgtcccacccccaacttacaggtggccacctctcctcccttcaattttactttaaaatgatatagtcagatcaccgaaaatccttttttaatcaatagtggcctgcaagatggtccttattttatgaacaaatagcttgtcaaccttttcattttccaacattgaaaaacagagaaaagcagtcattcaatggtattgtatatgctttcaggtatagcattataatttttgtttctttttcccaggtggtaaatctccatgttgtgtgctgagttacagttataacaaaaaatactttactcttatgatcctgctgctactttgaactaaccatttggggtggcttggtagtcacaaaattaggacagtatttatggagtccagtaactcctgtttaaccggaggaataaaat

SEQ ID NO: 26816 - DNA, 848 bp, Bovine  19866881782218
  misc_feature (1)..(1): n is a, c, g, or t
ntgaggctaggacccccagtcctagtaaatggatttgtcttaccgtactttaagaaatactttctgtcttttgaaatgggatttaaataacagatcaaggtttgctattatcataaatgtataaagtgctttgtgaaaaataaaatggatcatggattcaggataataaaaaaaaatgttttaaaattattaacacatgaaaaaaaaagaattactttcaagccttaagagctaatactattttctggtgtaagaaaagataaatagaccaactgagcaaaacagacagcttagaaacaggcttatattatatttatatggatatttgatatatgacagaggtgacatccaaatcaatatgaagaggacggaataattaataaagggtattgggacaacaggatatccattgtggaataaatttagatttgtaccccacagctcaacacaaattaatcctaggtacactgaggatctgactgtgaaagaaatcatttttaaaactcttagaagaataatgctacaacatagatgaaagacatctgaaataagccaatcccaaaggaaacataccatattattccactcatatgaagtacctagtcaaaattcacagagacaggaagtcgagtggtaatcgtcaggggctggggaagaggacaggacagttaatcttaatgggtagagttgcattcagttttgccagatgataaaaatcctggagacagatggtggtgatggttgcacaacaatgtgaacgtccttacagcccctgaacacatgtgaaaatggtaaaatttatgttaggtacattttaccacaatttaaaaactcagaagaaaatacgg

SEQ ID NO: 26817 - DNA, 1555 bp, Bovine  19866880387340
  misc_feature (1)..(1): n is a, c, g, or t
ntgcataacctaagggaaagtctcttcatttctctgtgctccaatttccctagttgtaaaattaggtgaaagggtgaatgatccttagcatccattattcatctgaaattctaagaagcggttgttatatacctttgagaatatgtttatgtattttaaaatttcatctgaaattatagtgtaatcaatgctaaagatcattgataagtgatacctacaggaagcacatgtaacttattttcatttgtccttcatcttctttatgaacaatatattactatgtctttttctagagaataactaatccaggagacttgtgatgacagataaccctgtgatagtgactattttttttttaattgaagtatagttgatttataatgtgttagtctcacatgtacaaaaatgattcagttattcatagcagtagtattagtcactcaggagactgtagccaccaggctcctctgtccatggaattctccaggcaacaatactggagtgggtggccatttgtgtgtgtgtgtgtatatatacagatttacatacatgtatatttcttttcagattcatttcccttatagattattacaagaaactgtctatagtattgtatgctatacagtaggtttttattggttatctaatttacatatattattacatatattttcatcacaaactccttatttatctctctccttctttccactttggtaaacataaatttgttttcaatgtctcttagtctatttacgttttataaataagtttatttgcatctttttttagattccacatacaaggaattacggtatttgtctttctctatctgccttagtaatttctgctgctgctgctgctaagtcgcttcagtcgtgtccaactctgtgtgaccccatagacggcagcccaccaggctccaccgtccctgggattctccaggaaagaacactggagtgggttgccatttccttctccagtgcatgaaagcgaaaagtcaaagtgaagttgctcagtcgcgttggactcttagcgaccccatggactgcagcctaccaggctcctccatccatgggattttccaggcaggagtactggagtggggtgccattgcattctctgtagtaagctctaggtccatccatattcctgaaaatggcattttttgtttttatgctgagtaatatccctttgtgtatccatacttcatctttgtatctgctcacgtttcagtggacatttcgttcaccccatgttttgttttttgtaaatagtgcagcaatgaacattggggtgcatgtatcttttcaaattatgattttctctggatatatggccagcaatggtattgctggatcctatggaaattccaggtattttaaagagcctccatactgttttccatagtagctgcaccaatgtgggactaaagtataatcttgaatttactgttttcaacaatatattgagaatatattaaaatatagatgaaatatgttacgatagatgatatgtgtcagaatttcagattatactgcagtaagattctcat

SEQ ID NO: 26818 - DNA, 1711 bp, Bovine  19866880479431
  misc_feature (1)..(1): n is a, c, g, or t
ntctatgggatcacagaattggacacgacccagggacggcggggcctggtgggctgccgtctatggggtcgcaaagagtcggacaggactgaagcgacttagcagcagcagcagcagaagtgacttagcagcagcagcagaagagaagggcaatcagggagctaggactttcatacccccataagctgataaagaggcttccatacacagcataaatgaaaactaccgtggggagccagaactcgcactctcacccagcaataagaaggaggcccattcgtgggtatgaacagaggtcccggagggtacttggacttcatctgcctagcagtaggaggcagtattccccctttccctgacagaacaggataagagaaattcagttaaagcaggaagtttgcataagatccagaatctcataacataatatgaaaatctccaggtatcaataaaataaaattttaaaaaaccactcatcataacaagaaccaggaagatttcaaacttaataaaaaataaacattgataaatgcccaaactaagatgacatgggtgttacaattatctgacaaaagattttaaagcagtcatgataaaaatctgcaatgaacaactacaaacatacctgaaacaaatgaaaaagcaaagggaacaaatgaaaaaaaaaaaaaaaaagagtatcaacaaagaagcagaaagttcaataaagacatcaaatagaaattttagaactgaaaaagagatcaagaatgagctcaacaacgcaaggaaagagacagaggaaagaatcagtgaactggaagacaaagcaataaaattatcagatctgaagaacagagacaaataaataaataaagagccatagtgacctagaatttacatcatctgagtccttaaaagagagtagaaagagggcggatctaaaagagtactagaagaaataaaggttgaagatttctcaaattttgcaagagacataaaactgaagatctaagaagtcaaatcaaacctaagaggataaaaaaagtgaaacaaaaaaattcatgccataacacatcataactaaactcctgaaaactaaagacaagagaaaaaatttttgaaagcagactaggaaaaacagtgtcttacttaaaggggaaagataattccaatgatgtaattctcatttaaaaccatagaggctagaaggaagtggcatagtttatttcaagggatgaaagaaaagaactattccagaatgctatatctggtgaaaatattctttagaaatgaagagataaatgagtacattctcagatcaatgaaaactaagagaatttggcaacagcagacctacattacaaggaaggctagagaaagttctataaacaggaaagaaataatgataaaggaaatttgaaacatcaggcgggaaaaaagaacagggcaagaaaaagtatggataaatacattaggctttccttcttcacatgagttttctaaattaggaattacgattgaaacaaaaatcataaccctatctaaatatgtctaaaatgcatggagaggaaatatttaagataattatattataaataaggtagggcaaagggatataagaagaagtgagatttttatatttcacttcaactgattaaatgacaatagtaggctgtgataagttatatatgtgtggctacagtaaccatgactggcccggggggagggg

SEQ ID NO: 26819 - DNA, 1479 bp, Bovine  19866880530078
  misc_feature (1)..(1): n is a, c, g, or t
natgtgctataatgatttccagtgttagaggaaccctagactttgagatatatttttaaatccttgttcctcatttacaaactcacagatattgaacacaccacttaagctctgtgtcttcttatcttaaataagacagtaatacttaattaactggcagagtttctctgagaatcagttcatattttatgtgattacttaagaaaccatagttttcagtaaatgttaattccaatggaatctcactttgaaaatcttaaattctatatcatttagcaaatattaaataaatgctaaattttctcattactcctattgctcagtgagacaagaatccaagcaaagtattcctgacctaaggttagaattcctttatatagtcaatccaattgggttaaatcagactgtcttgagatcctcaacaaattaaacaaaaactaatggaagcttagatttttcaattcaatataagtattctccacttaaaccatcagatagtttctagttatttaacagattgaaaagattccctctactacatggataatgtgaatagacaaaaatcgcgctaagtttaatatctattatatggcaatatataattaatcttttaatgagaaagtttcaaaacccaaactcattttcccaattatcataaatatatgaaagacctaaaaccatgcttatattttcaagagaatgatttattgatttttacacatattttataaacgtgtatacatatgtgtatgtgtatatatataaagtttacaaaaccattcaacatgaagccattactttcctaaaatcatgagaatctaaactgttttgaaagctgataccatgtaatgataatcgtgtgagcttcagttgtatgagttttatagtaaaataaataaaggctattgatgtctgttgatgtaggattttatgtgtctatctggaacactaaattcccacttgaagatacacaaaatgaaacaacatgtcaaaaaagagcatttatggaaatacttttaaggtattgtatcatttttgaggaatagaattttctaaccggtaaatctatgcccttgccaaataaagttgcatttgaaatacagcactgtcagatgctttatttgagaagaaacagaagatgaatgttgcataatgttatgaaacctttgctataacatggaagtggtctttctctcagatagatagacagacagacggacttagtatttgttttattgaaagtgaaagtggaagtttctcagtcgtgtccgactctttgtgaccccatggactatattccatggagttctctaggccagaatactggagtggatagcctttcccttctccagggtatcctctcaacccagggatcgaacccagatctcctgcattgcaggcagattctttaccacattctgaaccgcaagggaaacctaagaatacttgagtggatagtctaacccttctccagcggat

SEQ ID NO: 26820 - DNA, 1104 bp, Bovine  19866880557986
  misc_feature (1)..(1): n is a, c, g, or t
naatgttggaagaggaagctcaatatatcactatctgtgtcctaaatgataaatatagattgaagttgattgcatcccttgatgtgcctttccacattccttttgtgtatgataatgccaccagcaggtagtggaggcaaagaggagatctgaataggtaatgatgctaatttgccacatgcaggaacattgcaaaagtgcccttctgcatttaccatgttagagggggaaaatgataagaagtttgctttagaaatacattataaaagggaaaattgatctttgtctatgtttgtcctcttttgttgttgtgggaacaatattgaatgctttcttgaaactactaatcaattgctatcttcctgccaacaattctttctgtcactgtttgatactttttatcccgtttctcagtacatgctatattaggactattcattcactgaaacatttattgagtgcttacctgtagtccacactgcattaggtgttatggagagtaaatataagtacagaagagaaaatattgtttctaccttaaagaagacattagtctttctatacccaacacaatctgactgttgattgcttttaaggtggttatgagaaatgaagtaacgatgcattttgtcatctaagtataaatacataacatctgtatttaaaattctaccataaacctctcttccacaatttttctacttttcaacacattttcctcatttctttaaaatataatgctaaaatgccacattccttaagatagtgcaatgcttttgccacatcaactccattattattaatcatcttaaaacaatgtgttgcatttcagtaaatattttatcctttataggaaagtatgattgattttactaagcattacttttataattgagacagaaataaaataattacagatttttttcactcctacttatagaatctaaggagattttgagattttcctgttctcccctggctcttaagaggtaatggggtaatctcaaaggaactttgacagtgattcatataacaaagaactgaatcagtagaaaaagtcagggcaaaaactgggctggtcagaatttgagaatttattaaatg

SEQ ID NO: 26821 - DNA, 1478 bp, Bovine  19866880558543
  misc_feature (1)..(1): n is a, c, g, or t
ngaacttaataataagcagttgactagaaggaacagatctttccagaacaggagcttcaaattgtcagatatgattgaatgtgatcccctttggccacaaggttccaggttgaatgctttttctatgctttttgagaatatgaaacagtgagtagtaacacagtaaaatctcaggagacaatgtctttgtgaatatctaccttccctgtatatataaaatttaaatagtcaaattttgagagacccacaaaaggaaccagtgttcactagttctgtcctctccataaatccagacaaattggtggcctcttctcaaatttaaactaccaggaatatgttcatgaatttgctacagcaaatgaatagcaacatagaaaaaccatggaatcttagagttaaaaaaatcttacagaccatctaattccaaacattgccttaggataagtgaaaccaggaaccagctattaaaaggacttagacaattacccaacttcctagttttcctagttcatatttatttaacattattctgtagtattattgattttaagtacatggtaattaataatttcatacatagactcttcttcttttctccaggagctgtactacgttcatccttcctcgtatatctaatagatattatcttaatttttatccagactccataccagaagaatgaaattgtacatagaattgataacccaagttttgaacaattttaatcattgactccatgaaccatagatgaaggtaagaaagacaaaaaatagtaaagatgcaatagagttatttcatgatacttgaacctaagtaattgctcttcttactttctaaatttgtgttaacgtttccttactcatttagtgatgatacatgctacatttcatctctgaaagaagtggcagttttctgtattgttttttattttagtttcaatttaatagtgcaaaagtcaagtagttggttcccagaattaatgttttattttattaatgtttgatcttcttaatatttatatttctaccattttttgatgtaattcaagtgagtataatcattgcctggcaatcatttggatgtgattgaaatatgaagtatgcagattgggaaaaggttgaattaggaaatatatttatcacattttcacttcagcatgacaataaatctctccattaggtgaaaccagccatgtaactatctgcttcctttaagaggaaagatataaaatctaatcagttttatgaaacagtcttgcatgagactaaacaacaattcaaaactgacaaaatactaaatatcacccactgatgctcactcagagaaaacactccagacaattaaaatttctacattcatgaaatatttccacagcaaatctccatatcctagggttcagatttttctatatctcttcactgtggccatacatgactggtagtcatatattcttaactgcttacttgacaagggagaag

SEQ ID NO: 26822 - DNA, 923 bp, Bovine  19866880590598
  misc_feature (1)..(1): n is a, c, g, or t
ncaaagttatatttccttaatactaaggataataagttttagatgcagatattaatattcagtagaggcaaatctagacctctgtctgcacagaggaaatgctcaacaaatatatatctaataagtgaataatcatgggtgaattatttttatggcacaattcagaaaatttagcctctgtttgaagcattgtttgtatgaataaattaattcattactactgatttatcaatttttagttaaatataatcatagactaaagtcagtctttcagtaactgtaagtaagaatgatatcataatgtaaaaaaatcccactgaaatcgtagacatatcagcaataagaaggagaagaaggaagctgtcatcagcggatgtttgtacctgtgacttgggttacctgagtagagcattcaatagtctttgaataatgcaaatatatgccatgggtattttacacatcatagacatatttggggttggagaatggggttctagactgatgaatacaaaatggcattcaaaaatattaatgatctgtctcctgcctataggcctctttcctacttatatttctgtagtaccaaatttatgtatttacccaaatgaagcttatgacatcatgactttgtgccttgtatggtacatgtcttctatcgctcattgtcatgaactcctatttatccataaaaaactcagctcctgtgtctacttctttgataaagcctttcttgatcctattctccaaaagagttaaccctttccttatctttgtggcatttatatgtttaatattatttctcattatactcatcaaactatatgataagcatggtcagatgtttttctcctcaagccgtgtgcttattggccttttcatgaggttgaagtatatgaaactaccatttttttcttaatcagttt

SEQ ID NO: 26823 - DNA, 1226 bp, Bovine  19866880705243
  misc_feature (1)..(1): n is a, c, g, or t
ncattccttcgactgccacagccagactgtgagggtatgaaagcccattgccccactgcatccaggggaaattatagattttctctctagactactcagaactctggtgctgccaaaaacaaaaacagctacttcgaacaaaaggtacatgaaggtatttttattatcctgcccttcacaatgtctgaaatatatttattgtaggagtaaaaagtctaaatttattattttaaattttactctctgggttttttgtccctttcctttcatgtctactgttcagttatcatgatttcttcacctgaaattatatttgaattaaaaaaaaaatgttatggctaatagattaaattggtcaataaagacagagatgcaccaacatatatcaaaatgcatttaaaaatatgtcattatccagttacatatgcatgcatatacatacatatatacttacatacatacacacacacacacacacacactcatgctgtgcaagagccccaaaatgttcaaattatttgtatctttcagcatcatactttccttgattgtgtcttctaataacctttagtgtcaacgatttgattccagtcatacatctgatttgttaaaatagctgttgcttttctattattttcctctgaaagaggttttacttttaaggttaggaaatataaccctgtgcccacaataagtataaagggcacactgaaaagcatatctcagtggaaacccctctgcctaatagggactgcctaaatgtttaatgacattagctccctgcaaatgccattcatttcctgtatatgcaaatttccttaatgtgcgccccccataacaggtagaatgtataaagttaatgaagccatgtaattacaatcactatggtgactgcggtcccctgagaacaataatgcgataatatacatcagttttgactttctttggaaacaacagcttataatatgaaaatagtaaaatattttcattatctccctctaactcctaaggcaaaagcaggtacaaatagattatgctctttattaactgaaaataacataagaagagaaagcaaaaatacaatgttagtaattgtttattttcaactttcaatgccttcatttgcctcattttaaagcctttttcctatttaatcaggaaagcaccagggtccggcagattttttttgtttttttttaatctgatctgtaatcccagaaagacta

SEQ ID NO: 26824 - DNA, 1401 bp, Bovine  19866880748659
  misc_feature (1)..(1): n is a, c, g, or t
ntacttttaactttgttaacagtttctttctcttaaaaattgtttaatatttatgtagtcaaatacatctatgttttgctttagggcatgtgcttttgcagttagacttggagagtctttacctatttcaatattatataaatgtcatttacatgttctcctagtttaacattgtaaactttaaagaaaattttaattacagatactttaataaaccttatgaaagataaagtctctcactcagaaatatgcacaaatgtcaaacacagaaaatttggcctgtcacttcaggaagttcacagaatctttgaaaccaatgcattgaggtcaaaaggatactgttttagttattttaaaaatccgttaattcttttgaaatacattttacataggcttcccttgtggctcaggtggtaaagaatccacctgcaatgcaggagacctgggttagatccctgggtagggaagatcccctggagaagggaaaggctacccactccagtattctggcctagacatttccataggctgtataatccatggggtcacaaagagtcagacacaactgagtgactttcagtttcactttatataagtgttatgggctgaattctgttccccccaaacatgtatgttgaagtcctaaccctcactacctaccacagaacgtcactcagttcagttcagttcagttcagttgcttagtcatgtcagactttttgcaaccccatggaccacagcacaccagctgtccataaccagctcccagagtttacccaaactcatgtccattgagttgatgattctatccaaccatctcatcctctgtcatccccttcaatctttccagcatcagggtcttttcaaatgagtcagctcttcggatcaggtggccaaagtattggagtttcaccttcagcatcagtccttccaatgaatattcaggactaattccctttaggatggactacctttggagataaggctttttcaaagaggtgtttaagataaaatgagattataatggtgagctctcatccagtgggccttgtgcccctgtaagaagagaaggttagggcactgacacacacaaagggaaagctatgaagaaacaggaaggaggcagcatctacaagccaaggaaagagacttcgaaagaaaccagtgcagctgatacctgatctcttacctctagaattgtggggaaagatgatttatgttgtttaagctaccagtactttgctatgaaaagtcctagcaaaataatatagtaagacatgggtctaatttttcttgtttactttttcttttacaaatgaatttttcatctcaataccacttattcaataacacattgtgaacttattaagagaagtcatttgaatcatattcaagtctgta

SEQ ID NO: 26825 - DNA, 946 bp, Bovine  19866880811182
  misc_feature (1)..(1): n is a, c, g, or t
naataaaaaaattaggaagcaaataacttggttttgtatagttcaaggcattcttttttgtatgtcaggcaaaaaataaaacagctgagcttaaaatctggcaggcacacaatccttaatctagaacatttactatatttaaaacataaattaaatttcttgcatctggatacattatgagaaactggatggaatcctaatgtaacttctctgggaacaaatgaattccccaaccaactaaatcagccaaatgatttttttccccaaagatttatctttgctaataaggcagaacaagcattttccaagtgtagtatattatttttttgctacacatttttccctcctacttcttactcctgcatacacagcatatacataagcattgaagttctcataggaaaagctttatctaataatggcctactggaatattcacaaaggcaaacctcagcatccacctcaccacccatcctaaaatctaggatactcaaatctctgacagataacattaactagttgacaaagatgcacaaaagaaggagtagctaaaccacaggaaacaagtttaagtccaggattcccctaactagctaacatgcaacaatatcttctacatatctctggaaatgtaatgaaaaaatactttttcaaaacactcagtagggtttgtttatttgtgtgtgtgtgtttgtgtgtgtgtgtgtgtgtgtgtgtgtgtgtgtgtgcatccaattacacaatagggctaacacccttgaaaaaataacctagaaatttaaaatatagaaaatatcagtaagataccattgcctcctaactagattcacaaataaaagtaaaatactatataaagaaacattcagataaatggctacattttaggagtgattgtggaactataaatagcagtaatgctgtagggtaatttattaaataaaatatg

SEQ ID NO: 26826 - DNA, 1224 bp, Bovine  19866880883289
  misc_feature (1)..(1): n is a, c, g, or t
naatggtttgtctttcacatgaggaaatgatatgccaataattagggaaagtctaaaaaaataataatgagcttgacagatcctaaatttcagagttagcaagaacatcacacacacacacaaaaagcagcaattgcaataatgttccaatctaacagctttcaaatgtctctgcagacaaaaggttgataaaaataaaaattccaagtcggcacatagaatgccaaaattataaaagctcatgtttgcaatcactgcagtatcgttttaattttgaatgtactgtcaaaacgtagtaccacaggaattgaagacaaaaacttgcatccaaagagaactagaataatttctaaattgtataaactttttctccatgcatggtgctgggcctgtgggttagggatgactgtataaatgggactactccaaatgaaacttccatgttaagtataatttcaggaacaattttctgtttattaaaacaaaattaacaaaaatatgctaatctgaagatttcctacctattaccacaatttagcaataacggcagcaactgtttggaactcagatggagaaaaaaagatatactctaccaaacacattgtttagaatggctgatgcaggaggatgataatgaaaagcagattgtctttcagttcagttcagtcactcagtcgtgtccaactctttgcgaccccatgaatcgcagcaggccaggcctctctgtccatcaccaactcccggagtttacccaaactcctgtccattgagtcagtgatgccatccagccatctcatcctctgtcgtccccttctcctcctgaccccaatccctcccagcatcagagtcttttccaatgagtcaacccttcgcatgacgtggccaaagtattggagtttcagcttcagaatgagtccttccaatgaataccaaggactgatctcctttaggatggactggttggatctccttgaagtccaagggactctcaagagtcttctccaacaccacagttcaaaagcatcaattctttggcactcagctttcttcacagtccaactctcacatccatacatgaccactggaaaaaacatagccttgactagatggactttttttggtaaagtaatgtctctgcttttgaatatgctatctaggttggtcataactttccttccaagaagtaagcacgttttaatttcatggctgtaatcaccatctgca

SEQ ID NO: 26827 - DNA, 695 bp, Bovine  19866880962361
  misc_feature (1)..(1): n is a, c, g, or t
natgcctgaacagactttctgtgactgacaaggagtatgtacactttgacaaggattagagctgactgcctttgagaagaaaaaatacacacctcagctgactctgttatagtgattgtgtgtcatatcagtgattagggaggatgcgtataggaagacagaaggactagttttctcttaataaaaataaatagctctggatggagtgattatcgtctgctaatatggattccattgctttaagtttaattaacatttttcttgaggcagtacaattgtgttgggaccatggaatcttctccatgtatcttatgcagttcttatgaacccacagctagtgttgagctgaggtcatgtatgtcccatttaatcttatttgacacctgttattttattactctttcatccactttgttgtagacctgcgatatagcagcttttttcttcaggtgtcaaatatgtcctgcctttgttatacttgaaggctgagtgtcataaagtcagagctctgagtgttctaggaaatgggaaagtataacacaattcctgctatcctcagataactgtttaaaacttacttgctggctgagaattagaatctgaataacgagggtggggatcccacagtggatcaaccacttacttctgccctgcctccacccatcctcttctgctcagtgatgaagagagaatga

SEQ ID NO: 26828 - DNA, 1872 bp, Bovine  19866881024363
  misc_feature (1)..(1): n is a, c, g, or t
nagtttcacattaaaatcatctcaagtaataaatttaaaattgaatatgttttagaaactattaaagtcacaaaaattttcactgctcttggtatggaagaattttaaaggcataaggtaccatttccagccaatcatgagccatttattgagttccaactgtaagcatcattcaaaattaggcacagaaggaaaactgttagtttagccaaggtcgcacggcagagagggaaagcttcactgaaacacacattgtgtgctgaaatcacaaacagaacaatatttgaaacctttcttagcatcagtgaatttaatatgcttgcatgaggaaatcatctcaaaagtcaaaggtaacgtgtattttcctgttttcctaataattttacataatgttaacatgcagtgtttctaccaagtgtgttaagtagcacacttcaagtatttcagtatgcattcacaaaagcatatgtttggagatgccagtacatatgaaagctcattcagtagaaactaatggtgtcgagcagagaataaagtaactaactgaattttgtaatgcagttggtaacatgattttcagagtatgggatatttgcaggcaaagtgtgttattatctataatgtcaagagagatcacctcaaagaggacttagatctcctttcataagtttctttcttcatgactgctaatggagaatagataggctttaatgcttttgatgtaaacattttgagtgacatttccctcagctttctctttgtacccagcataagttattgctgatacacaatgatgacagtgagataggagaatatcttgcattattggaaaatatgtggatacttcatgatattggaggaattcagagactaagactatcctgatctgtattcctcactgtgatattaggcaagtcttttatcttacccataacaattttactttctatgtaatggaagtatctatatctacactatattaccccttcaaaaaaaaaataagcaagcaaaaacaaaactaaataaaatttaaaaataagttagtacctactgccttaaataataggtctttgtgaggaaacatgaatggatctttgtgaggataaattattttctatagccatttatatgtctatacatgtatttatatctatttatatgtctatttatattatttatatgtctatatgtaaatggttgtagaaatttatatataaatagctataaaattaatatataaatatatgtaaaaattaatcttctctatgtcaagagtctaagatttttaccctacttgcaaatttgcctgcctcagttcatatatgctgacagaagaaacaggactcatgcactgcaaacaaaggatagtttagagctccagaaatagcatgatccagggtagaagcaatttttatttatttactttttattgaagaataattttttattgaagacttttgctgttttctgtcaaacatcaacatgaatcagccatatgattcatattcatatgaacgctcccttttggaaactccctcccatctcccttcccatcccacccctcttggttgatacagagcccctgtttcagtttcctgagcaatagagcaaattcccattggccatctattttacatatggtaatgtaagtttccatgttactctttccatacatctctcccacttgtcccctctccccatgtccatatatttattctctttatctgtttctccactgttgccctgtaaataaattcttcagtatcattttttttagattctgtatatatgctttagaatacagtatttatctttctctttctgactcacttcactctgtataatagggttctatgttcatccacctcatta

SEQ ID NO: 26829 - DNA, 1338 bp, Bovine  19866881144767
  misc_feature (1)..(1): n is a, c, g, or t
ntacctttttgggttaattaattcttcaagagagatgatgtatgtcagtattgaatgaaaaagaaatcacttaatgcaggcaattcacatagatctctacaattagagttgaaagcaatacagttaacaatgccagggttcataggtagctgaaaaaaaataaacttttttcccatcaaattattcccatgtcttctgaaattgtctctaccttattaagaagtttacaaaatttatgttaaatattttataagaatgaatacatcaagtaaatgaattaaaatacagtttttcctctcttccatccaaagaattttaatcttttttttagggtaagctttcctagggtaaagttaatcaccttttggatcaaaataacaaccttatttgctggcacaacatcatgtaagctaatttatgcctgcttctaaatgaaaatgacccaaaatcaattggtctcctattaaatggttgtgtacctgctattaattgtggatattgcaatcagtgcctgtttagatttgttggaaagaaatccacaaaggcttttctagacttttctttttttttcaaaatagaactgaggtctatgatctcttgccaagtccatcaacagttatttatttggtattgtagaagaaaggcagctctttaaatcttaacaatgtgattaggtgtttttcatttcttcttttttttttttttaccaagagtactgaaatatatgggatgttttattcaacaaatgtttttgaatgttgactgttatactctagagcttggcaacccagaatgtatctgattcatctaggaaaccagatgtggtgattattgtagtggttattccactatatatatagtgaataatttagtaaattaacatatccatcgcctcacattgttagcatctcctttatttatttatttatttgtgtgtgtgtgtgtggtgagaatatttaagatccacccttttagcaagtatgaaatatagtatttttaactgtacttacattacaagtataaaatgtattttaaactacagtcacattatgttagatctccagaatttattcatcttgcataacttaatctttgttcccattaatcaatcttcccatttcttccatccctagcacctggctgctactgcttctgctgctgctgctgctaagtcacttcagtcgtgtctgactctgtgtgaccccatagacgacagcccaccaggctcctctgtccctgggattctccaggcaagaatactggagtggattgccatttccttctccaatgcattcagtgcatgctaagtcgcttcagtcaatgtccgactctgtgtga

SEQ ID NO: 26830 - DNA, 2539 bp, Bovine  19866881222597
  misc_feature (1)..(1): n is a, c, g, or t
nataggcgggtgaggaacacatagagtctggatacttaactaggaggagaggaagggtgggagaatttttaagagatagtgtgtgtgtgcatgttgtggtgggaggatgtgtgttggggggaatcttaggccacttgtgtttgctaattgctcttacccaaaagaaaggtaaagttgagagaaggtagttttaaactcggacaaagacacccacaggagttaggctcctaccctcccacagagactgggagataagaggctctattttccttgctaatatttcaaaaggatggctcccagtttcttgagaaagatatccctggcttgtgaaactggtaagaggctttttaaaagattacatttaaaaatgaaggaaatgaatgtacagttacaagttgtttttgttcagtcgctcagtcgtgttcaactctttgcaaccccatggactgaagcacgccaagcttccctgtccttcactatctcctggagtttgctcagactcgtatccattgaattgatgatgcccttccaccatccaattacaagtagtctaaagtaaatgctgtaagaaaagggaagtcaggagcctatagtcagaacaaaactggtctaaagtttagtcaagccaagggagggaactgtgctggtcaaaggttattggacttgctaagatctcatttgcccaaagttacaacccaagaccccaccatcgccgttctccctcaaagtcctgacataaaagtctctaagtcaaaaaaataagtctctaagtctgtctcctatgttcctccatgaacatcacaaatggaagtacatagtccatttatataatgattcagtcatataactttggtcagcaggatatgattctagtagtagcagtaataatagtaactttgtattttaaggaaaggtgatttctttttaaacaaataaatttggagctaacagagaaggtttcctcaaatattagataatatgtaaattcagatcttaaagcctaatcactagctctttcaattgtgagaattttcaggaatcaagggtgatgaccagcagggcttgtgcccagcttctccccagttctgctgagatacttagtcattatctccttagcaaaccccactccctctagctatttaaatttagaacttttccaaggcagaagtggtatgtcttcctagatgttgtattactacaatagaattatcttgcaaatctagctcacgtttattcaatggctactttgttctaggtaatattgaatgtcagctattactattccattcaacatgaaggggactgagactgttgtagccatgcgttccaggaaacaaactcactcagaaggacaatgcaggtagtggagtgcagtttattacactggcgggcccaaggcagagtctcctcttagccaaggaaacctgaccagtttttgtgaaaaacttttataccctaagtgcatgtgcgcaaagctgtgcacaaagctgcctccccaaattccctgaaactagtctgaacaaaggaaaaataaagatacagtcaaagttacctggtgatttatatgccttacctaggtagttaacagtggacaattatcaataggcctgtggtcataccccaataagcataatagaatatatgattctattcggttactcaggtagttagggtattattttaggcgatggagaatctaagtatgagccctggggctcttccttcagggggcctagctttccagttggtatgttgtttccatagatactgggcatatagctcaaagtccacagtctggcccaagatggagtcctgctttcaagacagagcctgttctgtttcctccttcaagacaaagaaatagcataggtacaaacagaagcaaaagctcaatcttgtggaaagagccatatacagcagaggggccagcccagatggtccagaaattagtatgaacaaaaagaatgaaaacaggatttgagaaatcatctgttcttcagagtggagtcactgagaggtctctgcagtgacctatatttcaaaattttgggggcttcccttttggctcagtggtaaagaacccacctgccaatgaaggagatgtgggttcaatccctgggtccagtagatacccttgagaaggagatggcaacccattccagtattcttgcctggaaaatcctttggacagagaagcctggcaggctacagtccatggggtcgcaaagagtcagacatgactttggcaaccacacatgcaggcacacaaatgtgaaacagctccgtaaggtccataagctaggtttaaatatatcaaactcagcttgctgatgaggaggggtaatttggggtaaacaacaatagaaaggtcttaagcaacagttttgtggatgggtaaacttcataaagtttaggagttgcctaagcttcatgggaaatagatgggaaaacagtggaaacagtgtcagactttatttttttgggctccaaaatcactgcagatggtgactgcagccatgaaattaaaggatgcttactc

SEQ ID NO: 26831 - DNA, 844 bp, Bovine  19866881507184
  misc_feature (1)..(1): n is a, c, g, or t
ncacatgtgcagcaccatgaactttatgtgtgagctcttctgaagagctttcaggggcatggggcactccaagcaggtagaatccttgtcagaagagccttctgaagggtcctggtgcactggcagcaattaatgcaggtggtattttagacaagggagctaatgagctttaatacgcatgcaggtgagggagtgctgaatcagtagagccattaatgaaccgatgacagcctaattagctacaatttaaaatctatggaatctaatcagaggagctgaacattgctgaaaatctgtttatgaatgagtctttctaaatactccaatctgttgcttagtcactgattgatagtaattgctttttttcctctattgtgtataggaaaatgcccaattttgctctgataggggaggacacaacattgaagttaaatgcctaagatgtttggctgcttaagtttaatcagtggatgttttaaaaaaaatcaaagtaaaattaattttcaactctgaatatagatgattaaaaatgtaccaccaacttcttatatattgtgttggcaaaggttctctagttgtttatcaactccaaatagcatatctgaaaaccaagcaaagacagtacaacatgcaaatgcatttattaatccataatttgtttaaaaaggacttatttatgttagttatcagatacaagagggcaaaaacatttttactgtatgcttgagataaggaatagttttctgaggttaatataatctattaaacatcctattttacatcagctgaactaagcattctttcaggaaattgagaatactttaaagaaggtgggaggtgatag

SEQ ID NO: 26832 - DNA, 1227 bp, Bovine  19866880397121
  misc_feature (1)..(1): n is a, c, g, or t
ntcttaattatttagaacttaattattttatatctcttaattattattttatatcttaactattttctctctctctgatactctccaatatatactgagaatcatcaatgccctttaaacttgagtgaatgtctacctgtcagcagacagaccaaacttcctggacatggtctgaagggtgctcatgcctgaaaaggataaaagacacctgaaagaagtttctagaacatctctctcccataacaatactttggtttggaagcctttgctgtgttcgccaatcccttgtttaagaatatgttcctctggaataggaaatggcaacccactccagtattcttgcctggacaatcccatggacagaggagcctggggggctgcagtccattgggtcaaaaagagctggacatgacttagcacatacacaaggaaataattactgtatatgtgtcattttctctttatctgcttataatttataatatatttgtcatgtagtagattagctaatgatatgggctgtagaaatagatcacctaggtttgaattttttctccctctaaatgatcactaagtgtagtcttgtataaatgtcttaatttctctgtacctcagtcttttaatcagtgcattagtgattatactggtactgaatacatagactgtcatggggactgagtgtgcacatgtaaaaatatttaaatggtttctgatacatagtaaacatcattcaataaatgttaactatttttctttttgaaaaaaaaaataagaagaaagtgttcctcctttctgtcaaaagattttctcctctgttaggactctagtcaattttcatcctattttgcatggatccaaatgttttcattgggtatcttattttaaaatactgcttcaagttagtggggaagactatccactgaaaactaaacccaaccgggtaggctgaaacggtaagcacagacaatgaagagtcattaccatcagtgcctttgtgtaaatatccattggcaggaggcataagttgctgatgactgcctgcctcagagttgctgtagccttcttgtggctcagacagcgttccttgggaagacaagtagctgggaatgtctgcaggcaggttgagttcctctgtaaaagagacatctgtaactctcaaataaagttaggtaatttatttacctaactcagaagactattttgcaaatgtattctacttctctacta

SEQ ID NO: 26833 - DNA, 1995 bp, Bovine  19866880559996
  misc_feature (1)..(1): n is a, c, g, or t
ngcctgagaaaatacttgagataatagttgaaaacttccctaaaatagggaaggaaacagtcacccaagtccaagaaacccagagagtcccaaataagataaacccaaggcaaaatacccccaagacacaaattaatcaaattaacaaagatcaaacacaaagaacaatattaaaagcagcaagggaaaaacaacaaataacacacaaggggattaccataaggataacagctgatttttcagtagaaactcttcagatcagaagggaatggcaggatatacttaaggtgttgaaagagaaaaacctacaacccagattactgtacccagcaagaatctcattcaaatatgaaggagaaatcaaaagctttacagacaaacaaaagctgagagaattcagcaccaccaaaccagctcttcaacaaatgctaaaggatcttctctagacaggaagcacagaaagggtgtataatcgtgaacccaaaacaacaaagtaaatggcaacgggatcatacttatcaataattaccttaaatgtaattgggttgaatgcccccaaccaaaagacaaagactggctgaatggatacaaaaacaagatcccttatatatatatatgctgtctacaagagacccacctcaaaacaagggaccatacagactgaaagtgaagggctggaaaaagatattccacacaaatagagaccaaaagaaagcaggagtagcaaaatattccaactttattctatgacacaaaattatattaggttaataatgtaattatgttatattaggtaatataaattgcattttaatccacttaaatggaaatttctgttgagtgttcattgaactgttgagaagcttaaatggattttatgaaaattaaacatcttaattcataaagaacttaataaactttaattctggcttacataaaattaaaatttaatatttaagtctaatttatatgtttatctttttggaaaatagatacatcatattttaatacagacctcctgaagtttaatgagaaagcaaagacattttcatgcttataaatgtacataaaatgatagttcaggacttcatttttacgctattcccaagagtggttttactgattcgtaaaccatacggcttatacaaactgaaggaaacaactttaagaaagttggagtcatgcctctgaaaaatcctgtcactccttgtcttttataaattttataaaagacgctaatcatatttagctgtggaactcctagaaaatgaaagggaagggaaaaataaagttaattttatgttttagctttctttcaaacactaactcaggtaaaacatgctaaaatagataataaaatacaattaattaaattatttcacaagcagtcccaaagaaacatctctgattcatagtcagaatcagagactgtaatggaacgatttgatgctcatctctatttaattttctttcattttaggaacaaattctgtccactggaagtgaaatttacttgtaattatcatagacttataatttttaaagactatccagacatacagaggtatctgattcagtatctcatgccttaagaacatctcaaaatcagaaacaaactcaaatgtgtttctcatttgatatttttctcagggaatgattccaccattcatctagctgttgaaactggaaatctgaaaggcatccatgacatttccctcatgtccaaaccagtgcccatcgattttaccctctaaatatctctcaaatccatccatttccttccatgtccactaacatgcctccagccttcaaactaccagcattcttctctcaactattggcataatcacccccttcatttttttctgcatactttaaccagagagaactattaatgatgcaaatttgattatgttactgtcctgcttcagtgattttccattatgcttaaatatagtatgctgcggcctctgtttccatctcccacctcacttg

SEQ ID NO: 26834 - DNA, 2264 bp, Bovine  19866880611661
  misc_feature (1)..(1): n is a, c, g, or t
naaatttaggtgtaaggtgactcaggaagaggcatctggagatcaaccgtggaaatgtgggtctgaggaggagagaggagtttggagcctgacacagatttgggatgcagctacccacaggagagctgacactggtgggagaagctatgacattgtttgaaaaaatgacccaccatcaggatgtgggaggaaatataatgcccaactgaggaaaagacaggatgacaggcttgggggagttcatgggaatgttgctgactcacagaagtcggcagggaggggacaggtcaccaggaccagagcacgcaggagtgaagaggggctgctccacaggtcagctgaggagttgaaggtgccttctgggtcctcgtgggacagtgccgagggtgggccatgctgcaagaagccagcaagtcagcaaagtaaggcagcaagtgcagtttccaagaatttcagaagtgaaggaaagagagggcagtcccatgaaagggcagcttggcacaaaggaggcattccttaaatatatctatttataaaaatgtgtaatcaatatgtatatttatttttgtaaatatatatgaatatataggggagacagaaacagtttgttggcagaggtggaagaactgtttgcagtggagtgtttgaagatgcaggcaagccaggtctggataggagaacatgagctccaggtgggggctcttggacttggtcaagaaacaaacattcctggaagacaggaatgatggcatgcagggagggtgggaaaaaatgtatattttgcagtgaagggatggcttccctagcaagtttgccaaaaacatgaaataactctgactctctatttatgcagagtcattttgatggatgtcagaagctcttgagcctcttatagaatgcaggatttctgtcattagattttaaatgtctaccctagaacattatagctctagcctagacagggcatttgagggcaggctcagaaaaaggagataacactaaacaacactaccaatgagcccagaaaaccaaaatgtctctttcattccaagcaaagaggtcagtaataaaaaagcatttaatccacagcctgaatgcaaaggttagaagcgggggggaaaaaaaggcaaccctaaactatatgattcccactcttcctttttacaaccctgacaaaagtaggcaggagacaaatcccatttgtaaggacagcaaaatcttgatctcctctctgacccaaaccgtctccatgcatcataaatatttccatagtcataaatatcactgatgaggaagcagaaggctcttaattggctccaactcatttcatggtggaggaagctaggaaaaatgcactgaataagaataagacaggatgagagatctcctgggaggaaattaaaatagactcttcatccaaaatgatgctcaatctatgtgctgatttacgccaggaaagaattagctgaagactcattgtgagaagtgtcttttcccactatcccagggccttttctatcttagaaatgccgattctcttcaagctgagttttatggtgggttgatttcattgaaaatgagccactgtaaggaaagaatggagcttgctagcatttattaaaacctcatagcaggatagtggataaataaacagtagtatattcatacaatggaacactattcgacagcaaaaaagatgggccactaatcacacgtcatcagggatgggtttcagaaacattatgctgagtgaaagaagccttatatgaaagagtgcacactacaggttccattagtattattctctctaacaggtggtctgtggtgggaaaaagtccagacaacgcttgcctctgggggttggggaaagatgggaagggatgcgagggaactttctataatgatggaaatgctctctgcatcttgatgggagttcggattacacaggcactcacatttgtcaaaactcagcaaaagtacccttaagatctgggcatgccattgtatctaaattttacatcaaatgaaaaatctaaacaaagaccaagctttagtaatgatatgcatgctgaagtatttagggaaaagtgttctgccgtctacaaattacagtgaaaagcgccactaaaataaaacggattcatggatggatacagaaatggataaatacgtgagaaagcaattttagtaagatgttaatggtagagtttaggtggctagtagacagctgttccctgtaaaattctttccactttgctatgtgt

SEQ ID NO: 26835 - DNA, 2635 bp, Bovine  19866880639193
  misc_feature (1)..(1): n is a, c, g, or t
naaatttatagaactctttgctgtgggccattttatggctcaatccttgttttactttattgagtcttttaaaatttgcttctaatttaggttattgatttgttgttttgttgtgtagttgctaagttgtgtttgatttttgtgacccccgtcgactgtagcctgctaggctcctctgtccctgagatttcccagggaagaattctggagtgggttgccatttccttctccaggggatcttcctgacccagggattgaatccacatatcctgcactacaagtggattctgtactgctgagccaccagggaagccctaagttattgatactatacatatatttttttaactgcttcaaatcattttgggattaatatagattgttaaatttttttatgattttagaatgtgtaccaaactttgctaagtgaacaagtgtttgctttttcttttttcttcatgataatttctcgcaaaatagctaaaaactttaaatagcaagacaacttattaaataacttaaaaatctttgatcatatatatataatgtgcttttaaaatgccttttctgattgcaaaatacatacctattcatagaaagttggaaaataaagagatgtatagaaagaaagtaaaaaaaaaaatcacctttttctaccatgaagagacaactgctacctagtgtttccatcaagactctcttctatatatgtgtatatagaaacaaaacttgaacatcataatatatgaaattcaccatatgtgaatttcccacagaatttcttcaaaacgtgaattttaacagttgtactatattttattgtagaggtaccatatataacttacagattatagttcactgttaacaattactctagaaggatatttttatatataaatatttattcacatatatgattattttcttagggtagatttgtagcactaggattactgagtcaaaaggtgtgaacagttttttttcttccctttgaattttttcttcttttaatgttgaaaaatttcaaaaataagcaaaagtagagtggtaaaatggaattccatttgccaatcctctaactagatgtgaatatttttaagcctcttttgaaaataattaattaattaagttttgcttacgctgagtcttcatagctgcatccaggctaattgtgggaagtgggggctactcttccttgcggcgcacaggctgttcatcgctgtagcttctcttgttgtggagcataggcgctaggcatgcaggcttcagtagttgtggcgctaagactcttgatacttcataattgatttctgggaagagaaatgtaaataccaatttataacaggaatatgtgtgaatcgatatcccacttcactcttgatgacatatatttgccaattttataggtgaaaagtaaaaatgagttattttaatttattagccagcttgttatctgctattaattcctgagggttttagggtgttttcttctagcttctttgtagttttacttttcatatttaattctaattcactgagaatttaagtatacttaatgaggtatatatttcagtcaaattgttttatccattcagattcaattttgaagcactgtttgttgaataatctagccttttcccttttggttttagatgttttattattgtactctaagtagtttgtgtaggttatctcttttgttttattgattacaataagcttttgaaatgtccttaaataaaatttgtagtagtaaattttgaattttaagtagtgtctattatagctgattgatgctctctcacgttcaatttacatattttcttgtattttggtaaagatacacttgggtgactggtaaagagccacttacatactatgacatgaatttgtcagctcaggaccatcagacctttttcacctgtgacacagactttttacgtccttcagatacaggtatgtgtcatatctgttcttggggtcgaatagtagtcattaaaattattttcaaagttttttagtgtaatttattatacagagttatttggcttggagtcgtttgtatcattgataagaaacccagaataaattgaaactaattatgattgtaaactaggttattattatagtctcttgtcttatacagaatttaaattattttatacaaattagttgcttcttttacaacttaaaaaacctttcagatcaaatccaacaatggcttatgcagagaatagtgtacccagttttggttggggaaattaacacctgaaatcatacatttaaaaaaaaaaaagagtaaggcagagttaaacattggggcacagcatgcggagaaaaattgggtatattttattctagtcataattcagagaaacactgtaaagttgtggaagatcatagaagtgtctgagtttagttctctctaatcttttctgtagaagtgagtatggagactcttaaatatttggcttaaagttgttgttttgttgctgaattgtgtccgactgattgacagggatctttatcacaactattttgcccttttccaccttatctatgcttctacttttatccttcaaaattaaaagtattattctttgggaagccttctctgatcttctctgcagttcaa

SEQ ID NO: 26836 - DNA, 1112 bp, Bovine  19866880677311
  misc_feature (1)..(1): n is a, c, g, or t
ntgttcagaagggagtttcccttcctctgagttcctagcaggaaggactgtcctattcagtcctggggaccaatgtccagtacgggccaggttagggccctccccggggctgctcccgcagacccctgggcatgactgtgaatgacacctatcatcctgcctcggaactctgggtataagtgccagtcgcccacagtcagaaggaatgactcagaaaaacagagtaggaattactttttttgaaagggaaatttacacttataaaggaaatctctatttgtgaggttgtctccctcgctgcactaggagaaacaactagatagtaagagaatcttactgatggggaaggcagagacttaatctgcataacaagccttaccctgtttaccctgctcttcctggcaacctcccgtaactggctggcttcctcaccctcacctttatttcgtctttggctaaagatggtatttaaactgctggtttaggccacgtagggcttcccaggtggctcagtggtaaagaacgcaggagatgtgaattcgatccctgggttgggaagataccctggagaaggaaatgacaacccactccagtattcttgcctgggaaatcccagacataggagcctggtgggctacatggggtggcagagttgggcacaactgaacacgttagaccagctaggtgagttcactcattttccctgggtgtctctcaggtttgtgagatatacccatgaataagcttgtttttctcctgttcatctgtcttttgtgacatgagtctcaggcaagaactctgaagggtaaagtggtagttatttctcacctcttcctggaggctcctccctctcccatcactggcctgcttctgcaggtgaaggagctctgcaggttgtaccctggtctgctgtctcacattagggttggtgaaaattaaacccagggtgggagcctcagggcagtaagctgaggcccggggcagtgtcccagagcaggggaaagacagtcagcttctcagtgtccaatgaagaggaagagcaagccctggttgtcccagggtcccaaatcaccatggggactagagcaagatgtgtaccgcccagaagacac

SEQ ID NO: 26837 - DNA, 3045 bp, Bovine  19866880711877
  misc_feature (1)..(1): n is a, c, g, or t
ncttgacccggtccaattccaccttgtgcacaaagcccttgtaggtgacggggtcctcgtgatgtgtctcggaggacaaaagggcaaataggtggtccccccgcagcactgaggggcggctctcggccaccccaggaacctaggaagcaaagcaccagcaagcttctagcccgagacgaccagtggagggcccactaagaccccctcctgaaacacaaggtctgatgagccacctctaccctggggctcagggagctttgcttctttcctcttccaccagacagggcaagagtcaggggagatggggaagggacaagtttgcccaagctgctcagagatgctgagtccaggagtcctggcaaccctccagggcacgatttcaagaccccggggtcaggttcccagtaagtccagctgccctcttggccagttcagtttctactctgcctttaaaatcttgttcaaaactcagtttctgcaggaaaatttccctgatcatcctcacttgctgtctcttgtcacttggtgcctttctcagcaaatgggtgcaggaatccgtcctcatgtgcaattctggacttatgtatacacattcaacatctaagagctggcgaggtctctaagaattaccttccagacttccctggtggtctagtggttaagaatccactttccaatgcaggggacttgggttccatccccagtggggggaacgaggatcccacatgctgcagggcaactaagcctgcatgctgcaatgaagatccagtgcagccaaaaaaccccaaacagataaacaaaaaagaacacgaatcatctagttcagctccatgcttttcaggtgagcgaactaaggcccagagataacgagagacttgcccaaggtcacagagcaaagtctgggctaaaacccctgtgttctctattaccctgctctgacgcctcttttggggggcccagatccctactctgctccttgctgagccctctgggacaggaacagcatcattatccttttgttctgcccacagtctgtgggttggctaacttgagtccattctccctactaccaatccaagccctgacctccaacgtgagcagacgggggttccgatctatggggtcccaggtcatgggcaccgactccaggtcatagtgccggatgtcgtgctccatctgcagctcctccaagtgcagcagcagccggagcttcacctcgtagttcctccacttcagggttgtctgaagctgggccctggcagtgacgggtggggaggtgggaggggaaggataggaacaggatgggtcaggcaaaccctgtgtcccggagcacctctccctctgcagccctgagactatgaaaacgtcaggaatcagggaagactagaagagcagagaagcagatgggggtcagagacctctaagaagggagtccctgcccgccaacctcagacctgcattgtggatcctggagctggaaacaccctctctcaaagatcctcccatgacttacaccctcacttcattcaaatgtcactctccgctcaaatatcacctcctcgaagaggccaggactagctgtcctctgcaaaacagcacagcccatcctttaccctgctttaactttagttagttcttcatagtactcatcactacataagataagatgagaaatgcaactacaatgtcagggccatcatgtgagtgattcaccttgaatgcagcctggcacatggtgtgttggccagtcaggggatgaatgaactgagcatggaaggctgaggacagaggcatggggcagaagcaagaagtgagcagagaagaaacatataaagcagtgtgaagggtgcagaaggatggtacttacttgatctcagcaatctcctttggggcagtgaaaatacttgttccccgaagaaggacgggaagcagctgtctgaggcggggaggtggatagtatgttcccagtggcaaactgaactccaggtcatagttcttagcactgcaggaggggaacaagaaaagccattacaaacacagagacccttcaccttcagagactgagaaggcccttccctgggggaggcacaaagccctgcttcaatactattgttgaaaggggtcagtagcctttgccctagaagagaggactcactgtctcataaggctgctcatgccaaggctggaccattttcatttttagaaagcatgatacttgaaagcattaaaaataataataataataatatatggaattccctggcagtccagtggttaggaccccacacttccatggcagaggggggtctgtctttgatccctggttggggaactaggatcccacaagctgtgaagttatctatatacatatataaataatacatgttcattagagaaaaaaaatcagaaaagaggtaattaacaaataaatgggtaaataaacaacatgctcaccatccagggataaccactgttaactttttgatatgcagccttccagacatttttctttgtcaatatgtattatacaaatatattttaaattaattagccaattaattaattaacttcttggctgcgctgcatggtttgtgggatctcagttccctatgagggatagaacttgtgccccctgcagtgaaagcttgaagttctaaccactggacccgcagggaattcccctatacatgtattttcagcagaaagagcacagtggtctcacagtttgcttttatagctcagtattttgtgaacgcctggacatattaaaaagagatgtctacacatatgattccattcatatgacatgtccagaagagggaaatctatagaaagtacaagagtggttggtgagggctaggaggcgagggggcagaggggccggggggcaaaacgggtgataactaaagggtatgggctccttttgggggtgatgaagtgttccaaaatggattgtgatgatggtagggcctaactgtgaatatgctaaagaaaccacagattgtacactttaaaggaataaattgtatagtatgcaagctgttt

SEQ ID NO: 26838 - DNA, 1435 bp, Bovine  19866880744850
  misc_feature (1)..(1): n is a, c, g, or t
ntctatttcttgactatcactcatggataaagtctagttcagtcttaacggggatttttcatacctctagaagtactacataaaactttgcaatgaccaaaatgggacacataattttaagagaatcaacctctaaagcttcaactttatatgactctttactgtgtctgatctaattgaagaatgttcctctgattagcctatgtgttacgctggtttctctttccacaggctccttgcctcaccctgctcctttaaagatatattacctattcctacttcataaaagaaaagcttacttttcacccatcctgaatctttccaaggtgcattgccctagagtgtaaaaatatacaggtgcctcaggaacaagtttgggtttcggagcaactgtttttaatcaagaaacctataatagagatttgtgtcttcacttatttaacagggaagctcagtattagaaatacaaggggctaccctcatggctcagctggaaaagaacccacctgtcaatgcagaaagagagtactctggctgctggaagttctgaattcaagtatattgtagagtggggagggagtaataatttttaccagatccatttatcagcaccctttctccccttactatcaagcatgcactgtccctaagggaaggttctcatagcaaggcaaagaaagcattagtaagggataataaaggcagtagaatcttgttttggccaagtgataagctcaaggcaaggctccaagacttacctatcttttcatcttagaatctgaattcagaagagagatggttgtcatagggatgaatgctaacatgtctctttgaatttaaaaaatgaagtcagacttctctgtcagaaagtatgtctgactcggttgacaggaatgacaatgagaactcacccagccaaataggttatatggaggacctttttcaaagctggaagaggcaaacatgtagctctatgaatttgataaacatataaagaacaagattccatttagaactatatggtcaaaagaaacttacatttttaacaaaaaattacacaaaactgttcaggactgggggaaagagactcttggagggcacaaacaaaatcttgtgtgcaccagaacccagaggaaaggagcagtgacctcacaaggctgagccagacgtgcctgtcagtgtttgagagtctcctgcagaggcataggtcagaagtggcctactgaggggatggggcactggcagcagcagccctgggaggtgtgtgttggcataagtcctttttgaaggttgctaatagccctacttttgaagaaagtagggaaaaccaccagaccattcaggtatgacctaaatcaaatcccttacgattatacaatgggaagtgacgaatagatttaagagactagatctgatagaaagactgcctgatgaa

SEQ ID NO: 26839 - DNA, 2730 bp, Bovine  19866880859939
  misc_feature (1)..(1): n is a, c, g, or t
nctaaacctttagacaggaggccaactcccagtggtcagttccaaacaggttaactttgggctgaagagattaaaaaaaaaaaaacaactctgtgactttcaaacagacacgtgtgtgatgtcactatacttgactttgctctcccaaggtacatttcagagctggactgtgggtttaagagaaaaacttgaatgggcaatttctgtccagtagtgaagtgaggagtgcaattgatgaagtggtgacccacagatttgggttggaatggttagacctgcaggtgggaggagaggaagtggggagggaaagtcagtacagccgtgttgtgtgcctccatgatccttcatacacagtcttcttctgattcctgaatgtatgtttatatactgtggcttcccaggtgacttgtggtaaagaatccgcctgccagtgcaggagacacgggttccatccctggactgcgaacagcccctggaggagaaaatggcaacccactccagtactcttgcctgggaaatcccatggacagaggagcctggcaggctacagtccatggggtcacaagagttgtatacaactgaacaactaaaacaacagcaacatgtttatatattgctttttcagtatagggtcaagggtaaggttataaaggaaaaataattattgtcttaaaagtctcattcttgtgctttagaaaactaggcttctctgagaaaactaataacgttcaaatgcacacttcatccaagtaactctggtatttgagcagccattagcaaagaataaagatttctgcgggaaattgcctggcagttcagtggttgggactcagtgcttttacttgcatggctcttgttaaatccctggttggggaactaagatttcacaagatgcagggaacaaccaaaaaaattaaaaagggtgtttttttggtccaaaatgggtggtaggacaaagaaaggagactgaaaaactgtttgaaaatgatcaagttaactactggtaaaattcatagattaattgattgatttttgtaatttcacacttataggtaagtaatatttccaggacacccaagtatttggaacacagtgcagggaatagatataaatgagtaaatagccatcaaaaagcacatacaccttgctccttaggagtttcaaatgccttcatcagttcagttcagttcagttgctcagtcatgtccaactctttgcgactgcagcacgccaggcttccctgtccatcaccaactcctggagtttgttcaaactcatgtccattgagtcggtgatgccatccaatcatctcatcctttgtatataaatatcaaaatcattgcatttaagaacccccaatgtacttcaaggataaaccagtttattttatagattaggaatccaagaaatacagaactgaagaggattgcctagggtcacactcaagttagcagaaaatataaaactaaatagtgaccaaaatttctgaactataaatgagaacatatgatctgactaggttttgccatcactttcagaataaagatcacccgaaaaacagaatttggaggaggtttaaaaaaacaacaacctggcaccatcagaatatttaggttatgaatggagttagtaggacacagtattttaaagtggtgctattcaaagtaaattgttgcaatgtacataaaactttctttgctataaacccctgctcttccttttgtgtttcagagaaatatattgagcttgaataatttttcacacatgattctctcatcctttcacttccaattaggccatacattaatagaaggcagggattttctcttagcttgattattttccttcaagaattctccatagacatttacttaatatttgttgatttgcttctgtatacagacccagacagttgaaagaagcaagaattgaagaaaaagtagaagcatgaggatttctttttttttttaattttatttttaaactttacaatattgtattagttttgccaaatatcgaaatgaatccgccacaggtatatatgtgttccccaccctgaaccctcctccatcctccctccccataccatccctctgggtggtcccagcgcaccagccccaagcatccagtatggtgcatcgaacctggactggcgactcgtttcatacatgatattatacatgtttcaaaggatttcttttcactgtgattccaactttcctactcaatgtcttgagaacttttaccgactgtgtatttgaaaggtgggtaaaatgggtgaaaaactactccagctttgacacctctgtgtgccctctggaaatagtgcgctaaacacatccttaagcctgaggccaagttcaaatcggccattatagggcacattgccccttttttacactctgtaaattgtcctccccgccagggttaattgaggggaagggtgggtccagatttgtcagacagctgccaagctcacagccctcctcagcagcatagcccgtccacctgctcttgccgccacaaggccggccagcatgaaccctcattttgttcttgttaacagctaagaaccacagtgattatgatttattcaaactaagcccaaatctttcatgagggaaaaaaaaagggggcctggttaaaaaggaagaagaaagtttagagctagagttcccataaggatccttccacaattttaaattctgactagatgtttatggatctcaa

SEQ ID NO: 26840 - DNA, 4019 bp, Bovine  19866880878664
  misc_feature (1)..(1): n is a, c, g, or t
ncatgggttagctgggttgtcttttcagggtatctccagacttaaagtgtcagctggagatgcaatctcatttaggctcaggatacacttcagggtcactagttgttggcataatcaaagaatcaagtctgttttctccttcaaggccagcgggcaaatctctctgacttcaaagaggggcccagtctcacttctaaagagttcacctaatagggttattcccacccaggataatctccccacttaagttgattaacttaaaaaaaaaaaaaaagcctaattatatctgaaaaattccttttccttgtaatgtagcaatcccaggagggattccatcataccacatatcctgcccatactcaaaggcagggccttatgcagggctcatatgccaaggaattgtggctgtcttaggagccatctgaacattctgcttatcaaaatgatgacaagagtgtgatcccaggagtcaggcagtcctgggttcaacttctgtccttggtctttcctgtctgttaagtaatacttgttttctgatacctgacctatcaaatgaagatagtcatattactgtgcaatcttgtagagatttgaggcagtttgtgtaatcatctagcacagggagtcccccatcagtaaggatattatgataagaagggaagatactgctcttggtcaaggagaagggggagtagataagcagtaatgctgatagttacgagcttagttgttgtggaaaagtttttgaaggcctttggaatattgaactacatctgcaaatccatgtaaagaatgggaatttaccaagtaataactgggcagtttcacatttatgttttcaatttgttcagcctaaaccacaaaattcgaacaaagaagatgtgaaagtctggcccagacattgcaaacttgcagcatctgatgataagaatagatagaaggaaaatgtttttcctatttttgtaatagagctaaatttttctatttatgaaagtgatatatgcaaattatataatttgggaattatgtataaatacaaagaagataaccaatataggaattagtttgtttccttccagtcttttctccttgcaaagtttatattattagtatctttctatgcatacagttgggcttccctatggctcagtgataaagaaatctgcctgccaatgcagaagacacaagagacatgggtttgatccctgggttgggaagatcccttggagaataaaatggcaactcactctagtattcttgcctagagaatctgatggacagtggagcctagcagactacagtccatagggttgcaaagagttggatacaacatagtcactaaataacaacttgtgtacaattacacatccttgttatttgtcttaacattagatcataagcaagtttctttttttgacaactgtcaaaaccatcatttaaaatggctacaccctttaggggttgcacttttgcattagtttatgtggctatttgataatgtctctctttgccaactggaatataaattccataagaatatgaaccaagtctcttgtgcatcactgttgtatccctagcacctaatgatacctggcacatggcagataaacaataagtatttgttgaaaggctgaaagaatgaataaatgactatatcttgtgaatgtgttataatttgcttgcactctcttgttgttaaacacttgtttcatcattataaatgaagttgcagtgagtactgcacataaagcacttcccatgaataaaatggttccccaaatgcaatgtacttaatactagtacccacccatgaatgctctatcattcctgtaagtgtcaaaaaatagacaaacatctataatatttttgatgagagaatctggtctcattatgctctctgggtttgctgggtataacatagaacatactggctatggattaataattgtatctataggtaagacccaaggtggggattttgcaaaggtgttctttgtttccctggtggcccccaagagcttgggtggcatctgggtgtagtaagagatgtacttgcagttgacagaattctaaaaatgggtcccaagattctatggttaatctacaggacctatgaatataatgagctgttactaccaaaattatgttgtgttatagggcacggttgactttaagatagatagattaaaagaaaaagctagggaatgagatgcccataaaggctctgaaaaactcctgcatgtttcttggaatttagaaagtcatacatatgtgtagggctatgtgcatgctcagggctgtgtgagtgctgagaaagacctgagataaatgtccgaagctctcacctctggctcaccttgaagttctatataaatctgaaataaagctttactaaggtaaagttgtcagctggctggctgattgttaagatgtgccccaacatgcacgccaagattctaaacaaaggctgagacacctactgctttcaagagtttaaagaaatttctgtttaataattagcaactactaagctaactgagcagacatttcatttaccaaataaaacagataatacaaattttataaaaatagttcagaaaagtcactaaacaaacaacaatcagcaataataacaaactctgggaaggagggagaacagtttccacatatgttccattttcaacaaaaattatgagacgtggaaagaaacaagagtggatagcccaaacagaggaaataagcacatgatagaaacggtccctgaggaagcccagatggtggactaagtagataaagattttaaatcaactatttaaaatatattcaaaataacttaagaatatcatgtttatgaaatcaaagaaaatatgaaagcaatgtttcaccaaataaagactaccaataaatatataaaggttatttaaaaagaaccaaatagaaactgtggagcaaaaaaaaaatacagtaagtgaaattttaaaaaacttactagaagggctcaaaagcaggtttgataaggtggaataaagaatcattgaacttaaagacaggagctgtctttctgttcacttgaggaacagaaagaaaaaggaaagaagaaaaataatgaacagagccttagagacctgtggtgtattcaaatgtatgaacacacacaatgggaatcccaggagggaatacagcaagaggagtagaaagaatacatgaagaaataatggctgaaatatcccaaatttgttaaaataaaaacaaaaacacttatccacacatctaagaagctcagtgagctccaagtaagacaacctcaaagagagtaacacctagacaaaacataatcaaattgttgaaatgcaaaggcagagagagtcttgaaagcagcaatagagaagtaactcatcacttgcaagattaacgtgatttctcatcagaaaccatggacagcagaggcagtggggtgatgtattcaatgtgttcagagaataagaatgtcaaccaataaatccattgaatctatccttcaaaaataaaggagaaattaaatcattgtgacataaacaaatttgagagaatgttgtatacaaaaattaattcaaaaatggatcaaagacctaaatataacagctaaaatataaaacagaaggaaacacaggtctaaagcgtcatgaccttgtcttaggcaatggtttcttagcaatcccacctaaagtttagggaaccagagaaaaacagatcaatgaatagcatcaagaaaatagaaagatatcccccagaatgaaagaaaatatttgcgtaaacacacacacaatggataatatactctttttgatatatgatgtaataaaatatttatatataaaaaaaggaaaaaaaaggtaaattacctagatgggctttatttaatcacatggaacccctttagaagcaaatttttttttctggttggtggcagaaggaaatgagaaaatgctatccttatcttccctgatatgcagaatcttgtgtaaagattcaactgtgag

SEQ ID NO: 26841 - DNA, 737 bp, Bovine  19866881052122
  misc_feature (1)..(1): n is a, c, g, or t
ntttttcttataatgttcctaagaaatgtttttaatatactcaagagccttgagagattatagaagatagggaacgcaaggttaacctgaaatatcacagatggctttgctcttgaatgtaaatcaaagccaggggaatttgggggcctgttaagcatatttgtgttttaccagaaggcagcaaatccactcagacaatccactgcagatcatcactagattgctccatggtttgtttggagggctttgccttagaatttctgagacgcataggcttatttccaccagacacattgaatgttaaagctcttttctttagaatttgttgcacattctcttgcttcttgagattccacaggctcccacatgaacgtgtagggagtgagctagagtgtttcgtcaggaacttgcagggtgcggtaggcacagcccttcacttgtttctcagggcctgaagagtactccgcagctcgcactttattttgagaggaaggttgcattgcccagttcacccctctgtgtctgtgacttgcttcctctcttctacctcaagcgtttttgcttccttttactgaagtctggtgaatttcctctctgcctctcttggcgatacctaagagaatgtcgctttttgtaaaataatccaaatctagaacaaactaaaagactctttggtctaataagatgtgagggaatcagaatgagggtaaatttagtaatgaaataggtctgctggt

SEQ ID NO: 26842 - DNA, 1319 bp, Bovine  19866881210147
  misc_feature (1)..(1): n is a, c, g, or t
ngcgtattctgatctttgggatttgcatatatacaagcattttatacacattatcagtaagaccttcttgtcgtttcaactagcttaatgtttgttttttaaatcaagttaactttatgaaatttgaatctacacttttgtggatgtttgaatttaacataatttttcttttttttgtgtgtggtgtgtctatgtgtgtatgttatttttctagtatttactagagatgaaaagtctcattttacctccagaacacattctgaaacggggtgatagtgaagcaattgcctatgctttctttcatcttcagcactggaagagaatagaaggtgctcttcatctgttacagtgcacgtgggaaggcagtaagtattcttttccaaatgcagtgctaatctttctgactattcattgcattcacaggcagtctttttttaatgagattgtctgggtttcgttaaggatttattgttcagattggtttgaaagtgaactctacggtgttcattggtttattggtagaagaaatgtgtaatgtgcttatattaaaaccacatttaggaaaagcaggatgaaaaactgggtattctgctgtatgttcacttatattaaatatttataaggaaaaatattaaaatttataaaccttcattttttatgtggcttgctactctaatattttttaaattggactttttttggttttgagatgtgtacaatatgaaactcttttttcattactgaaatcaacttaattctttaaaaaaattttaaaaaatatttatttttaaaaatttatatgatgactgtgccaggtctttgttgtggcatgtaggatctagttccctgaccaaggattgaacccatgccccctgcatcgagaacttcgagacttagctactgaaccatcagggaaattccccccaattttttaattgtggtaaaatatatataacataaaagcattttaaacattttaaaatgctcagttctgtgaaatgcatgtacattgttgtgcaaccatcaccatcatccatcctgagttttttcatcaacccaaacagaaattctgtgccaactgaaatataactcctcattgtttactccttcccagccccctggtaaccattctattttttgtctctctgagtttgactactctaggtatctcatataagtgaaatcatacatttgtccttttatatgtggcttatttcatttacatattattgaagtatgtgtaagagttttattctttttaaggatgaataatattccattgtaagtgtatacaaaattttgtttatccattcatccat

SEQ ID NO: 26843 - DNA, 1210 bp, Bovine  19866881234265
  misc_feature (1)..(1): n is a, c, g, or t
nactgtggaagaacagggttgcccttgtggtttttatcctcagagtttagcaaagttcagttaaaaaatggcagaagcccaataaatagctctgtttttaccttcaacaagtgcaagaagccagagacctaacgtgaagattatgaaatgaggatttgtatctttggttgttgctctagcagcctgttctgttgttcagttgctaagttgtgtacgactctttgtgactctgtggagtgcagcatgccgggctcctctgtcctccactgttttctggagttggctcaaattcatgtccattgaatcagtgatgccacacaaccatctcatcctctataaccagcttctcctcctgccctcagtcttttccagcaacagggtcttttccagtgagtcagctcttcttatcaggtggccaaagtattggatcttcagcatcagtctttccagtgaatattcagggttgatctcctttaggattgactggtttgatatcctttcagtccaagggactctcaagagtcttctctagcaccacaatatgaaagcctcagttcttcagcactcagcattctttatggtccagctctcaccagaaccatcctgtcactcagtgaattgattttgtcgtccctaaaagtctctcatagctctcctcctttccactatggcctcggctcactcagctctgatgaatgtgctagcctcaaaagtccaatatgccaaatgcggtataggagaccagtcaagtttaagagtcagggaaagaagcatgtattttctatttttaaagaatttcttttttacattctaatttcataagtgtttggcttgatttacaccaagttctaggcctgttagcctacattaatgtatcacagttctggataggatatttgatagctcttatttagcccagaatctcaaatgatagggagctagagtgaacaatatttagcattttgttgggtttcacagtgtagctctcttcatagtccctctgtctgtaacaaatggactcatccttgtgttttcccatagctgccctggtgcttactgacatagatcaagatactgtgtggctctgtagggaactctgagccatttgacaatctgggcacaggtagtcacctcacattatttaagccctgatctcagcattctaacttctctgtattccccagtgtatataatatgtactgcttaaatt

SEQ ID NO: 26844 - DNA, 1650 bp, Bovine  19866881307074
  misc_feature (1)..(1): n is a, c, g, or t
naatataattgaatgaagagatattttaatgagatacagtaatctcaaacatagagcataataaagtaagagtaattagtagaatttgtagattgttaaggttcttcaagaaccttaggggactctctggtcatcaggtttagttgataaatggacttaaaaaagaggcaagttccaaacctggggacctaaccatccagtgacaaagcatgatgattttgtgaaggcgtctgtgggtgcacaagtatgtgtttgattttttttttaacttaatgaaatagtcctcctttagatttgaccttgaaaaattaaaaatgcttattttttctacattatcagaggttaaattagatcagtgcaatctcaggaatttatttctttaggaatttatattagaagcagctgtagccttttggcagtgcatgggatggcagacaggttcttttagtacagcactgattattacttttagtattaaagcttaggaaagtaattgcagcagtaataactaatgctacaaagatagttaaggcagaattaggaacagatctgaaatattctggctttggatcaatgctcttgtcagagtagatatacttgttactcactttggtgagtgagttctgcggaggagtgcagagtgctgcagagttgagccatcagttgtttattctttggtaaaataagatcttttgtagctttcacttcaagtaaagacatagctaaatgggaagagtgatctatctctttactgttattcacataactttacatatgtcttacaaagcaaaagctttgtgctttgttctgagatgacttaaggaacaaaagtgactaaatatctttgactggatttcttccatgaggacaaggtgcagtgcagttgtaccttctgagaatggaagaatgaatttttaaaagactcatattttttcttttaaagaaagcagagtgatcactctagcacatgggtatatcattgttacttcccaggggtcgtgtttaattgcttttgagctgtgaagctctctattgacattagtttttgtcaggtttgaggtctcaggggaaggtgtgggtcaccccaaatcccatcagtctgaaatcagattggtaagccatacaccttgcatcttgaattcctcctgctttttgtaggtccttgattaatttctaataaactaacacagttacaggctattaactaggaagattaatactcttagggggttgcttaatgtatttatcaaggttggcttaattcttagcttatgagaattagcgcttacatgcttatctcagtatttttcaaaaagaggaatgtttatcataaataacctttaatataagggtcaaaattagcattcaggatgatgcctgatggtgtgatggtcatgctgactaaaataatctgtttatccttgacatttttgcagaaacttaagaaacaatgaaatttcatgggccatagaagatgctagtgaagcctttgctggactcacaagtctcactaaattgtatgtatttttcacatttatgtatgtttacaaaggtcaagaatcagttgtaaatgtgattggattgtatctatttgctatggctagaaagtcagccttctgactcatccactaaaggaagaagctttgttgt

SEQ ID NO: 26845 - DNA, 1481 bp, Bovine  19866881353471
  misc_feature (1)..(1): n is a, c, g, or t
nctggttggcgggctgtggtgacaatttatataatagaattcatgcttaaataataaggtaacagctttggactgtgatgttttaaatgttttattgaaatgtagactgattaacaggcaagattcttcttctaattattttaattataggctcttaatgacaagaagctgtagaaataaaaacatgttaaaatttcatttttaatgaagtggcacctggaagtcccaacttctccaaagcaagtagggataatctattgttacatagaaacaaaccacatatacagagaggttaagatgttcgttgagggaacaggattatttatgccccaatttctctgaatgtaagtagaacgaacaagacgtatagtgggataaaaagacactggactcagtcaagggctgatttttagccatggccctggtaaactgcttgtctgtgtgactatctcacctcttttggtcccagtttttcacaagtaaaatgcagaagttgaaattaatgagcttttcaatattcatagcagcactgtttacaataggacatggaagcaacctaaatgtccatcaacagaggcatggataaaagaggatgtggtacatatatacaatggaatattgctcagccataaaaatgaaataatgccatttgcagcaacatggataattatgctaagtgaagtcagttattcaaacatatcatacttatcatacttatatgtacatacgtatgtatatatggaatatgtatatatggaatctgaagaatgatataaatgaacttatttacaaaacagaaataaactcacaaacatagaaaacaaacttatggttacttttctgtatacctgaaaataatgcaacattgtaaatcaactatgctgctgctgctaagtcacttcagtcctgtccgactctgtgcgaccccatagacggcagcccaccaggctccccccatccctgagattctctaggcaagaaacactggagtgggttgccatttccttctccaatgcatgaaagtgaagtcgctcagtcgtgtctgaccctcagtgaccccatggactgcagccttgcaggctcctccgtccatgggattttccaggcaagagtatacttctattaaaaaaaaaaaagtctttggactaatgctgaatcaagaaaagaaagttttatatcatggttctacaatctagatgagttttttggtgtattgtatcttcattaatataaatttttctaaatttattttcttctccgaagattttcttttttaattatggcatcatgctttcattactaataacttaattgaggtttcactcttcctattttggtcaagtacaattgcttacagtttcttggttgtgatactcattctaatgtttgaacatttatacctgccaatttccctttctgaaatactgtctgagtgttttcatatccataaccttatcagatcccgcctgactctccaagga

SEQ ID NO: 26846 - DNA, 1035 bp, Bovine  19866881507203
  misc_feature (1)..(1): n is a, c, g, or t
naataaataagtgacttggctcctgccctgtatttttttccctcttagatgatttgctcaagccacagataagaactcatcctgaaaccacagttgctctgagaggcgtgaatgtgactctgagatgcactgcgggtgagcagcagtgattcacccatgtctgctctgtggcgcaaagacagtgaagtcttgtatgatgctgatattgagaattttgttcgttatcagcaacaggctggagaagctctggaatatactagtgtcctacatcttttcaatgtgaatttcacagatgaaggaaaatatcagtgtattattactaatcactttggttctaactattctcataaagccaaactgactgtgaatggtaagaaattatgctccctgatggttttatagttagaaggatttttcatgtttaatttttgaacttttgaccaagaagattacattaaacctgacactgggtgagggtccttactgtttctgtctttagggttatgatggtatacaggctggattgttaatttacccacttgctgtccctaattagtgtttgactgaggggtaaaggtgaattccatggtttcaggagatgaactactctcttttgtgtttttgaaaaaaaaattatttttaattctccattttctttctagaactgtaattctgctctaaaaactataaaatttattcctgacactgttcccagggccgtccagtaactgggagtattaacatttctgggaccattgatcattatcattgtctaaaggtagtcaatgaaaccatttttgaaaataatgctctttttctttgtgtctgttgaaaaaatatacaacagctcgattggtctgttgcctattagattgaataactacagcacttcaggctttgtgcaacgaaagatgtacatgtgtcttgcttccgggctgttttatgagctgtttgaaggcataaaatttttttttatcatgcatctcttaagtaaggaatagtaaatattaaatgctaaaatataggttcagaaaa

SEQ ID NO: 26847 - DNA, 817 bp, Bovine  19866881571540
  misc_feature (1)..(1): n is a, c, g, or t
nattggggatgaaatcacatttaggtaaatgtgcccacgttctgtcccaagggtgtttgacataatgcaggtatatttccccagcatcatctagcccagcatctacgatgatgagaagctggttggctgcagcaaagaagtgccgttctgtcaccagcaaaggtccatcatctttggtccagttgaggcgaggggcgggactccctccagctatgcattgtaatactgcagtttcacctcgagttactgtcttgtcctccaggggtctaataaatgagggtgtctctaacagaaagatgcattaaaaaaaatatcaggcaattttatccttaaaattctactgaattagactaacgaggttatgatgaaataagcattttcataagctcatgggaagatcagaagtttttcagaaaagcaaaagcctcaaaaaatctaaatttcctcttaggaattctacctagagcaagcgatcctaggtgaagaagtcaagattcatatacaaaaaatgtttattacaaaattaattgtaatttttaaagatgaaaaaatctagcagaaaaatgagtaatttaacagtacagtcacgtatttcatgaagacttaatgacaatgtaaccctgtgatacaatattaagtggaaaaaagtaggtatacataaccacatgaagatgagtaattttaaaaagtccagaatatgtcaaaatctaaacagggtttgagtgaccttccttttttcaaattttctgcatatcttaaaatttttaaacaataaatttattttccggttacacaagagttaaacaaaccaacattt

SEQ ID NO: 26848 - DNA, 1442 bp, Bovine  19866881852555
  misc_feature (1)..(1): n is a, c, g, or t
ngagagagggtaggagggaatgggaaaatgaggtgaaggaacaggaggcagtggctactacactgcctttgacagtctcttcatccccacagaaaaggctgttccaggaagtttatattctaggcagagtgaaaaggatgagtagaaatcatatatattctggcccaacatcctaggggaagaaagtaagtcttgtgacaatatgagtatctttgtggcctggtaccagcccaaggggcttcccaggtggcacagtagtaaagaaactgcctgccaatgcaggagacacaggagacacatcccagtccctcagctgggaagatcacctgggggaggaaacggcaaccagtccagtcttcttcctggaaaatctcatagacagaagagcctggtcggctacagttcatggggttgcaaagagttggacacgaatgagcacctatgagcatgtaccagcccaaggtccgcaggtctagaaaacttaaaaacaaaaccaacaagagtataaagtctaatatagagaattagaagtaaagagaggaggcgaacatttcccaaagcagggtttccatgagtgccattaagtaacctcaggtcaagagatgagagcctaaaatccaggaagggcccaaggtccacgtataggacaaggacatcatatgtcttccacaagcacacctcaaatagtggcatgaagaaacatagcacacagacagctctaacactgggatcctggctttctagataaaggaagtaaaaaagatgttttgtcctccagtaaattcattttttttctgtatcattgcctttgctatcctttctcctattcctatcagttgtctttacactatttaaatattcatgtttgtttttgtaaaaactacttgagggcagggataatgtgtacctttgcctttgatggaaactagctcagtgcctgttcttattaggtcactaagaaatgctgcttgatttaatgttataggagaattagacttcaagggtcaacagctgcaagggctggcaatccatagaatttccatgaggcaaagccacatttggcaattacaagggcataccagtgaagtgaagagaagcgtcagattttgcaatagttctgaaaataagatagattttctggagtggctgtattctcagaaaattatgtgctgaatgccaaaaagtaatccagtttctcatttttatagagatcatgcaagatacaatctctgccagattcaaatggaaaagggtgacatttataagttttcttagcactatatagcattatgctaggtattgcacacgtagaatattttaaaaagtaagatgttattactgccttcaagcttaaaatcttaacgtagaatcagtgtgaatacacataaactaatcaatgtttacactggagaacgaaatggcaacccactccagtactcttg

SEQ ID NO: 26849 - DNA, 954 bp, Bovine  19866881919691
  misc_feature (1)..(1): n is a, c, g, or t
ntctgagtcttgttttttccttgttatatttgctagtttgtatttagattccacgtataactggtaacatacagtatttgccttagtctgtctgacttatttcacagcaataataccctccaagtccatccatgttgttgcaaatagcaaattttttctgttctttttcatggctgagtagtattcagttgcatatatttatcaattgggcttccccagtggttcagcggtcaagaatctgcttgcagtgcaggagatgaaggagatgcgtgtttgatccctgggtggggaagatccccagaggaagaaataatgctgtgatgaacagtgggtctcttgaggtttcatatatattttagaatttttttgttctatttctgtggaaaatgtccttgggattttgatagagattgcactgaagatgtaggtttctttaggtaataaggagattttgacagtgttgattcttccagtccatgagcacagaatatctttccattttatttttatctttttgaatatatatacctcttattttaatttctttgtctggttaagtaatgcaaaatatgtctctgacatttattgtaatatatgattctttttttttcttctccccaggtcttgggcttgccttcaacttaaatccggctttgaccatgattggcaagtatttctataagagacgaccgctggcaaatggactagccatggcaggcagccctgtgttcctctctaccctggcccccctcaaccaggctttctttatgatctacggctggagaggaagcttcctaattctcgggggcttactattaaactgctgtgtggctggagctctgatgagaccaatagggcccaaaccaaccactgcagagaaagagaagtctaaaggatcccttcaggaagcggaaaatatgagacgaaaaagggggcaagtatgcaaatacagat

SEQ ID NO: 26850 - DNA, 794 bp, Bovine  19866880373526
  misc_feature (1)..(1): n is a, c, g, or t
ntgggtggcaaaggtggtgcagggtccctcttaatctaggggagcaagaaatcctgccacttcctgaaattcttggcatctgaccagggcagtggttggggatgggggagtcagggtttgggtgccaaataaaaaaagaacctagggaattccctggtgatccagggtaggacactgtgctttcactgctgagggtgctggttcaatccctggtcagggaactaagattccacaagctgctgtgcagggtagccaaaaacaaacaaataagaaaacaacccaagagaaggtggggaagaggggtgtaactggaggcaagaatcccttgtcaccatcattttcgccctctgcagtgcgttccaaccttatccccagccctcccacctacaacgtagcgcatgactacatcagctgggagtccttctccaatgtgagttattatactcgcattctgccctccgtgccccgagactgtcccacgcccatgggcaccaaaggtaatggtgatggggtgagggggctgagcctagggtgggtcacaggagatgctccgttccctttgggaaaaagcaatcagaagagcaatgactggcccatttcacagatgggtgcaccaaggcaagacatgcaagaaccagggatgaggacaggggtggggaaagaggacagaaagaggttgtgggagggtcttgtctgaggtcagtggcagagtcaaactaatgctcccgtatttccagggtgcctcttcacccaaactttgtctactaagtgggtgggatcctgctgcgatgagg

SEQ ID NO: 26851 - DNA, 1060 bp, Bovine  19866880560072
  misc_feature (1)..(1): n is a, c, g, or t
ngcttcatagggaaagatatttgcctacccagatcctatcccagtctttggcataagtgggttctgaagttgctctcttgggctcaaagtgagaagtgtgactcactggtcacaaaggacgttagaaaagcaaggctctagaacacttgcggccagcacaaaccttatctggtgtttctgggtatcagcctcttggaaattcaagtggcaaatagttactgcacctggtaacatgctttgaacatggaggagcctaaggcaaactcaacagcaaattcacttgatcttggttctggctgggtctagagtacctcaggttcctgtctgctgtctgtaaacctcagtttctcccctttcttccacctcaaacaaggacaagggacacccagcccgtgccaggggccgggaagagcccacctcatccctccagagtcagtcctaacgccagcctgcagccctttcactggtgcctccgccgtggaccgcagcatcggctccaagtccttctgagcgcctccttgacctctttgttgcggaggctgtagatgagcgggttgagagctgggatgacaagggtgtagaacacggaggccatcttatcagtgtccagggcgtagctggagctgggacgcaggtacatgaagatgagtgtcccgtacagcatggccacacccgtgaggtgggagccacaggtcgaggctgctcgccaccggctctcggccgagcgcatgcggatcacagcgccggcgatgaacccgtaggacacggcgatggccgacacggtggctgtctggatgaagccacagacggcgaagaggaggagttcattgagactggtgtcgttgcaggagatggccagcagggggggaatatcgcagaagaagctgttcacctcccgggagccgcagaagctcaggcggaaggtgaaggtcgtgtggaccacggcgctcactgccccgcccaggccggaggctcccagcaagaccaggcacagacgccgggacatggccgtggtgtagagaagagggtttccgagtgccacgtagcgcgtcataggcca

SEQ ID NO: 26852 - DNA, 1223 bp, Bovine  19866880565901
  misc_feature (1)..(1): n is a, c, g, or t
nagaggaatgaattgaaatttgttgaattaaaatttttttttactatatatttgaatatatgtattggcctatgcaggaccatggagagagttaaccaaaccagcagtgtctccgagttcatccttctgggactctcgtcccggcctgaggaccagaagccactctttgccctcttcttcatcatgtacgtagtcaccatagtgggaaacgtgcttatcattctggccatccgctctgacactcagcttcagacacccatgtattttttccttagcattttatcctttattgatgtttgctacacaaccaccatagttcccaagatgctggtgaactttctgtcaaagaagaagtccatctcctatgctgagtgtatgacccagatgtatttcttcttggcttttgccaacacagagagttacctcctggcagccatggccattgaccgctatgtggccatctgtgaccccttccactatgtcaccaccatgaaccgccaccgctgtgtcctgctggtaaccttctcctgctccatctctcacctccattccctcttactggttctcctgataaatcgtcttctcttttgtgactccaatatcatccaccacttcctctgcgacatcaaccctctactgaagctgtcctgctcctccacgcttgtcaatgaaattgtcattaacaccgaaggactggtaaccctggtgagccctttcatatgtgttatcatctcttacctacgcatcctcattgtcgttcttaagatcccttcggctgctgggaaacataaagctttctctacctgtggttcccatgtcaccatggtgaccctcttttatggaagcattatttatgtttatttccgacccctgtccacctacaccatcaaggaccgagtggcaacagtcatctacaccattctgtcctccatgctgaacccttttctctacagcctgaggagcaaagatatgaagagagacctgaggaagctgatgagcaggaggatgtcctaggcagcactcctgtgggcatactcaggggtaagtcttctcctgaggcccctcgcttctaattgaagtaagttactgaaggttacactcctaagccaagagtccattaaaaatggtgtagatgactgacaagactagaatctacagtcttatttttagtataattatagaagtatacaatatattcatatatatatatatatatatatata

SEQ ID NO: 26853 - DNA, 868 bp, Bovine  19866880569853
  misc_feature (1)..(1): n is a, c, g, or t
nattcaccagcatcctggggacaatggttgttgagaagcaaatgtcaatgaaagacaggaaactcaagaagaaatacatgggggtgtgcagttgggggtcagaacagatggccaggatgatgagcaggttccctgttatggtgaccaggtatatgatgaggaagaggataaagagtggtttctggtcctctggccgcgaggaaagtcccaggagtatgaactcagagacactgttgttttgattgagtctttccattgactttggtctagctatgtacaagaaggtttgttatttatcatgctccaattccacagcccaaattacaagaacccagcaagtctttgttgtcctctatttaggcactattagcagctgtgctgggaaagcttattaccctcttggtcccttgatgtggtcctcccttcccaaatccatgtgatcataaggccttatgatgaaacctaaaggaacagaagggttttcctttagaaaccatcacagctggaccccttgattcaagttccttagttcctagtctatgaaatctgtgtccctgctgggaatacagcaatagaacagaaattcttgcctttgtgtaattcatgtagcttgggtgataagtcagatgatcacaaacagtatatgtaatacagtatcaggtagtgatacatacacgtagcagtacagaatacatcaaggctgtatattgtcacccagcttgtttaactcatatgcagagtacatcatgcaaaatgccgggttggatgaagcataagctggaatcaggatttctgggagaaataccaataacctcagatacacatatgatacaacctttaggcagaaagtgaagagaaactaaagggc

SEQ ID NO: 26854 - DNA, 1591 bp, Bovine  19866880606112
  misc_feature (1)..(1): n is a, c, g, or t
nctttttaagttaacttactaaatattggtagttggatgtttgatgatacagtctaaatacagaaaataaaattgcaaaattagaatcctattcagtaaatatcctattttcttaagggttttaagcctaaacatatgtttttctgcttagaaaaggttacatttagtttaaatattaaaagtaatacctttttattctcagatcctatgtaaaatcagaagtagtgctcaatttagaaaaaatttttatcacttgataaataatgtgttttcctctttaagataaagcaaaaggagagaaagaacaatactgacactttatacgaagttgtatgcttggaaagtgaatcagagagagagaggaggaaaactacagccagtccctccattcgcctgccacagtcaggatctcagagttcaatgataccttctcctccagaagatgatgaagaggaaggtaaattgtagggagaacttaatttctattttgggtggtgtacacagaccattacagttttatcagggaagtgataaagtgacatagtgttttgaatacttttaataaatgtttatgagagtctatgcaaaggactatgggagataaaaaatgattgccattggactttctttgaggtaattatagccaagttagaaaaaatgagatttataattagtgctttttttaaaaagaatcagtctctgctagcttagtgaattaatacagcacatttttagagcaaatttgacacagcttctgcctaaataaatgtttccatctcaactgatttatacattattggattttcacactgataaatactaggaatcaaccagttcttttttttttttttctcctctctctttttcatgattatgtctgtgaattgttctgtcagttctgtgtcagagtaagaaatggagggaggaatacaggaaaaatgaaagtttggaaggcattttgtaccagagctttatttttaagggcaaaaccaagctgattatgaaaagtcgtaagaggtatgcatctatgtgaggttcacagggagtgttctggaaattcataggagagaattcagttttcattgtggagtatgtggtggagcaccgtgactctttttagctggaacttcaaagtgcagggagaattcagagataactgtgctggtttggacacttctggctaaaaaaagtacattaacagaagcatcagggtgataggaatgtttgattggggtagaagaaatatgtgtccatgattatatgtactttttccaagtttagagcaagtgctgacttcccaattcctgttcttccccataacttctacttttcctataactaatcaacttaggatcatttattggcaatgttaatggccaccagttgctagatgcttagtgtggtagacagacactttgtttatgaagtaagataatactttgtttatataatccacacaaattcctgaaaaataagacttattttgaacataaggaaagtgagtttgcctaatgtcgcaatatttagaaattggcagggaggattttaatccaggtttggaattagcagtcgagctctattgtgttatcat

SEQ ID NO: 26855 - DNA, 1958 bp, Bovine  19866880617869
  misc_feature (1)..(1): n is a, c, g, or t
nagttggacacgattgagcaactgatctgatctgaaatacactgtaggggtcttaaaatgttttataaatttattattttataaatgaagaagctaatgtctgaaagactaattgatgtgtccagtgttcatagacaagtaattagtataaccatccatgttggaaacccaagcttctatctgtgcatgtacttgctgtgtgtgtgtgtgcatgcgcatctgtgcgtgcattcaatcacatctgactctttgtgaccccagggactgtggcctactagtttcctctgtccatgtaattttccaaccaagaatagtggaatgggttgcaatttcctactccagggaatcttcccaacccagggagcaaacccaagtctgttgcattggcaggcagattctttaccactgtgctgcctgggaagcctgtgtgtatgtattcgtgggcatactcactcatatgcagtatttcactgtacctctcaagatagaaaatgatttctgtgctagaactcttgaactgctagatcaggacccacaggttactgaactattcctgagatgtatgataacttgttaagatggtactactaggtttctcttttgtaaaagtagatttttctttttgtatttaacaaatcatcttgactccatatttatctgacttccaatggacaggattgctctggtcactattactcaaaggggagttcaaggtgaagtgcaagggttgttaacgtttatatagtttctggggaaaaaaatttttaaggtaataagttatgttgatctttgaactattttagaaagaaattaagtaatgttttagagaataatttaagcaaaaacaaaagtaaatcctttgaccaatctaagcagaatatttgaaagttaaaaatcataattgcaaatttagaatgaacatatgtcatagattttaatataattcattaagtaatgagggaaccagtaagatggtaaaactggttccaagtatttgaggaacttgaatttatatagtcttttcttagggaaaaaaaattagaacaagattgttgggatagaaacaaaactgtttaatatactgtaggtaacctttgggttactcttttctgttgtacagaaattatttgtttagctattggtcacaaacctagaggttaatatgtaatttcacagagtctgggtcctttaattaatagtaagtaattaagacatttgttcatcttgaaaatttaataatcctttgtacatgttaaaacagtcagcacatctgatctgtgggtcaaatctggcctgactggtttgtataaaaaagttttgaaacatagtcatgctcactgtctatgactgctcttgtaccgtaatggtagagttgaggagttgcagcagagactactggcccacatagactaaaatatttactgtttggccctttacagaaaagtttaccaactacttaattaaacagtgcttcaggatgctgttgaaaggacctgttgctactatgttagccttctaggattggggtagtttttcttaagaatccaaataaacattaagaagatggtaatatctgctctctgcctgatatttctaatgaacctcttattgccctcccccttctgtatctttaattcatgcatgtgtatctttctctttggtgttgctgcctttctgttctagttttctctctttattttcctacagttctgtcttttcatcctgctctgtatttcactctttttttcctcctccttaaactgactgtaatatggaatattaatgtatgtaaatattgtactggtaaaattttgtattccctactcttaattttttttagatcagtttaaaatgttatgtgcttacctcaagataaacccaaaatacaaaacaatttcagttatcaaaaattttgtgaactccattgatctcttttctgtcatttacctctcctccca

SEQ ID NO: 26856 - DNA, 1021 bp, Bovine  19866880652653
  misc_feature (1)..(1): n is a, c, g, or t
nttccctccctctgctagaaatctgaggagatttttctaaagtattttctgtgggaatatgttcaaactcctcaagtaaatattgttgggatcttgtatggctggatctcccagacaatttttaactctcaaagttgtccacactgagcccccaccaattcatcaattatggttcaagttttcctaccctggcactgatttctgcagcagtttctgtttgtctgtgctccagtaaacagtgataacatatttttccttctctctaatcttttttgttgttgttgttgacacattgacttatttttttattttattttttaactttacaatattgtattggttttggcatatatcaaaatgaatccaccacaggtatacatgtgttccccatcctgaaccctcctcccttctccctccccataccatccctctgggtcatcccagtgcactagccccaagcatccagtatcgtgcatttgccctttgttctcccctctcttatggatttaagaaaaactgtttattttgcagtctgttctactttttacttgttgctaaaatggagtaatttcatataaattctacagttatatgaatttcacctcccttttaaaagttgctttataaggtaattttaaaatattttgacccaaattattttgaaatactgtgtatgtatataattttgattgtgaggcaaaaaacaaactttcttgtttgttcagatgtttaactatttgtaattatatgtatttatccacttttgttttgagaacccaatttattatgggataaaagttggatctctttgagccctttaaaaatattataatgactgtatctttattatcatgaatatatatattcaacagcacagatttcctacctagtgaaagtgttagtgctcagttgtgttcaactcttggcgaccccatggactgtagcccaccaggctcctctgtccatggaattctcctggcaagaatactggaatgggttgccattcccttctccagaggat

SEQ ID NO: 26857 - DNA, 932 bp, Bovine  19866880668954
  misc_feature (1)..(1): n is a, c, g, or t
nttatagtttcagaagtaggctgtgaaagtaatcattcagacttttatttttagggatccaagggggtcggacattgtgtggtgtaatgaggattggcctggttgcaaaaggcttgctgattaaagatgatatggacttggagctggttttaatgtgcaaagacaaacccacagagaccctgttaaatacagtcaaagataatcttcctattcagattcaggtgagtacagtttaattgtacctctaggagaatttgtgaaaaggtaaaaataggtagtgatcttcattaatttaataaaaagaaattgataacgtaaaaggtaggtacagacggctactctgggtctgtgcatcatccatcacatctaaggcaaacttctggtgattagtattcaaagtacagtcttaaatttttcagacgtatgttgctgagagtcttcatgttttccagagtaggcccctcaatgttataaaactctctagaaggtttgatatagggtggaaaagaacaaaaagagcctggacaactggaaactttgatagatgctaattttttaaattgacgactctgttaatttcatttcattcattcattctgttaatagaaactcactattaattccttgttttcgagcctttgtcatattgggatgcatttagagaattttactgttgtcatgtttcctggaggatgctgccggaggctgaaggctccccagggctgaaggcaactggttggtccagggctgtggtcactttaggacttgctctaccagcctgctccaagggtcagttgaaaactgtgatcacctttcattttcagatatgttacctttggtataattagattacatctttttgagtgattttatatcagttagtccttcaatccagtgttgcagtaaagtagatatcagtacacaaggctgaa

SEQ ID NO: 26858 - DNA, 1100 bp, Bovine  19866880761488
  misc_feature (1)..(1): n is a, c, g, or t
ntcctgtttgtctactgtggatacagagaatggaacatcacaggacgctccctggcctcagcccatatatctgtgcttccagtaaggtaagagtacagggagtggagctaaataggtgaggtcaagttctagggattgaggaggcaagtagaaatagattatcttgtctatggtgtatgtcaaggggtgggtgttgggggaggggcagcaaaaggaagatcatgcatttcctttttacttggtgagcaaaagtgacttttccaatcttgcctttaaggatatgctcaattcttatctcctccaatttccaacatggacttctctggtcaaactgatcactttcctaaggaccctattatatacagctatgaaggcatggttcagtttgcatgggtattggtttgcctgttctctaaagtcccatgtgtgttttctctcacatcataatggcatccagagattctcatgggcaaggaccacttctttttttcctggaacagtttgggctacacagatattatctgtgaattgatctaatacttaaatattgacacgtggaagggttttatctgcacagatagcaaaactacaaaggatgggaaaaccaagcagagtgaaccaaaccaccctttcagacttcctccttctagggatctctgagcggccagaggagcaaactctcctgttcgtcatcttcctgggcatgtacctggtcactatgatgggaaacctgctcatcatcctggccatcacctctgaccctcacctccatactcccatgtacttctttctggccaacctatcaataacagacgcctgcttcacttctgcctccatccccaaaatgctggtcaacatgcatactcagagtcagagcatctcctattctgggtgctttgcacagctgtattttctccttgtgtttggtggccttgacaacttacttctggcagtgatggcatatgaccgctatgtggccatctgtcagccacttcattacagcacagctatgagtccccagctctgtgcactaatgttgagcatatgctgggcgctaaccaactgtcctgcactgacacacacactattgctgaccccgt

SEQ ID NO: 26859 - DNA, 1961 bp, Bovine  19866880772123
  misc_feature (1)..(1): n is a, c, g, or t
nccttcccaggcagaaatgtgtacctggtaatcagatactaccagatactaagatttttatttacagaagaagccaatagctgcagtttctatctttgctaaatgttgctaactaattccctttttcagtgtgttctaagtctatgacaaaatatattgatgggccatgtttgacccatgggccaccagtttatgacttttgcattatttggagtagtgctgtgctgtgctgtgcttagtcactcagttgtgtctgactctttgtgaccccatggacagtagcccaccaggctcctctgtccacggggattctccaggcgagaatactggagtgggttgccatgccctcctccagcggatcttcccaacccaggtgggttctttaccgtttgagccaccagggtagccctttttggagcagaccttccaggaattcacattcctttgggactcgactgaccattgcagaatattgcccagagcacagtgcttccagggctggaaggtgggttgcattagatcattgcaacctggaggctgtgattttaagtctggttgaggaagataaataggctgttccttcctggtccagtaagaagtgacctggattgggactccttgaggacctggaatgtggtcccacctcttgccagctggctatgtaggttgcgtcattctatgggtctccatttcctcatctgttcacctgaggtgaaggaatctgaagtctctattccactggtctctttcagtaattctagcccaaagacagagaccaaagttgaacctgctggatttgacaaaactgggttagagataagagtaagcccttgctacaaacaaactttcacatcagggggctcttgcagccaatgtgcccatatttgggggggtattactctctcctcccctgttgtgttctccatacttcagccagagtgaacttgtaaagatattaatatctattggattatgccattcccgggcattgagttcatcagcggcttcaagtaatctctaagaagatgactgtggcctagacggctttgtgtgaaacagcccctgcctgtccctgcagatgccccggtcttgtgcactgccacccttgcacactgctctgcccacgagcctttcagttcctcaaacccttaatatcctcagggcctttgcatatgctgtttcctttgctaggatcacccttgtctggccgattactatccgtattttggactacagctttcatattgctttcttagggaagtctttcctagtctacgcaaaatctcaattattcctctatattaaccacttttatacagcacagttctttttcttcattgtacttattaacagttatgcccttatctacatcttagttttctatctccctttccctagatcataagcttggaatgtaggaatcgtatccaacttgctcattctgtccagcaccaaacaccatgcctgacacatggacgcacccagtacatttccctcaagtgggtgaatacttgtcattaggttgatggaagggaggcactcattcgtggtgttcctgaggagcagagaaatggacagaaagggaactcttagctctttccccttctggcccctctgaaccactgaggcctctctgccttgttcatctgatcccacaggcaccgcgggccaatttagggaacagcctcctaattacacagcttgaagacctcatcaggcagattgcttttcagagccagccacttctgttattaaatagcaaaaggcattcacagaagaagcacctgattggccaccagagtgtcttaggaggcaggaggaggtactaacagcttaattttttcttaggaaatggaaatatatcttcattttccaagcaaggcatctttgccatttctccaagttgaaattctgtgagtttgaaaaaaaaaacacaacacatctacagttaaccttagtag

SEQ ID NO: 26860 - DNA, 1788 bp, Bovine  19866880787174
  misc_feature (1)..(1): n is a, c, g, or t
ntggactgtggaattgtacatggaaaaggcctgtaagggaggatgaattttatgttaaatctagtactgagagtcctaatctagctaataacttgaactgataaaatgtttaccaaagcaagacaccgcatctatttttttcataatggccacctgtttggaaatgctaattctgtgggttagggtatcatgggccactgggtaataggaaactagcagcaaatactctttccttatttagttttccaagattatcctgaaatgctttacattaaagttaatggtgggggggggtgaaaagccattaagtttgaactgaacataacaatgccatcttgcatattttcacctactaattttgaagtgtttcaaattattccagaatacactttatagttttataatatcccatatgtgttactaggtttaagaacaccaaatgtttttatataatactgagaaatttaatttctggtagaaatcaaattagtatctttgaaagaaaaagaaaaaaatatgccaaattctccttctgttacgtgtcagattctttctgacagaaaaattaaaactgaactttccttataagaaatgatttgaccttttaaaatgtttttcctcagtaccactgtaaatatattctagatgtctcgattacaatagacaaaattttgtctaaaacactaaaatgtttagtgatgacaaaattggcttttcattcctttcaaaagcacttagtaaatgtctacctagaaaatatttttataattatcaaaaatgataaaaagcctactgtttttataatttatttttaaaaagtatctaaatgaaccaatgcaaactaagatatacatagcaatttatttgaatctgtggaaatttaaattgctaataacatttatatttaatagtaaagtaagtatccatcctaaagatactccccaaacacctcaaattgagataaaatagctttaaaagcccatacctctagatatataaagggactacttaagaaaaacaagttaaattcaaattaaactatttgtattaagtaatttcagttactaaaactgaagaagaataacaagataaagcctaggagtgagaaacactaagagagaccttaaacggatttttactcaagtaagttttcaggctataagttccttgctatgaatacaaacttataaaaaaggaagaataatagacatctcttatatgatgcaaattagaaactgctttattaaaagcaaactgtttatcagctaagtactttcattttctgttaactagtctaccatgttattatgcaagtagtccaggactacgaaacttgattttaaaataccaggttaaggtttatgcctcattcactactgtataataaaaaaataaagcattttacaattctctttatgaagatgtaaacattagggctcagatatgttaattaaaacattcattgttttcattttagttcacccatgtgagaaattcaagctactttaatggactgtaatagcacttctcaattcagaaaccttaaaaacagtagttctggacttaaaaaattatatttaaagcatcataggtacaatttagatcttactctataaaactaacaaaaccaatgaaaataatctctaaattctaaaactcagcattcaaacatacgaaaaggactggaaaaaaggaactgtattaccattttaaagactgctattatatgtgctttagtgtatgttagaaaagacatgacccaagttttacttctaaaatccattgttg

SEQ ID NO: 26861 - DNA, 703 bp, Bovine  19866880839023
  misc_feature (1)..(1): n is a, c, g, or t
ntaggttcccttttaattcctactctccccttagctaggccccttctttttaattcctattctcctcccactagctgtgattagaatgactttgtatcccaaataaagtgtttaagtaatcttttttccatttttgtatttgtcaaacttgaagttccggtaggaacttttgattaacctgagaaagttaatgttgctacactaaattgatacactcaaaagcagagaaagaaagattttaggtagcttttgtgcagcctgtttatagttaagcatagaaatttagttgtgggttcttgaaacagtaagacaagttcatggatttttaaaaatctgcttaaagagctacaccactgttttagcataacatccttttcttatgttgtttacttccacattcagttcttgaagaagtcgatgccattacatcctgtcaaagaccatctttcagtattgccatttttgttgatttggaaattgaccttttccaaatttttagagtttggaaactagctggaaggataacacattaaacatatattttagacatgtttagaaaaagcagatgttataattcaaatttgcacctatttgagaacttaattgcagtcatattcgttagtggattctttgagttattcttgatctgttattactgttgggttaacctgacatgtaagacttatgtcctttgttcatatgt

SEQ ID NO: 26862 - DNA, 1694 bp, Bovine  19866880906226
  misc_feature (1)..(1): n is a, c, g, or t
ncggcttaagcagaaagactgaggatagtacaggagctgaggctgaaaaggtaatgcaagctacgtaaagacctgcaagataatttaaggaccaactgagagaacatttttaagtaaaagaaaaacactatgtctgacctatgtgctgtgtgcttagtcgctcactcatgtccaactctttgcaaccccatgcactgtagcccaccaggcccctctgtccatggggatcctttaggcaagaatactggagtgggttaccatgccctcctccagaggatcttcacaacctagggatcgaatccaggtctcccacactgcaggcgggtaccatctgagccagcaaggaagcccaagaatactggagtggatagcctatcccttccccaggggaacttcccaacccaggaattgaatcgggtctcctgaattgcaggtagattctttaccagggaagctccacctgatctatagcagatgctaaataaatgatagcttagtattattacaaataatctacagtattgtattattggatctaagacgccactacctgcaagagacaccattatttgacgcacccttaagaaaaaaattgctaaattatgacacattgttgaatatagacttgtcttgatttcacagcctaactggattataaacagtgaaaagaaattgctttaaaagaaaaacctcaagtatcaagacactaaaagaatggagtattttaattcactgaattttctaagaagtgattaatcagaaaaatccttactttcttgctttcatatgcagtactaaaattgtagtattaaaatatgtagtacatgatgtacagaatttcattttcctcctcacctgtaaaatggggataataactacctgaagagctatgacaagataataatagatgtggactgtttaccagcatacctaaaacaaagtaagcccttattcaatagaaattattgtaaatctagggtcttgctgattcaataaaataataagaaatgttatttttatagcatatgcacataaccagaaactgcagaatttgttactgacactctaaaaattagttttctatatatccatcttatatatgtatacatatctatatagatctattttcttattataacatcatcctaaaagtcaagtgaagttttaaggaaaatcaaaaaacctccacttaagggttctatctagatggttgatctctggctaaagctttgattatattcattttcatatcacctaatgactaaatatttatacatgcttatacaaaaatgtttcttatccaccaaaatcacttaaaaacataagtagtgttgacacagtagtgaatacaaagacatatataactaaatggaatttctagttttgcataaagatttatgacattatctaaagaaaatcttttatggaataatgcaaatcaggtatgtggagtattttttatgccttgaatatccctaaacatattttgtatcccataatgaacaaagttctataattattacttatttcaaataagtaaaatcctgaaaggttacctgggctccaactaactggagaagtgcgaagttgacaggaagcacatcaatgtctgtgttgatggcagtctggtcaaaaggacaagcttttcgggggaagtttattcaagcaggtcttacaaacagtgtgtgaacaac

SEQ ID NO: 26863 - DNA, 1037 bp, Bovine  19866880940231
  misc_feature (1)..(1): n is a, c, g, or t
naggtctaacgtcaggactcctctggtctgctctgtacccctacccaatggaaagaggcagacaggagctgtcagttgctgagccaggccccgacagctgccccgtcaggcacgcatcagcctctctcacttttgaaatccaggtggaatattcccctccccaaatcttttgtgaatacagccattaaattaactaggggggataaaatctctttgataaatgaagacttacccgaattttctcaatctccactttattagcagcctgctgcttctccaatctttcactcaactgagagcaaatctaaggaaacaaacatggtattcacatgacagccttcttcagcagtgtcagaatctgcacagtctgggctcgtggtgtattccacagtagaggctggaccatggattgagacagtactgagcgggagggagcagatgacaggtgggcagagggtgccctggctctgtcacctccgcatccattggcccaggacctgcgagaacccatcagtgccagagtgcactcgatggtcaatatcacaaacacgccagactccagagccagcaagagagcccagtactgaaggcacaagaccagttcagttatgctgtcagaatggaccagctgggggacaggtggttccccatcaggaccacacacgagcagccggagtctgaagtgctcccaagaactagggtggcctccagggattaagtgcctgcttgcgtgagggacctaggccagggccacaaacataatctctggactcctcacaacaattctctgggagagtcacgagtccccctgttttacagctgaatcagcacggtaactcgaccagaagcacagggactcctgcagggccagtggccgagtgggcacacgttggggtgtggaaaggaaacctctcacgcaggcgagcagagcgcccagagcgtgtggcccacttccagggcacagacccacctgcttgtagtcgccaatgatagagctttttttttatctcggattctgcctgtccagttcccgacgg

SEQ ID NO: 26864 - DNA, 940 bp, Bovine  19866880975912
  misc_feature (1)..(1): n is a, c, g, or t
ntgagagttgcatagaattgatcagaaacgtgagtgatgccgaaccaaaacctgtgcattgtagagtttaacaaaactaggtggcttcaactacaagcatgaaaccctcctatttaaacaaagtgcttctccatgtctacacagaggaccctctgctggcactggagcaggtacttgagttactgatcccctgctctacgtccccctatatatatatatatttatatatatatatatatttgtatgtgtgtgtgtattttaaaaaaaaattaaaggtttagaaaaaaaccaacagcctgaagatccccaaactctgataacgtcaactcggatgctgggctggatatgagctgacctaactgggaagaggccggaggtcacatggaggagtgacgttcggagtgtccagagcggcaggcgagtcagcgggcctgttagtatcagcagtgaggagggcctcacgagctctggtccacagtgacctcccgacaggcttctatggatctgacttgcggacattctgtcctggggcatgtcacagaatcacacatctggccaaagaaggcaacaaaaggtgtcatgttttccgaagggtctggaggcagcagctgctctcagcaagtctctttcccttgaaccccagttgctgtctttatggagctcagtgttcggttaaaccacgtcttcttggctgcctggacctcgttgagggcaaggcctaaatggtgctccaagtcctggaagagcaacaatggacatgaggatgctggtctcctgtgcaaaggacgctgcctccccagagctgagccaaggcaacaagtgtaagtctgtctcctcctgagacaactctgggaacagccaccacccccgctccccaccccagctctcaaaactggcacagaaagatctggagggccaaaagctttggcacgttttctgg

SEQ ID NO: 26865 - DNA, 1208 bp, Bovine  19866881057836
  misc_feature (1)..(1): n is a, c, g, or t
ngtgagatgggacccacaggtggagactgcacggtggcgaccgctgctgagggcaaacgtaggatggtggccccaatgcggatgtaggagagtacaatgagggcacaagggcccatcatgaggaagcctccctccaagaatatggccagctcattgggatggatgtcagagcaagaggcttgcaaaagtggcccggtggtcacaaaagaagtggagaaggcgaacgttgccttcggcatccgcagcccaggagagaggcaacaggagtcccacatgcagcatggtgtgcaccacagacaccacccaacagaaggccagtaagcgggcacagcattggcgattcatcactgaatggtagtgcagagggtcacagatggccatgtatcgatccagagccatgatagaaataacaagtgtgtctgtaacgccaaacacataaaagaagaataactgggccaggcagcaggcaacaggaatggctgggtcatgagtgaccagatgggccagcaactggggcagaatgactgtggacagccccatgtctataactgagagaccacggagcagatagtacataggtgagtggagcctggagtcccgggagatgagcagcactaaagtcacattccccatcatagtggtcaggtaaatagccaggaacaggacaaagaggacaatgggagggacttcagctcctgagaacatgagaagcaagaaaactggagaatgtgaagcattaggggcacagcccatgatgaatgacaaagagcccacctgaaagagtttgaatcaaaaaccaagtcgtgggtcataggttacagctcataacaattttagttaatttatgtacattcttcaagctccttaaggacttaaattcaactgagcactatagcccttactaaatttactccctgaatttgttatagcattttttcctttacttcttccttgccgtccactctaatgggttcttctacgtaatccacataccctgataaagttccttgtactataaaaacccttcattcaatattatcttttcatccaactactatttatctccttccagtgacaaacttcacaaaaaaatttctatactcactgtctctagctcctcatcttctagtcacacttcatcacctggccatcttcatgatttctttgtagaacctgtaaggaacagaagtattatttaatatgtaaca

SEQ ID NO: 26866 - DNA, 818 bp, Bovine  19866881090000
  misc_feature (1)..(1): n is a, c, g, or t
naattttgaaaatgagcaaaggacatgaacatatcctttaaaattagaaaaaaagactcgtcactcccaacctagaggagtggaatagaggttcaagagggagaggacatatgtatacctatggttgattcatgttgatgtatggcagaaagcaacataatattgtaaagcaattaccctccaattaaaaataaataaaattttttaaaaaagacttgtcccttctaaaaagataaaaattaaaactacagtgaagtgccatttgccatctatcaggatggcattacggtatcaaaaaagtttggtaacacagcagaatgtcatgtatatgggaactgtcacactcctgcttaaactacaaaccagtaccagctcaactgacagcaatttggaaataagaaaatgtagaaatgtaaatatcccatagctaggaatttatactaccaatatactcatacccatgatttatgggatatcaaacacctattcatttgagaagccagactcaaaacacagatcgggctatttgaatcatcagcacactgccatgcatacatgttagtattggcgcagtgcaatggctagaagcaccgtgaaatggtaacactggggttgtctctagatgtgtgactggaattcaggagaagtgatcatgagacttctgatacatttttaatgatcatgagacttctgatacatatttaatggacattttttaaacctattcccagagcccaggatttccagtacctgtgttaactgagatgccttcacctgccaagtccgcatctgcgggcatggaactgccagccagggca

SEQ ID NO: 26867 - DNA, 539 bp, Bovine  19866881203075
  misc_feature (1)..(1): n is a, c, g, or t
nacccgccatgaggcttgcttaatatcaggtgtctttccagttggaccttgtaaaggctaaggtttcttccaggtatcagttctgttctcatattcgttatctatactgctttaaaatttttgttttcttgtggtatgtgcatgctggggagaagagatgtgtctggatacaatcatacagtcttggggcagtttctgtgtgatacatttgcagttcatatgtatttataagtaaccttttcatcctggcctatttattgcaacatttaatgacattttgtttaaataccagtcttaactggttgagaatgataaaaagtattagagtcagtcaccctaggctttggcaagacagcctatttaactttatatggtatatgactaataccagaggaagtgtaagctttttgtgattgtgttgaaattatttcataggaaatttaaaaatgagactatactaattatatctgtaattaattgtgtttttaatacaatgatttcactgaaagtgtgttttttgctcttagagggaaaagcca

SEQ ID NO: 26868 - DNA, 897 bp, Bovine  19866881207546
  misc_feature (1)..(1): n is a, c, g, or t
ntttgtgctgtgactttttgtttactaaactaactaccactgtttactaatcaatcactttgtgctgggtattatacaggtcatattattacataaattctctcaaacaacttctaaagtattcattacccacattttgaagtgaagacatatgtccaaggcacacagtaacagttaatggagttaagggtcaaacacttggctgccaccaaggtctgtgttctttttgctatgccttctttagcaggaagcatgtagtaatgcatgtatgtgcatgttaggtcacttcagtgtgtgtgattcttcgggactccaaggactgtagcctgccaaagtcctctgtccacgggattctctaggcaagaatactgagtaggttgccatgccctcctccagaggatgttcccgacccagggatctaactcacgtctcttatgtgtctcctgcattggcaggaggttctttaccattagcgccacctgagaagccccatatagttatagggaatggttattctacagggccttcaagtaaagggttagaatatagaaagaaggctgacagcacaggaggactcttacctgtgaaacagtaaataataccaaagaaattcactatagtctggccactgaaaatccaaacagcaataggaaatgagtaattagctagagccacttctgtagaaacacactgagaagaaaagtgtggtgctctcaccagattcagtcctccagttctgcctgctctcagacatttttcctttttgattttacccaaatatgtcccaaggaaagggaaacacatgaggtatatactgtgaacagccgggtttgttctgtgggaaaagagaagttgatattctgcaggaaaatctctccccaaaaagtatttacaacg

SEQ ID NO: 26869 - DNA, 1603 bp, Bovine  19866881233841
  misc_feature (1)..(1): n is a, c, g, or t
nactccaccaatagatgctatgctaagggaagcaattaatctttttctttggtagaaaataagctgagatataaggtgatattgctatcagcctgaatatgtgatagaacttctagttctatcagaaccactgataattcatctatgtctgataaatgagtgaatctacttatcctggagctggctataaagaagtattttagattattctgtactcttttcaacagtttatggcccagcttcatgtgattgaagttgacatagaccagagtacagtatttccatcaatacctgcagacaggaatcatcactggggagcataaccaacaaagggtagtagttgtacaacagtacttatttgggaggtcttcccccgaaagaagtcaaatgcttataattattctgtagcttacttggtgatgcttttggaatcaggattgctccaggtacacttaaagtgtgctaacatataatggtttctctttaaaaaggggctatctggagtcagtctctagactttgttgtagaagttcgctattgctaaggtgagtttggccttcagttttgtccagcatattgtaatagtctttgaattctcatttccttgtgtaccttaatttctaaagtggatgaaaaaagtgggtcacagaaggagcagtcagatttttgcatttagatgttcctataatggtacacagtcccacctcatcccctttgacagatcaaatacaaagttgattttccgttatggaaaaacaaaacaactgtttttcctaagcacatgttcagaaataaaattttgagtcttacttgtttctgaaccatgagttaaatttagataataggagtgtttgagtccatagagaattttaagaaatcatttagcctgcctttcattttttaagttggggtatccaaagcccaaagaggtagcctggccaaggtggccaaagtagactgagtaggctacatatgagctaaggtctcctcacttctcactgtcccttggcttaaaaagatttagtacatgatcaagaatactttagcaaaaagttcctagtttgtgcttcccctccgtgcatccttgtgtgctttctaagacagcctcagttttgcaaacagaacagtcatagaaggatttatttttgtaaggtaattattttttggttaggatgaatattacattcttcgtaagcaagcaactgatttgctgggtgttgattaggaacagaaaggacaagataacagtgtgagaaggatccaaatgtgaaactaattttttctggaaacagtgtttagtttccatcaggatttcctgatttttgtttctgagctgtgagagtcccatgtatagatgaaccaaaaattaattttaacttgagtcctgctaagtcacctcagtcatgtccgactctgtgcgaccccatagacggcagcccaccaggctcccccatccctgggattctccaggcaagaatactggagtgggttgccatttccttctccaatttaacttgagtagtcagagggtattcttaaagttgttataatttgatgcatttacatgtgaatctgatttgaagtataatttctaccatttgtt

SEQ ID NO: 26870 - DNA, 1614 bp, Bovine  19866881242742
  misc_feature (1)..(1): n is a, c, g, or t
ncacacaaaggaaatcaacgaaaggcaagcccgcttcagcagccagagtggggagactggggaggtgcaggcttgttctgataagcgttatgccatggtcctattccgaattactagtgtattttacatcctctggttgccgtacatcatctacttcttattggagagctctactggccacagcaaccgcttcgcatccttcttgaccacctggcttgctattagtaatagtttctgcaactgtgtcatttatagtctttccaacagtgtcttccaaagaggactaaagcgcctatcaggggccatgtgtacttcttgtgcaagtcagatggtagctaaggacccttacacagttcggagcaaaggccctcttaatggatttcatgtctgaagtggttcaaatattgagttgctgtgtgttttgtgtgtgtgtttcctttttatctttttgtatctctagttctccgggaaatatgggacaaaataatttaataatttgattctaagcaatagctgacaagtgatccatccaaaataccttgttaagtttgcagaaatgatttttttaagtgcttttgaattagaaaaatcaggaccacgaggataaattgctgttcataatgtcatggaagtaactgtatttctcagacttaaaaatgaataaagccatatctaacacctctccagctggcatgactaaacctggttgtgaaaagcgtcagcatttttcaaagtctttgttttcttgttgcttttttgggttctttctagctgtttaggcttcatgtacaattgatttaacagggaatattaaaatacagtgatgaattaactgtatagtaattcagtgatgaattcctcatgtatgtcacagtgtaactatgctgcaggtttccatactgccattcagaaagccgaatgttttgtcttattctcttgagaaaattctcaatgcagtgaataatgtgaaaacttaagcatgaattttaaatttgtgtgttgaatcgtgaagcaaaagtgcagtcaaattatataatttatataaaaaactaaaatatattttgtgccatccttcactgagacctaaagagatgtatgtactaaaagtgattgtgttctagtattcttgcccatgcctttgtgtatgtgtgtgttaagaatatttgagttagatttttcctttatagccaaatgcattttaataacctgaaaaataattaaatgacaggctgatggcctccacttttataatggtgaaaatacattaaaatgtatctttagtttctctgctctttttatctagagaccttttgaaatattagaatatcaggaagaaaagcgtcctaagcaacttgagtcagaaaatacactatacatttagctagttctttttttttaaatagaaggcgttgattgaggtgttctctttgtagttaaatggaatcatctaatcaaatagcaactaattctttttaaaagcattctttcagctagtgttaagaaatccatatttagtgttaaggaatgagagaagttctgattaaatctccattgctattctctttctgggaaaaaaacaacatcatttgggttacagttcatttgctcaaatag

SEQ ID NO: 26871 - DNA, 1049 bp, Bovine  19866881292312
  misc_feature (1)..(1): n is a, c, g, or t
nagaacccaccttctctccccaggctgagtcatctgcaacactcgccacccctggcaccatgctcccacacccctcaaatcccacggtcacagggctggccacatgtgaccatggatcgccccattctgtttcctcgaggtcttcgtcacttcagcatgagcccctggagggcaggaatcgtggtcaggaagcagctgctcacctgtgagctcctggaaagaggtgtagggcttcatgccaaacctcttgcggtactcattgaaaggctgcagcctcagctcccgcgattccttgatgacatccacggccacgtgcaggatgtggtggtctatgttcctacccccaccgatctgccaagagataaatacagtggtggtctgagagccaagacatgttgtcctggagaagaatttcaggtcaggaatccttcctgagtagaaagtatggctcagtctagcaagcaccaagctatgaaccctacctaggtctgcatggccatgcttctcagcttcctcatcttatttagttatttatatttgtatttttgggcacatggagtggcaagcaggacgttaattccctgattagggatggaacccatgtacccctgcactgggagcttagagtcttaaccactggaccgccagggaagtcccagcagcttcctcatctttagactgtagagtggtccaggaggacttctctagtcactcactggacacatggttccccagccctttgaatttaggtgaggacctccaacatcctgttaaggaaggttctggaggtattagatacaacaactaggactctgcagaggagatggccaacatggccgcagtcaagagctcaaacagaggggactggcatttcagatctggaaatataaggcagaaaggtttctgagcttttaagtgatggaaactgatggatggacaaacactagtttgaggggccaaaactgtatgacttccctgggatattttttaaactctacctggcagaactgacgtgtctgtcatcccccaaatcagttcttatcacagaa

SEQ ID NO: 26872 - DNA, 1810 bp, Bovine  19866881345912
  misc_feature (1)..(1): n is a, c, g, or t
ncttcaccaaggcgttgggccacggggtgagtacctaggaggggctctggacttctctgggccacacgtggcacaggtaggctgctgctagtggggcagaacccagggatctgaatagactctgtctctgtctttaggtagacctcgggccacatttatggagacaatctggaacgtcagtatcagctgcggctctttaaggatgggaaactcaagtaccaggtagcactgggcctggggctggggcattgggaagggccttccacagtctcccctggcagagggtgttggtggggggccttggtggtgtcctatggcggaagctgtaggtgcatgggaggagaagcgacagtaaaccctgggagcaggtgccaggcaagagaagcagacagggagcagacgtgggctcttgtgttctcttgggaggtggattttggggctccacagaaaatggacagttccagtctgcatttattcgtttaatcattccacaatattaattgggcactatggtgtgccgggcaggtgagcagtggccatggtagttgtaagccctgccctcaagcccacagacacaaaccctaaggtgctagttccacgaggacgttttgtcggaactctcactgtccaggaatgtgagggccacataggtgattatctcatgcgctcctcagatctactgcataaactaggtaccatttgccctcttttatagacgtgagtcacatccaagttattaaaatttttctagtggtcacattaaaaaatgtaaaaagcaacaagcaatattgattttaataatatatttttgaatttaacccagtatatccaggatatcctcatttcaacatgtaatcaacacaaaaattgtcaatatctcattttttgtgctaaatcttcacattctgactcatatcttacagtacatctcaatttgggtgccaagttttcattggcgattctgatcagcatttagatttcataaaatttttgcggttgagaaagtagattcacatgttcaagttgttctaagcataaagactttccgatagctgggatcttgatttaaaaacgtgaatctaaagtaaatgaaattgaaaatcaagctctttatccacatcagccacatttctagtcctcagtagctgcacgtggctagtggctcccattctggaccatgcaaatcgaaacaaaaaccgagacgggaggttcactgctgaatctttcgagctaagaacagtatctggcatataggaggtcctctgtgtttatttactgagtgaatgaggaaactgccatatgattaattacacctgtgatagctgccacaggcagaagccaggagagtgtgcagaggctggggaaggcttccttaggaattatgaataaaccaagagttgcataaaggataaggaggaatcaaggaggccaagaagggcccagggctgtccagattctcaggtttcaaggctggagaggggcagtcgcttgagtgacgttgaggcagtgaaacaagggatatgctgttggacatctaatgagcgtgggtcgtattaaggatttctgatttctgccaagagcagagagaagacttggaaggttctttaagccaggatgtgattctagatttggatgttttaaagcaagggtcccctacctttttggtaccaggggccagtttcagggaagactattttcccatggactggtgggagaaggggatggtttcaggatgatttgagcgccttatatttgctctacattttatttctattattattacatcagctccacctcagctcatcaggca

SEQ ID NO: 26873 - DNA, 1349 bp, Bovine  19866881367428
  misc_feature (1)..(1): n is a, c, g, or t
naaagtcttataattataaataattttgcatcctgccgccctttatatgccatccaaaatggaaatactggcacgcctggtgcaagtccctacatttttatctatatttagtaacttacataaatttacccctggcatatttcaggtactaataaatacttagtgatggatacaggaccctgatgagttacaaagctatgtagtgaaggaaagtaaagaccaacgagtgagcaactgtccttaccatatcacatataacagagacaatttcacagcatttacagctgtctgcctttcagactacatcacacaaacaattaacatttaccaatcattgtccttcatatttactattcaaagacactgcagccgatgaggcaattttctatgtttggctgcaaagcctatacattattaataattaaaattagagaagacacagccatttcatcaaaagaaatctgttttaatactgttttaactgaaacagcttgcatcttccacatgtttttctttaggaacacacatacattgttattttaaccaaatacattcttttttaacttcaggtaataatggggggaaagtgctcacttcagcagcacatatactaaaattggaatgctacagagaagattagaatagcccccgagcaaggatgacacgcaaatttgtgaagtgttccgtatttttataaaattcattctaatccaaaaaaaaataataataataatggggggaaagcacaaggcttaagaattctgtcctagaacttccctggtggtccagtggttaagaatccacacttccactgttgggggcccaggttccatccctggtcaaggaattaagattctacatgctgcacagtgcagccaaaaacaagaacaaaaaaaaaagaatcatccctccccccccaaatatgaattattttgaattttaaagcaattacaaaatcctctctgctcaactctatctcttcatcacagaatgcaggaaatgagcaattttccagaaacgtagcggttctcatctctgcatcagagtaaggagcacaggaagctctgtgaactagaccttgtgcggttataccaccaaggaccaatttaattggtttggggtgggatgtaggttaccaataattttttttaactctccagaaaatcctaacatacaaacaggaaagcgaactacaaacctaatctaatcctttcatcagcagcccatacttcagatttcatgtccaacttactgccttctacatatctccatctggaaggttgcatgcacaccccaaatgcaaatgtccaatcctaaagtcagcatctttttcccaaagcatatttttt

SEQ ID NO: 26874 - DNA, 3038 bp, Bovine  19866881371809
  misc_feature (1)..(1): n is a, c, g, or t
nccttatctaaaaatctatcaagttgaatgctgtcagagcgtgtctgattctaaagtctattacacaaatacacccctgtatattgtacaaccttcccccatggggcctggagcatttaaaaaaatatatttttatttatttatctggctgtgctgggtcttagttgcagcacccaggatctagttccctgaccaggaatcgaacccaggccccttacattgggaacatggagtcttagctactggatcaccagggaagtccctgggggcattgctcataatcaaactcattcacatttttttcccaacaaaatatatgaatattcataccaggtagtgaaatgaagaccaaaatagtgtctcctcctcagttcaggtcaccaagtgtctgtaagaccttttggtcactgaagcttatagcattgtggagacaggattgaggtcctggagtatgtacccgcgtggggctgacgtgtggataagatgagttaccacactcaaggtgctcagagccacacctggcacacagtgagggctcacacgtgctatgcaatggctccctcttctgccccaaaccctcccgtggctagcaggtcctcagggtgaaatggaaacaattttgagggaggccctttgtgatagaagggcttccctcagctcagttggtaaagaatcggcaatgtaggagaccctggttggattcatggcttaggaagaccccctggagaagggataggctacccactccagtattcttgggcttccctcatggctcagctgataaagaatctgcctgcaatacagaagacctgggtttgatccctgggttaggaagatcccctggagaagggaagggctccccactccagtattctggcctggagaattccatggactgtatagtccatggggtcacaaagagtcagacaggaccgagtgactttcactttgtgaccagaactctaactccagtctctgggctgaccctgcacaccctaaacttttagcttcatcaacttttttctgttcctcaaacacatccggttctctctctgcaggctgttgcacttgctgtgacttctgtttaaaatgcctcccttccaggccccctttcttaactgtttcatcctgtacatctcacagcctcacctaagcagaaatcatacgctgggagaattgccggtctctccgtctaggctgagatctctgggaaggcgtggccatatgcacattcttttctggcctccactttgtgtcaatgaatgaacctcctcacccaccaatggcattgccactaacatggaacctgaatacgtgttagttgaatgaataaatgaaacagctctggaggtatgatctcacccctctatgcaccccaggagaagattctgggaatgttcttaccttcctgcctccctccaaacttcgcaaatgatttttttaagggacccagtccatgcagggggatctctctggtggggggagcctccaggattgaagggtcgggggaggtggcagtacattaggcagaaaccacttgtccaggggttagtagaggcctctggagccaggggagctggaggcaggggggacggggcctccagcactctggacaattgctataaaataaactccataatcaggtaaatgcgttcgtgccggggatggttcccccgcagctgcaggcgtcccccacccccccggccccggaggggacctgtctaatctcagggtaatgaaaacatgggtccaattaccgtggagggccggggcctgagccgcggccggagtggggagctgggccccctggcagcggaattagaacatttaagctgtcaggccgaatccgggaaaggcctgattacctggcctgagaaggggccgctttggtttggtgtcgactataatttcctggccgccggccgtgaagccaggggccacctttcctcctctgcgatgggggtccaagccctgcatccctgacctccatccctctggacctgcttagagagactggccttgggcctcccaagctgcccgtgtggggcagaaagaggaacaggtacctgagcgacataagccgggtgtgtgtaatacctggacatgagttaaggagggtgtgcgcatcagccacgtgtgaacgacctcatgtgtgaggtggatacggaacatgtagtatggatgtcctgagtctgtgtgaatgacatttgtgctctttggactatgtgcagctgctccagcacagaggtgtgtgggagactcatacatgggggctgtatgtacaggattacctatgcagacctgtgtgcacggcagggctgtgggtacacaggttacatgtggtgtgtgttcacagttgtaggtcctgggctataagcactgtgagaacaagaaccaagttcaccacgctgactgctggcccctcagcactagctgggtgcctggctaggtgaatagatgttgattatatgtaactgttgaatgaatttacatctgtgtgacagatacacactgggagctgggtgatgtatgtattaaattatgtatgatgtatgatgtatggagccgggacatccctggtgatccagcggttaagaatctgccttccaatgcgggggacacaagtttgatccctggcgggggaactaagatctcacaggccacagggcaactaaatccatgcgcctcggcttactgagcctgcaggctgctatgaaggcccagtgcagacaaaaagaaaaaagaaaggaagaaaagagacaagtcagtctctgaaaataaaacaaaagtaggagcagagggaggctgtgtggtgtgtgtgcctgctataaatgttgcctgtccccactgtgtgatgtgggggcaggaatgatgaatactgtgagggtctgaacatgaactgtgtgaccacatagacctgtgctccaggcgggcctcctccccttagagactgtgtgatctccagcaactcatttaccctctctgagcctggcttttctcatctgtaaaaggataataataaacacagcgaactttca

SEQ ID NO: 26875 - DNA, 769 bp, Bovine  19866881402011
  misc_feature (1)..(1): n is a, c, g, or t
natgtccctggagagaggtctttcagcaactgtcagcatgatacccttttattcaccaaaacactgcttttaacattttaaactatagggcagtagcataggatgaaatgagagcatgatactgaaatctctttctaaacttagtgttattcaaatgtcaggtattaggagcagttgtaaatgtatgacaattatgaaccacaaatctgtatgatactgttgaggaaaagaacaacattaaatctgtaaggcacagtgtaagaacctaggtggtcacttcaggatgataaatgagctcggtcatctggacgcttagccaaaagcattgtttgaagaaccagagattggtttcagttgtttccctaaggacacaatcaaccactgtaactagcaggcagagagtgtccaactctcatttgtgaagataactcatttgaacatattttcatcaacaattaacctgttacctcatactaagcagtgcacacacaaaaaaatccctctttctgcttatatcgttatcactcttgagctataaaatcagcaaaatagcttaaataagccttggtttcaaatccagaagttttacttttatagaagccaatgggcctttctattccaagacgtggtccctttgctcaagacctcaccagcaacttacattcctgtatcatgcaaaaactttaaggattcagccttctttccatgtctctcagtacctgtcatcacccataagcctatctgacaaggaaactacattttgaaatag

SEQ ID NO: 26876 - DNA, 2472 bp, Bovine  19866881580524
  misc_feature (1)..(1): n is a, c, g, or t
ncccttatagctagttggtaagaatcccctgcaatgcaggagaccccgttcattcctgggttgggaagatcttctggagaagggataggctacccactccagtatttttgggcttcccttgtctgcctgcaatgcgggggacctgggtttgatccctgggttgggaagatcccctggagaagggaaaggctacccactccagttttctggcctggagaattccatggactgtactttgtacactttgtatatatgatgctacatcatcccttagccctctgtctagaaaataaaccataaataaatttgcattaaatatttgctgggagtccgattggtctttgatttcttaacataacataggatcccagagaatgtacaaccaccaaagaggagggagtctaaatgacatcaaatggaaatctgtctttccaggaaagatggaacagagatgtcagcaaggttgaggatgatggggatgaggaagaagagattggaaatgtaggagacacacatagatttcttagggtctctaaaccatattaaggttgtttcacttcatcataagatccatgggaatcctttgagaatttttaaacagggggaagtcatctaggttttcaaaaaaggaatataggtttttaaaggaatctctctttggctgcaggagggagaatggattaacataatccagagtttcttaaggacgctctctgaattgaaaaaaatacaaaatatgtgtatatgatgagtgctctttagcaaatacaatacttttttttatcctttcatatgaaaagtataactcccatacaaaatttaacagtgtgttgaagtcaattcttctaaaggttgctgtgcaatggttgatgatcctcaccacagagcactcatggggcagtaaaatggctgtgtcatcatgtactcaccctcagcgacacagataatgaatgctattttgctagtgaatcaagaaaagatggctctctttaacgtccctcgttggtaattttttctaattcccttatgtgtcaacgtataaggagtatataagaaatacgttgtttcctacttcccaaaatcagatatatattttttacatgactgataaaattatttcagagaccttcatattctcaaccattcttcatctgcagcagacaggagaggagcatgaggagggagaaccagagcagtgcgaccgagttcctcctcctggggctccccatccagccagagcagcagggcgtgttcttcgccctgttcctgggcatgtacctgaccacggtgctgggcaacctgctcatcctcctgctcaccaggctggaccctcgcctgcacacccccatgtacttctttctcagccacttggccctcactgacgtctccttctcatctgtcactgtccctaacatgctaatgagcatgcaaacccaggatcaatccatgccctatgcagggtgcatagcacaaatgtattttttcatattttttactgatctggacagcttccttattacctccatggcgtatgaccgctatgttgctgtatgtcgcccccttcactacaccaccatcatgaagcaggagctgtgtgccttcctagtggccggatcctggatcctgtctggtgccagctccctttctcacactctcctcctgacccaattatccttctgtgctgacaacaccatcccccatttcttctgtgaccttggtactctgctcaaattgtcctgctcagacatcttcctcaatgagttggtcatgttcacagtaggcgtggtggtcattactctgccattcacatgtatcctggtatcttatgtgtacatcggggccaccatcctaaggatcccttcaaccaaggggatctgcaaagcattgtccacgtgtggcgcccatctctctgtagtgactctgtactatgggtcaatatttgggcagtacctcttcccaacactgagtgatttcattgacaaggacatcattgtggctctcatgtacacggtggtcacacccatgttgaacccctttatctacagccttaggaacaaggacataaaaggggccctgggcaaactctgcagtagagcaatgtttttcttacagtgacacccaacttttatttaaatcagaacctcattttgattcatctcttgtattggatttttccatttgaatataactcaaagctttaatgtcgccaaaccctaagaaaaatgatggcatgttgtatttacttgacaaatgttcattgaccagaatttcattcccttattagcagtactctcctggtgtggagaaaaaggaaacctctgcactgttggtagaaatgtaagttggttcagtaagtatggaaaacaggatggagaatttccatatgatttagcaatcccactcctgggcatatatccaaacaaaactgtaattcgaaaagatatatgcacccctatcatgttcatagcaaca

SEQ ID NO: 26877 - DNA, 1191 bp, Bovine  19866881906188
  misc_feature (1)..(1): n is a, c, g, or t
naaggaagtgttccggcacgcttttctgcataagatacattgttttaagaaacagattcacaggcgagatttgttacaattataatcattaacatagagtctaagaaaagtatttccatgagtaagctttgttctgtgtattcatttgctcctaaagaaaggccaggtctgaaatattcaacatggaggcggaggtcggtaagctggaactaatgttccagaaagctgactctgatctggactacattcagtacaggctggaatatgaaatcaagactaattatcctgattcagcaggcaagaaaaatccagttacacttttaaaggaattgtcagcaataaagtctcgatatcaaactttgcatgttcgctttaaaccaattgctgtggagcggaaagagactgagagccgcatttgtgctactttcagtaagactatgaccttgatacaagaactgcagaaggaaacagacctggagctgttactgctgactgaagaagagaaaactgcggcagagcaattaagagctcacatgtcaaacttatgaggaagaaatggacttgcaaaaacgaactctaatggggaagaaatcaatcccagaaatttaggaagacgtcttgttaacattgatgactattggtcgggagatgaaaaggagatttggcttgggtgactggttagtgatgccttccacaggagagggggatacgagagaagggtagatattgtattaataaaatttagccaaaggggcagaatggaaataaagagattttaaaaatatatggacacatgcttagtcatttcaggcaaggaagtcccaacactattttgtgtctggttttgtataactgggataacatagatgtcctaactgacctattgcaaaataatattatgtactatcagtcagtcagatgtgaatgaacatgcttgggaaattaaaagttagaataatatttgtactatattatacatatgtaaataggcttccttggtggctcagatggtaaagtgtctgcctgcaatgcgggagacccgggtttgatccctgggtagggaagatcctctggagaaggaaatggcaacccactccagtactattgcctggaaaattccatggccggaggagcctggtaggctgcagtcccatggggttgctaagagtcggacacgactgagcgacttca

SEQ ID NO: 26878 - DNA, 1177 bp, Bovine  19866882242522
  misc_feature (1)..(1): n is a, c, g, or t
natggagagtaacatgctctacactgtaaatttacatgatgttaacatgtcaaatttatacagtaaaaaaaacttttaatgtaaagttattttagattgcacaactgtaaaatatttacggccctgggaacctgattacctaaaaggtaaaaggctagaaaaattacaagacccaaaaaaaaaattactaatttttcatttgaaacaagagtgtcaggctcttggatggggtgctgaatataatgcagtctcactgaggagaatcaagtctgttgtcttagctatgaggacaatgcgttgttaaaacagaaggtcatgtttctgtgctccaattctttagcacatgagcaaataaaatttaacaaagggaagctattagaaatagctgggtgtttggcatattttgtgcattactgacattcatttagttttaattacttattgtagaagaggaaacagtttttctccattggtaaaaaagcaagggatattttcccatagcccatttgaatcccttggcattttttttttcttttttcccttggcatttgatagtctagtttcatattgagtagacggctatgtgagtttttatgccatttgcccctgggtaagttccaatccgggaacttgtgttttccctttgagaacctggcccgttagttttgtgccataggatcaattaaagcagcaatttttgtacccagtttttctaacaggagcattttgcctctttcttttgaggttagattgagtgttttcctatgggaaatccgctttgaaacacattttccttcttaacaatagaaaggttatcacctgcacttccttgcagcagagatggaatatacatgaggtgtatacagtgaaacgggtctcttttcttttttttttttttcccctcttagtatttgcttttccttccctgaagacgcaggcatgcatgtgtgtatgtatgttcctgcagcattttaaagcaggtaaattagaagacaaccttgttgtattagcctagacaagtacatccatcactgactactgaaccttctgcttcctggtgtttccacaggagtctccccaggacagtgctatcactcgtgatattaaccggacattcccagcccatgactactttaaggacacaggaggagatggacaagattctttatataaaata

SEQ ID NO: 26879 - DNA, 1312 bp, Bovine  19866881611582
  misc_feature (1)..(1): n is a, c, g, or t
ncatttggatataaccaagtcttaaacaaaattttgctaaaatttttaaactaaatataatacttagtaaactatttatatcataataaatataaagcttccttttcatgtgtttgttagccatctgtatgtcttctttggagaaaagactattcagttctttggcccattttttgattgggtcgtttatttttctggagttgagctgtaggagttatggggagggaggagggaggagggttcaggatggggaacacatgtatacctgtggcggattcattttgatatttggcaaaactaacacaattatgtaaagtttaaaaataaaataaaattaaaaaaaaaataaagcttccttttaaggaatctttaccagagcaaattcatgcaacattaaaccttactgtagagctttctggaattggcccgataattctgtttacagaaattgtggaactttggtttgtttcattacagaattagaagttacactaatgactaagaaattgccctagctgcacgtgagtaaaaacattataaaacaaaaatgactgcttagcctggaggttcccaaaattttttgcacattagcatcactttggagtctttaaaagatttcaaaactaaagacccaccctagaccatttaaatctctgatggtgaaacatagacatgcttttttttttgtattttacttttattgtggcattccagctgattataggcaagtttgtgaatcaatggcttaacatatggttcaagtttctgtcttacattagcattaagagcaggcactctgcaataattttaatactccaccaagcaccattaaagctttattttcatgtctactaaatctgctatggagaaagatatatctttggaaatcctaatgtgcatatttattatacttttagtattgctgtaacaagtggcaaaagtgtatttatctgtcatggaaatagccacatctgactagacatgcaaatgtatatttacaactgtttagcctcatgttgtaatactgtataaataaaccccatgaatatacttaagtattccagtttatagtccagcttaatataatcacaggttacttttttttttttttttttattcctgtcattctttatctactctcttcatgtaacagtgtatgagatctcactccatgcatggggaaagacagaaaaaaaaatgtaaggaagaaggctggaaggatgcctaaggctactccagctggaccaaaccacattttcaaaggcaagaatgtttaacaagatcctctaaaatatcttccacaatcaacaag

SEQ ID NO: 26880 - DNA, 1882 bp, Bovine  19866880418410
  misc_feature (1)..(1): n is a, c, g, or t
ncttgtgtttgtaaacatttgagcacttcaagatgaataactctgtattaatgttaagcatacctcctaccaagtgggtttagttttgagtctgccagaatcagctgtcttcttgcgtctgttgtcttcaggtgaagtttttggtagtgaaagtgatggcttgaacactgaccataacaaggtttattaacagctaaaccttgacagaataagggagcctcagagtccaggagcagggctgtaggtgaaactgatacaaaataacttggcctagagaccgtaggctggcatcctgccctttcagtcagagttccgcacggccacaaccatgtgctgcggagtttctaattaataagctgtagtatatgggggtaatttttattataaaattgtgttaagatctgactgatctaaacgtgtgttttgaagatttccctccgtctcctaaattgaaatggccacacctcattcgttgaaaagggtagtagtttgacattattttgagttctgtatgttttgtattgtagaatgaaaatattggaaaactgtcttcccctgttctactatttaaaatatttttctaactttagtttctaaaaactgtgtagataggtttgaatgtagttgagaattttagggtacaacaataatgtaagcttaaagcatgttataggaagcgtgtgttcatacctaaattcagctttgttatttcctaaaactacatgcctaggttattttatatgtaatagtgggtgaaagtgaaagtcactcagttgtatctgtttgcaactctttgtctgactcagtccatgaaattctccagtcaagaatactggatgtgggtagcctatcccttctccagcggatcttctcaactcaggaatcgaactggggtctcctgcatttcagacagattctttaccaactgagctatcagggaagcccataataatgggtacatagccttattcaagttcattctttgaattttatctctctttttgcatattttgtagacatttttaggaatagaattttccctttctgaatgaaatatagctccagtttatatcttacattgccttttccagtcatctgtcaaacccataactctttgatcattgcattataactttgatattgcagaggacagtgaagatgaaaaagaagatcataaaaacgtgcgccagcaacggcaggcagcctctaaagcagcctctaaacagagggagatgctcatggaagatgtgggcagtgaggaggagcaagaagaggaggacgaggcgccgttccaggagagtgcgtaacgtgccttgtatcttggtcgtggctgtggtttgtgacctcagttttacttcagcagttttttggatgctcagtgttaaaatcagccccttaaattagatactcagtgtcattagagatgattgtttgatatgtatttatattttaagactcagagattctcatgattattatttgattaagtacatcaaatagtactcaagtactgattaaatactcaaatagtgataaagtatatcattcattctcatatactgaatgaaccattgttagaatagcagttacctggtgggtactgtgattaaagatctgtattttgtcctagtggagaaaggtgtagacatctccttgcaaaaaaggtgttaacggaatttagatgtttcacgggttactcagattaactaatcatatgtgtatttgctttgtaggtaggtttcttactttgtttatagttgagccaaacacaccaaatcagttcacctgcattttcctggtcttatcaggactatatgggaaacgtagaactaccaagattatttgagacttcagtttttatccacattaagcctaatctctt

SEQ ID NO: 26881 - DNA, 1455 bp, Bovine  19866880421302
  misc_feature (1)..(1): n is a, c, g, or t
ntggccgtcggcacttccgtcgatttagctctgggtggtcctggctggggtggggctggcctcttttatacgtgtttattttctatgtgtgtcctcgcgtgggggaggtcgttgtggctgtattttttaaggctctggagtgttgtgtgtggtttctctccacatcccagtctccccaggggcacttctgagaagagaggggatctctcaccagaggagcgagaacctcctgggaacaggggaggggagtgcctgccagttgctgtggaccttcccgagaaataaatcctccagattttcaaaccaccctgtctagtgttgatcgattaggctgtttccatggaaaccaccgagttgctcccaacattccagcattctgggtaacacagactaggcctcacctgtgggcccgagaccttcttccttcctctcagatctgacgtcggacagatccagccttcccgtttgctttctgcagctgaagcgctggccttggtgataggcgggtgagatgatgcccaccctgtctggcccccactgctttctaggaggaggggaatcagagagaagcctctggaggcccggaggacagcagtcatgcccaggcatggccacaagagggcagcggtgtccttactcagcacttccttgggtttcagtcgcagagaggagcatcagctggagttggcttggccttattaatgctgtgtagccagagctgaggttcccctgctcaccaggagctggagcatagaggccaagccctcagtgtctgccttgacagggaagggcacccatggaaggcgctggattcccatctggaaacctgtgggagcttggtgggcccacctgagtccccttgttgtgagcaggagacgcccccggcttcatgcaagtgggaggggtgtagcaaaagcacccccgccccaagacctggctcatagtcagtgctcctgtggccagttcctgtctctctgggcctcagtttctgcatctgtaacatgggtggatgaagggctctgacatctggttctgaaggtctgagaagtcaagtcacagctgtacccatggccgtgggcttcaggggcctttaggggtgagggactgcgcccttaattggatcagagtgcgtgctgggctggcacctccaggagggcagccagacggctcagcttcaccttctgtaaccaggcgggagtctcaccccgtgaccttgcagggccttccaacaatgccattcctgggccccgcacccaccttctcttccggccacacatgcacctcccttggtggccacgggctgctgggccaggaacccgcattcctgggccccaggtggggggggctgccaacatttcacacattcctccccaaggtcaggcgccttctctgcactggttcttcaatgtcactgccagccgcagtccacacagagtggagggggaaagggggaca

SEQ ID NO: 26882 - DNA, 1016 bp, Bovine  19866880447548
  misc_feature (1)..(1): n is a, c, g, or t
nttagctcatttagtcttcccagtaaccccacgaggccagcacaagtgagaaaacggaggcttccaggtggaaaactgaggtttacaacatgaaaagcaatatccccgagctaataagcagcgagacagggactgaagcccaacctggacttacgctagagcccgcgagcagttggtccagttctctcgcctttgctgggaaggctggaggtcagagaaaagaaggagatggatcctaacctgagaggccgagagggacaaaattccaatacggagtcccaggcagtgtttcctccatcccagggaatccctgcctctatgctcagggggaagaaaaagcttattttatgagatgggaaccgatgctgtcttaaattagatgttcattatggattttttttgcattaattttgatctttaaaagtattacattaaaatattcgtcttggtgactgagtttcttggcaccccattaagtacggggcaagtatgttactcacctcgccctaatcctggcttccagagaccccgacactgaccaccacccacattccctcactcagcccctatttcctcatcacgtgggaagaaatagctatctcttctctgcctgacaaacaaggccaaaatgagaaccaaggggaggagaggctgaacaagcaaaccacagggggccatttcttccaggaatcatgccagatactcccagacttcagtcttcaccctgccacaccagcaaggatcatcatcccctgtcacagatggagaaactgaggttcaaggtcagagttactcacctgaggtcatgcagccaggctggactggcagtccaaggcttcacgcactgccccaccctgcttcttggccctgggctcctcttgtctggtggagagcttgggttaaggtggtccctgaccactcactcctctcttcaggagtctgaaagccacctccttctcgggatgtgaaagtcaatccaatccaatctgtagcaaaagcaaatggactctttggag

SEQ ID NO: 26883 - DNA, 1825 bp, Bovine  19866880480884
  misc_feature (1)..(1): n is a, c, g, or t
ntgctctggatcttctagctctgagtacattcctggtatccacatgacatttcctcctgtgactctcctagctctgacgccctcccccaggaagaaaagcacctcctgggtgcctggaatggtggagtccaccacagctgttagggtggtctgcatagagttcttacctgcacgagcagaggggagtcccaggggagagtgatctgggccaggggagcttctgtctcatttttatattggattattgcatgggatttcaaaatgtttgaacatgaccgagatggtctgatcccttcactgacagatggggaaactgaagcccagggagggcaggtgacatgtcctggggctggttagtggcatgcctgcaacatcggctcctgacttgaccacccagcgtgagatgaccaggactgagtctcagactgggagctggctctgggctgagcccgggcttgcctcagtttgctttgtcattccagcagctagctccgactgcccttcccagagctccaggcacactgagagtgggaagagtcttcgagaacaacccgcacccctgtgtcctcactgcctgcgcccagggttcctgagtgggtgaactacactacattcgaggcttttcctttgtcaggaaaactgctcagctcatcatcagggtgcaagcattcaaaatcccggctctgcttgcttccgagccgtgtgacctctctgcgtctcagtttcctcatctgtaaagtggggattataataactcctaccttgtggggttctcccagggttaaataaggtgatgtgcatgtcagctgccacacattgtcgtgttaccctagtagggctggctttgtcacggtcctccttgccctctcctggggaaggggggagtccctccatcctgggtctgtcctgccctgaggaggagaacggcatgtgcttgatttcctaagccctttggtctctgcctcgttcagagtcccagtctctcctttagcccctgatccagagaagggctgccacctggccacgtgccagaggcctcttctgtgtgatgctgccctcccagcgcctgctgcacctgcctgctcagagcagggagagagactctggttgcaggcgactcctgttcctgggctttggccaagccgtgcaggagggctgggcagggaagcgctttgtctggcagagtgggccagagggtgtcaaggaaggggtgggcacagcataggatttaggggaggcggcgccccctcccctcagaacccattcctggtccctgccgggttctctggaaggcttggtgggatggtgagccaccccaggcctatcctcaccctgccagcccagcgcagcttctcctctgtaatctaaatgggtcatcctccagctcctcaacctgccttccagaggcagctgctccgtgaaaggccaaaaaggagtcaaagatcttggctccaactctggctgatagctatgaccagagatgcccagcttgtagcttctctcttgtcatctgcagccagtacctgtaggtcatctttttctaaaatctttctgccattctctcctgaatgcatattattcttgatctgagttcctatggggattagaaggagagaaggcagtgttttaaccaattgacctcagcacccatctgtccaacatgtttgtctatctgtaagtgggttgatggtggctggtggtgcacagcccagcccaagccagggtgtggggcattcccttctccaggggttagaggcaggccagaacatctataaggaccttttgtcttctgagatggtagcttctacacgcagcaaccctccat

SEQ ID NO: 26884 - DNA, 1637 bp, Bovine  19866880485048
  misc_feature (1)..(1): n is a, c, g, or t
ngatctgagcttaggacacggggtctgagtggtggaggccccccaaagagttggggcagggtgctcagtgcctcgaggccaccagcctgagaatccagtctccccgctcctgtctggggaggcctgcgcatggaggggcaggggcatggatgatgggcagtaccggattcttggatctcagtcctggaggtggtggcgggactctccgtggtggtggtggtggcggtggaggctgtagtggctgtggcttcggtggtggcggtggtggtaggtgcgacaggtgggacggtggggactgttgtggcttcggtggcggcggcagtggcagtggcatcggtactgctcaccgtgccaggcgcgcccaccgtggtcgggggcgacgtgggaggcgctaaggggaaatgtaaaatagccgcgtctggtcggtctggctgtcccaaggctggacgcacagccctgcgtgcaaggcaggcagcccatgggcctgatggagctgagtgaccggagggctccccaagcaggacagatgggtcaggcaggtacagggccacgggaagggaagagaatgaatcctgagtgtttcattctcttctcccggcctgtgtggctcaaagctcccagcatgcacccagccaagggcagtgatgaagatgacacatgtagtgagtcgctcagaccccagggatgacatggagtcccaggccaagcgccacccagcagaggccaagcagcatcactcgggtccaggcctggggcctgggccttgagatgggcagctggcagggccccatctgcaggggcaccaggaagcctgccattcccaaccgttcactccaaaacgacacttcctcccgcctgcctgagttctaataccacccaaacccaacgacagagagagaagcatccccactctgcgggcaagccttgtcccgtgcttcctcttttctgcctccactgtcaccccttccccaggctctcagctcatattcatttcctgcctctcttcccgtcttctctgcccagggatggtccttcctgcaattaccccaatccatcctgggggcgacaggggataagatggttgaatggcagcactgactcaatggacatgagtttgagcaaactcagggagatagtgaaggacaagggagcctggcgggctgcagtccagggggtcacaaagagttggacataacttagcaactaaacaacaaccaccaccctaacttgtagtaactgcctttctctctaggacatttgggtcctgggccccgcctccccagtccacagtaaatgcagaaatcccaagatatgagtgaggcacaggcggcctgctttttcgcataaatcttcagagggcttcacatctgccgtaactcttactttctcatctcccattcaaagctaccttttgacaggggtgagccgtagcgggttaagtctatcgtgacaatgtgtccatagaccctctttctttctacagaagagccgtggatgctaacaaagggctggcctattactctttagttccagtactgctaatgctgagaagaatgatgggaaatcaagagagccagggataccgctccttatcttctatctcctgtgatctgaccagcctactttctggtaacagg

SEQ ID NO: 26885 - DNA, 1127 bp, Bovine  19866880493943
  misc_feature (1)..(1): n is a, c, g, or t
ncacgctgtactgcataatgatggtgctgctttactggaattagaaatactgtgctcgaacgtttaatatcttgggcactgaacgtgcctcggttcgtttaatctttctaacaactctaagagctaatcgtcaccattttataggtgaagaaatagagacttatgggctaaattatttaccccaaattacacaattagtgaaaggaatagctgtaatttaaattcagatattctggcttcgatgcctatgtttcctggtctttagtcttggaatcatattgttggggaaattcattattacaaatacatcaaaaatatttctgaaaactgatatcattaattgataaataatccaatcatcaactaatttcctgaagaagtaacacttgtaaccatcagatctcttcttaaatatttcagataaattggctttttaataagctttttccaggtagactattttgtgctaattctggcctacttatctatcaattcagtttagttgctcagtcgtgtctgactctctacgaccccatggactgcagcatgccaggcctccctgtccaccaccaactttctcaaactcatgtccatcgagttggtgatgccatcaagtcggtgatgctacttatatatgtgtgtgtgtgtgtgtgtgtgtatgtgtatatatatatatagatatcatattgaatgtgaaagtggattgtgtatgcggtattatgtcatactctgttatggctaactctaaaacactgggctgttttctagagccagaaagcacagtaatcattttgtatcctcattaaatcatcactcatccaaaaatgtactcgcttttgaaaataatctaccctgactaaagccattcatacttgcccataaagaaatgcaagtttgtttgcatttccacaagaagtgtattttacagtgcagacccaaacctagccaaaaaggtcataggctgacacccacaattacaggcaatcaaaggggtgccacacgctgggtttcccacccttttttcctcttattctcccgtgacttctaactgttggactctggggagtctagaggcagtgaagctcctgggggtggggacgaaattctctccaatcactaatgcaatt

SEQ ID NO: 26886 - DNA, 2425 bp, Bovine  19866880518817
  misc_feature (1)..(1): n is a, c, g, or t
ncttcctcccatctcacctggcctggggaggagacctccaggactcatcctgcactagtcctttgctcaaagcacacttgccattaaaatggacagatgacaattctgttaagccagatacaaaggcccgtccagacctgagcggaagcatgggcgcaggacaaaggcagtagccggacgttgcggcccggcctccccagttctgtactagctcacagtggggagtgcatgaggcttggccaggtcacttcctagtccgggccttgggcctcttgttggggacacgggcgccagaacaaatgctgtccaaggcccattccaggctgcagcccagagatgtcattctaggtcctgagggaaaggcccagaacatcgctcccttcaccctcctgtagttgagtctcaaatataatacaactgccccgtgtcatcatcattttcagggctggggtggggtacaggcagatgggaagctgagagcagagctcattgcacagcaagagggagcctggggctcgctttcagagcaaaaaggtagaaacgcacatacaaagaacacaataaacctgagttgtgcagctggatgaataaaacgctgctcatcaaatgagtgtgagtgtgctgggcggtgctcccgccacaggcagagctgatgggaggacctccacgcggtggcctctgagcccagctgtcagccctgagggcaggaaggaaaacccaccagacaggggtgctgtgcgtgagcaggagtgaaggggaccccgcacctgtaatcaaaggagccatcctcttctttggggtcttcagggccgaggggcacatccttcttttctcgcacttggtcaggaagagaaacaaggacacagaggtgatgactggccccaaaggaacagccaaagacgctgcctctgggttcaatacctctttctcgatacagcaccacccacgccctctgcttcttgcctcccgcttttaagcaggttccaggctaattctgcctcctcgccatcatctccactgatcactgaaatcttccccaacctggctcgcctcagcctctccatgaggtctttcccaaacacctggacgccgtcctttccttggcaactttcctttttgccacactgtgtggcaggcgagatcttagttctgtgaacagggatccaacccacgccccctgcactccttaacacggagtcctaaccactggattgtcaggggaattccttggcacctttcttaatcctgctctgtgtgacaattacttgtgcacatttatgacgcctgtaatagaatgccagttctttccttgagggtgggaactgtgtgtctcttcaaagctcctgggagagtgtcctgggcagagaggacacgctgtacacgcctctggaatggaaggcgctctcctaactgggaccccacttgtctgcgtgactcccctttcccacaccgcccgtgaatggccagcactcctccaggccctgtctggtgctgtgcccctcctactgcaccagctgccctgtccttgacggagcagtcacttcttctagaaccctttgcacccagcacaagggctggtgcaccgcagacactcaggtgaatgactgtgcttctttttgaggcacaaggcaggataaccaccccctttttcgcggagggaagctgaggcctggaagacatcgcataacaattagcaactaaacaaaatgtcgaatggacactggagccactggagccctggtctcatggctcctggctctttcatcttttgatgtaaggaaaggggcataactggaagaagaactttctgaaatgggcagaggaaggtccagagttagctgatcagttctcaggtgtcccagttccacctggaacaaggagtgagatcagagaggccgcccttcctcagcctttcttacagaagaaaagcaatcccagcacagcacaacaaagtgaacaaatcgttcaccaatgtgcatgctaagcgctaagtcgctcagtcgtgtccaactctttgcgaccccatggactgtagcccgccaggctcctctgtccatggggattctccagacaagaatactggagtggactgccatttccctctccatcattcaccaataatgaagtataatttcctgccgttcctgacttgaaggagtcctttagaatcctagggtctgagagcacatgggtcagaggaagaaaatagaatagaatctcctctctctgagttgagttttaggagatcgtggagaaggacttgttcacagagatggggagaagccagtgcttggagagcacagggtgtatctggtgatggctctgggggcagggagcaatttcatcctgcagtccagctggacttctgctctcagggtcatccattatcctgtctcctgtcaccctccccaccccatcacagaca

SEQ ID NO: 26887 - DNA, 1601 bp, Bovine  19866880526114
  misc_feature (1)..(1): n is a, c, g, or t
nttctatttagaagaaggcttaagagcagaaccactgccatggtcccctggcctgaacctgtcccatgaggagcccaagcaagtggctgagaaggctaattgtatctctgtgtatatccccccaggggagagtgggcagatgatagagtattggttaagccaggctaagcttggtggttggtgtgtgtatgtgtgaattcttcccccgaccagtatcccccatcccgtatctccagctaggtctgggaactattctttaaagcttaggatgtaactgctacatattgcaccttcagattcagcggatgttggggcatcatagttactatgtaactggcagagctctcccagatccatccccatccacagacttcaagagatagggactaaggagaaagctccagtcctgggaactgacctctaacatagctgccctccagaatgtgccctggctggctcctgacccccagctccgtggcacagagtttacacacaccctgcagggttgtagagacccacagggctggagtctctaggcaggccccagaagtctgggccacagtgctctcctgggaaaaagcacagtcttcctggccagatgcccaactgcttgggagctcagactttccctgggagtagcctcctctctcaactccttctcccaggctagacaggaatcgctctggggttggctgagcaagccagactcataggacccgcttgacacaaagatgcaatgtcacagacatgcgtgttttgacacacacccagctgaagggccagtttgatgaaccagccgttccctgcttttccaggagaacagacaaggcctgtggtggcaagcgggccgctcccacacgtggagatgagccagctggaataggctgaccgccaggagcccagccagtcaattaattatcaaatatgtattgattgtttctgcgtacaaggcccaagcctgaatactctggacaggaaatcaaagaagttgagagtgatgagtgtctcagctctctgtggattacaaaccactttcctatgctgttatccctcttctgatcttctgggtattatttttcaagtctatgcgtgaggatgctagtaataaataaacagcggattccgtctgttgagtgcttgcttgcttgtcaggctccgcaccagctcgctcagccagcccgagagctgtcacttgtttctatctatttctcgccccagccctgtgaagttgctgtcattatccctcttcatatgaggaaactgaggcgcactgattgaataacttgccatggtcacccagctagtaagtgttggggccaggattcaaatcccaaacttgtgtccttactgaggtatctgaaagagatttgccgaaggtcaccaggcaaaaaagtactgagttctgaaccagggagcctgacttctcattcttatccagtgatgtcttggaattcataggctagttttaagaaggctcagaagcctgaacttccaaggagagggaggtgagccagtcctcttggcctgaactcattgctcctggaaggtgccgggagcaccggcgggcagcatcctgcccccttacagattctggtttgggg

SEQ ID NO: 26888 - DNA, 1747 bp, Bovine  19866880554968
  misc_feature (1)..(1): n is a, c, g, or t
ntgggactaaggcccttaatgactgaaggacggctctcagttggagggggagaggcaacgtctcatgtcagtgccaagggcctcagaacacagttaccccatgggctggggttgccgccccagcaaagggctcatctgggcccacatccaggcaggaagtggtggtggggctggggtcagtccaggagatctgagaagccacagtgaaggcagagcaaagattagggccatcattatggcccaggagaagcaatcttcttacaggacctcctgagccctctgacactgagggtttgagggccctcaagcccatcttctcgctcctcagagagacccttcctccagctctcctcagacagaggctgagacctatgcccttttgctcccagccttcctccccagcagagggtcatgtgtgtccagggtggggaggagctgtttatgaactctggctccttcatttatgggttttattggcctcttatcaagcagttacctactgacgcccataacgaggcagatgactggtacagatgggaaagttcatgcctgcctggattgtgtgcatttactggctctggcctccccctccctggtcagcatcaaagtcagccccacctactccggtaattggaaaggagaatgaactcagggcacctcagggcacaggtcaggggccactggggaagaggctgtgacctgagtttgggaagattctaaggagggtccaagtgcagagtcagagccctcccaggtgtctgcagggcaggctcttgctgtctgccccttccagccctgagatccgagcttatcacatcaacacgaacttctcagacctaaatttaactacttagccatgggaattcagcagcagaaggaagcaggaagctggcgctggagtgcttgctgtggtgaaaggtgccaaagggctccttaatggtagcagattaaagtacacacacatgcgtgtgtacgtgtgcctgtatctctgtacacacgtgcaggtggggcacacgcaggccacggcctctccctgccagttccaaggctgtgagcagcaaccgaccctagatctagactccttcaaccttgtgacgttgagggagttagaagactggttccagctgaccttgctagccatgggaccttgtgcaagacactccttatcatgaggccgcagttttcaacccacagaaggaagtgctgacatggaggacggctgaggtccttaccgggactcaactcctggaacctcctagagactaaaagatgcttagctggggccagtgcagacggtctggggaggggtgggggagcaggtttacacaagaagtgaggctcaccttgatatttccgttggcatctaagaggatattctccagcttgagatcccggtggacaaccccgttctgaaagagggagggcaggggtcaggggaaggccatcaggggagacggacatgaagacctagtctggacagtgaggaagcagcaaaggcggggtacgcacagataggcagggagcccatctttatcggtacaacaaaccataggtccttccaaccccagccaagagacttgaagccagagatgccaacactcctgagtggagaagcacacctcgcctttatttctgtgtccccgtgtggtcctggcgagccgcggggcctctctggggaagccagccccggccagcggctcacctggggcagtggtgcacggcggagacgatctgccggaagaagtgc

SEQ ID NO: 26889 - DNA, 1485 bp, Bovine  19866880561302
  misc_feature (1)..(1): n is a, c, g, or t
natcttcccgacccaggggttgaacccacgtctcttatgtctcccgcaccggcaggcgggttctttaccactagcgccgcctgggaagcctgctgtgtacatagtcgctttcttgttgctgttaaaatcggacagggctggacacacggggtggactgagtcattgttgagaatgagtgaccttgaccctggggaggagctgggagacggggagccagggctggtgtcatgtgttttccctcctgcaggtacgagcggctggaggaacagctcaacgacctgaccgaacttcaccagaacgagatgaccaacctgaagcaggagctggccagcatggaggagaaagtggcctaccagtcctacgagagggcccgggacatccaggtactatggccccgagaggaagctgggagtgggctgcttccgccccttccccttaatcaagacttccacttcccctcagcctctccaaatagtaagcattaaaggaccagggcccctagctgcagctgaccaccctccggaggggtgcgccctgagcattgtcacctcccgaggggcaggtgggggttcggacccggaggtctccccatcctaagctcacccgccctgtgcccctgcagatggccgtggagtcctgcctgacccgggtcaccaagctggagctccagcagcagcagcagcaggtggtgcagctggagggcgtggagaacgccaacgcgcgggccctgctgggcaagttcatcaacgtgatcctggcgctcatggccgtgctgctggtcttcgtgtccaccgtcgccagcttcatcacaccgctcatgaagacccgcctgcgcgtctccagtaccgccctcctggccctcgtcctccttctgctctggaagcactgggactccctcacctacctcctagagcacgtgctgctgcccagctgagggccccgtgctccccccagctccccactggcccctgctgctccaggggggaccctggggctcctgagtctgtggggcgtcttcacgtgtccagtttgacctcctgcccaaactgtctgtcctggcgacttctgcccccttctctgtgtgtgcttcttctgtctgatgccttttccttgttgggctgaagggagcgttgagtgtatctcccgcaggaggttggggagatgcctgtggccacgcggagctaaggacccggatggactgtttacagtcacagcagaacttctcccagcagacgcctggggtcaggaaggccgaagagagctttcctggtggggagcccacgctggagacagctctagccccggctcgtggagatggtcgggatgaaggcaggagcacgggtggcctccctggcccaggaggctccccagctcacccctccgtcctccagagctgggtcctgggtggggcccttctgggatctgaggatgccggctctgtaggccgggtgggtgcggctttgtgatggtgttttccctcttct

SEQ ID NO: 26890 - DNA, 1474 bp, Bovine  19866880586325
  misc_feature (1)..(1): n is a, c, g, or t
ncacctccaccttccgcactggccaccttcctcccagttctggaggagtcaccttggtaccctgacctggccaactgtaaggcttggcagccggcacgagttaatgacatggtgtcagtcgagttaggcaaactggggttaggacaggcaaggttactcccaaggctaccacggcgactcaccactgtacatgtcagggtggtttcttaaggacgagtcattataggggtggtctgcaataaacaaaagagggtgagcaaacaggggccacggagaggtcaaggaggcaaaaacgggggagaacaacagaaatgcaaagccacaaaacaaccagggagcaccagtggtctttcgcaaaggaaacacacagcatattcggaaaggaaatacgcttggtgaagaacaagcaacacaaaacagctcccagaagggaagaaaaggttaaaccctgcaaaagaaggcaatagtaagtttcttttttaataaagaaattaggcatgacctttaattgcttggtcatactataatttcaaacaaatgagatatgaattagtggtatcctgtagcaatttgaacaactcttttccaccaaaatcctctgttcccaggactctgggtcaggccagcttctggggtcactaaagagaaaggaatgttagtgagccctggggcaagagcaaagccccaccccagcagaagccaacttgcaaggggtgggaggtaaatgaggggagaagatagagacagatcatcaacagaatgggacaggaggacccttggtagtgcccagcaatcatgtgctgaccagcaacaagaactccccagatgggcactatcctggtctccagattgagtctgttggcagaaacgcctctttctgcggaggtgaggagtgattctgggagagggggacagctaggctgagcttcggagtttaggctcagaaagggagccagggacaggagagagtgcgtgagctgtgagttctacacttagaacagggaaaggcctgctaacaagatagaggttcaaagctctctggactagcttaggatgaagccatcccttatggaacaagaaaccagagggctctgatgttgggtaatgaaaacctttgggcattgaatcctcagtgagaaagacattttggaatggggcatatgatcatgccaacatccttaaggagcttttcattctcctaccagcgtctccttccagctaccggttcaagttttgacagcaccaacagagggtcgggatgggagcgccgactggaagccaagcagacgccctgagaagcctggacccagcccagcagcctgagggaggagaggctgccagagcatttgcatcttggaagacggatcaaatcctgttataactcatggcggggaggcaacaggagcaccagcattgctctgcatcccagagctgcttaacgtccactagaaggggtttcatattcagaaccatc

SEQ ID NO: 26891 - DNA, 2136 bp, Bovine  19866880644764
  misc_feature (1)..(1): n is a, c, g, or t
nttaatgttttcagctctgtgtttttaaaaaagcaaatcttactattttcaataatgtgaatgctgtgttctggggaattccactgtgacatctaagttctgtgtacatggaggtattattgcagtgcttccctactgattaaaggcgggggtggggatcttttgtaaatctacatgtcccactgcactatctggagggggtctctggctccctcactccacgccctgattctgtctacctgatggtccctcttccctcctgtgactagaaagaaccaccccattaaaaatgagaatggtgattggaaaatagcttcagtcattctgtttggggagtgggacacaaatctttgagttttctcctaacacacttccttggagtcgctggggtgaaaaatggagaccctgcttaatgaaagcaaaacacacaataaaaacccggctcttagctccaaaagtctcccggctatacctccatcagcagttctgcccttgtaagcgcacagaggggagagagccctggactgagcgtcccaacttgccctttctgcctttagcactgaagagctgggtttgtcaaattatagagcccttccattcctccccatccagctctgtccccggctgcttgaaggcacccccgccaccttcattctctccttccaaagaaatccttttccctttagtgcagggcagcttctcctttctctgcgcccaactgcctggctcccggaggatgtaaagaatgcctggaatgcccccctcattggccagccctctccaccccctgcagagcattccccagacgcctgttccattgagaaactcccaaggctctgagggccaggatgaaagggaggataagcacaaagtgcaggccagcaaccggctggctccggctccaagcagactccctcccccatgccttacccacctctgctgtgcacaggcccccaaacagcccccagtcctggccagctccagctgcccgctcccgtgcacacctgctctcccaccagcgtgcagtgcctgctggcgtggaccacctgccctctcctcccctttcttgcttgtgtgaagctggcaaagttgctgagtctgggaaggaagtgaggaggccaggtaatgtggggtcaggatgggagaggaagcaaactgttcaggctgcaaatgggatacttcagtctgatatctttgtttgtggtccaaatggatgccagagctctgggccaaactctgggtagacacaggaaaagcttaagagaaaatcattacccaagaagcagagagttcagatgtggaatcactgtgttcatttattcactgactcaggaaaaaagtgaaagctctgtgaaagacagaggtgattgctctgttgctggtgtgacacagaagatcgtaaccctaaagaggatgcagactgagcagcaagccagcatgtattaaaaataaagttcagtagaaaaattgtcagttcagataatggtgaaggggaaatgggggtggtggaaaagaataattgcaatttaggaggtaacgggctaccatttaagtgcttatgtatcaaacacttggtgatggtggtttaaccactaagtcatgtccaactcttgcgaccccagggactgtggcccaccaggcttctctgtccatgggattcccagcaagaatactgcagtgggttaccattcctactccatgggatcttcctgacccagagatcaaacagtgtctcctgcattgaaagtggattctttccactgaaccagcaggtgaaagtgaaaagtgttagttcactcagtcatgtcccgttctttgcgacaccaggttttccatgggatttcccaggcaagaatactagagtggattgccacttcctcctccaggggatctttccatcccagggataaaaccacatctcttgaaatccaggtctgggggaatgccaaatctcagcaggagtaggcgatgtgggatttatttagtctagataggctgtggagagttgggagaataccagtgtatatcagtgaatggaactacaaatgtacaggccccgctcttgtctaggcacaatggaggtagcagttatttctgccccaaatgccttccccttccctcgaaagcctcaaaagg

SEQ ID NO: 26892 - DNA, 3306 bp, Bovine  19866880657918
  misc_feature (1)..(1): n is a, c, g, or t
ntttacaaacacaagagattcaaattagggtttacaaggtaaatgaacagaagtgtatgtttacattatcacagcattactagatagtgcaaaaagttaatacaatttcttttcagacaatcatttagcagacttgaacaagtgaaagcaaaacagctcagtggagtgctctcctggtgactcagtggataagaatccatctgccagtagaggggacacgggtttgatccctgatccgggaagatcccacgtgctgaagagcagctgagcccctgcaccacaactcttgagcctgagctccagagcccgggagccgtactgcggaggcccgtgtgccctagagcccgcccgccgcaatggaagcccgagcactacgacgaagagtagcgtccgctcgcagcaacgagagaaaagcgcagcagcgaagagccagcacagcccaagataaacaaattaattaaatgattagaaaaaaatagctcagcagggcgaattcagtggaactttgtctacgctttacacattacctaaatagcatgggaacgcagaccaaaactaaaatgtttgggagcaaggtggaactctcaattcttgaacgaattaaactttaaaaaataaataccaacaacaaataatcaggatttaacatttaatctagtcagaatctcttcaattgattcttttaagttaaaactcttacaaaaaagctttctctgtggctactgtttcaaaggacctcttcccagcttaagaagtcagactaaaactaatggtttgtttgcttttcaacccatcatcatttcctgtattttataccttgatttcacttagtattatatatattctatatagtttgatatcttttatttgttcatgtaagtggttttcaatttccattatgcacaatttcaattatgcatgagaataatctgtaaatactttaaaaaaacaaagccccaacatcccacctagacctactgaatcagaagtcctgggatgggatggacataagtatgctaaaaaaaaaaaaaaaaaaaaaagctttcataggaaacggtaataagccagctggactaagaatcatcgtgagctctttgcagatggagacacttactgtttgtaatgtggtatttaccacagagcctggcattactatgaaaccgcttattaaaatgtccaataaataaatagataaatagaattacagctactacattaaaaattgttactacctgctgaatgagaatcatccttcttagtcttcacatctttttcttctgagtcctcactgtaagaagagggaaaggtttaaaagtcttagaccaaaatccaagtgaacataaatctctagaaacctgaccagagaagaatgctaaagaaaacctgttatacataaaataattcagatgctgaggagtgaaactgcttccagtatttccctaatacacagagatactggtgattaagaacaattttatccacttttggaaaatattgcttcctttgaagacccaaaggaaaaaaggaaggtatctcaacacaggctaaaagttttcacctatgcataagccctggttcacaagaacatttactaagaaaaaaacttcattgtcagagacagagtatgaatataatgaaaataaaccacgtaatgtattgacggtggtcaagaaggcaaattagtggattgcaccaaatataaatgcagaaaatacctttgtaattattaaaggaaactggagttatataaattacaaaatgccagaaatttatctaaagcaaaatgaaaataaattatctcctaatattaatatttaggagtatagtatgctgtacatcagaaatctcaacacataggcctgccttacatcatggagaaaataaaagcaagctaaagatcattgcagggtaaaagttaaagagtttcaaagttaaatggaaaattttataaaataattttttacgtcacaaagatgcacattttatatcctcacaaattttaacttagaaatctggtgtctagtgttctgtctttgtcataaattaattagctgtatgatcttaggcaattcacttggtactcttcagtgctaaaattttatgattccatgagaaattctgacaaacaaccaccaaaaaaacatacataaaattgtcttcatagccttctttttttcaacagcagatcctgtaaatcttttggtattcccataatctagatcacactcaaatgacaaactattgagcccaagattcctaagcaaagaaaaaaaccaaacacatttctttactaagcaatctgatctaaatatactgtaattttgaaaattgtgactgttctttgtattttatgcaaaataagcatttaattcacaagtctattacaatgatgaagaatgaaatcattttctctatttatcttattattgaatttatagagaccattaatccttgagccccttaaaatgaagtcaagtaatagctaaacttttaagtagagaccaacagaaaaatcaacataatactggtctgagggaataaacatatgagacaatacaaatggcaacaaaaactgtatttcaaccattcttggccccataggagagagtaataaaaccaaatgattgcaacaatgaaaaacgtagtctagatatcaattgtattgatgagacatgataacaggcaatgaagatgctcattcctagggaaagtataataaaataaatacaataaaagacagctctaagttggactgctgtatgaaactggagtgcagacttccctgatggcccaatgggtagaacctcgcattccaatgcatggggtgtggaactgatccctagccagggagctatgatcccacaagccttgtgaccaaaaaaaacccaaaacatgaaacagaagcaatactgtaacaaattcaataaagactttaaaaatagttcacataaaaaaattatttaaaaaaactggattagagagatatattaatgaaactatggaagagttatcttcctacagtaaaattttatcttaattttcctcaaaaattttccacatttctgaaattctccaggaaagaaaatattagaggttagtgattcaagcaaacagaaaatgctaggtgaatgtattaaatttagctttctgtgaattcagaatgaaagacttttactcagggctttattatactgattttagtgctcaaaagtaaatatcttagacgaactaatgagaactatcattttatttctttgaaatgctcatacttaatagtattgtttgggaagtggtatagtctaacgg

SEQ ID NO: 26893 - DNA, 858 bp, Bovine  19866880682258
  misc_feature (1)..(1): n is a, c, g, or t
ntccagggcagggttcgcctttctggccacccaaaggaggccttctggttacagtatcacctaggatctggtttagcttctgcggagcacgctgaattattcactaattatggatattggcccagctcggggtcccagtggtggggcacctgaagaggctgaaaaggacgcagcgagcacacttcccaaatctttggcctgaaggaaggccaaagagacgaaagacgcaggcgcagcaggctcaaactgtggaggacacgggcataggggctgcagcagtggaggggtagggaggcagagaacagtcgggcccgccgcctgtcacacccctggggcctgtcactggagagggaaggaggtcagagaaggctcctgttccccggaacttcgcccctgcccccagcccccgctgcagcttgggggagccctgggttcctcggagcctggaaggaatgcagtgcggtgtgtgcagcctccctgctcccgtttcagggtcctctgccctgcagcacaggtagaaagcctaaactgtgcctttgaagagcaagaagaggaggagcagggatcaggtaaacaatactgtatttccattgcctcatctggcaccagaggggaccagggtcaggtttcgcatcccagggatgggctggattcacagaggaatgtgcccggtggcggggggagacccgggccagctcctgtgacccggcccacaccaccagtgccggctccccatcagcgggagccgaagacacagcctcctcttgctgctgtcgtcagcgcaggcgttgggggctgacacccaagccctgggcacaccgccccctgggcactggccgggtgcaaggggctaggctc

SEQ ID NO: 26894 - DNA, 1810 bp, Bovine  19866880708345
  misc_feature (1)..(1): n is a, c, g, or t
ntaggtaatccacggagctgatcagcttgttagccactgcttgattaagccgggaaatgatgagctcctggatctgtcggatgcagcatttgatctctctggtgcccactggttctccattctcagggacaatgacatctatgaaggcacagcaaaaagctagttggttgtgaggggaatgggcaggtacactgaataaagtcggacccaaggagctagcatgctgatggctacaaaacacacatggctgactacctcggactctcagcatgcggggccactcgatcctcaaccatttcaggcatctaagagtcctgaaggagcacctgttgtacagaatgaacctcctgatcctgtcagctcttacaccacatttacagaagggaaggaacaacactcactgagtgcaggctatctgaaatgcacaggaagtattttacatatctaatctaatctaaccctaacaacacgtcagaagggtatcactggttatatttgatacatcaggaaaaagctccaaaaaaagaataaactgggcactgggaggggatgctggagttagggaataatatacctagcatttgaacgcaaagctcatgaattccaaagcctctaatctttgtaatatttcacacttccgagcaaattaatgagaaaaatccaagagtcaacaattcaattctaatcaattactagagaaataaaaagtaaaactggaatgctgtcattgcctcaaggatacaaatgtgcatccttgcattggaagtgcagagtctgaacgtctggactgccagggaagtccccatgctgaggttttgaagctggttcccaggaagatggtaacatcaataactgggaatagataaagacgaagtaagtgtggaaattgtgagcatgagctcaggaatcagactgtctagattcaagttctgcctctactacttagtatctgtgtgaccttgagcaaattactgaagctatctgagccttgttgctgctgctaagtcgcttcagtcatgtccaactctgtgagaccccagagacggcagcccaccaggctcccccgtccctgggattctccaggcaagaacactggagtgggttgccatttccttctccaatgagtgaaagtgaaaagtgaaagtgaaggggctcagtcgtgtctgactcctagcgaccccatggactgcagcctagcaggctcctccacccatgggattttccaggcaagagtactggagtggggtgccattgccttctccataaagaagttaggctcctaccctgcactgaaattagaaggcaggggccttatctttttcgatgatcacatttcaaaaagatggctcccagttccttgagaaagacattcctgggttgtagaagatctgtctcaaaaggatagaatgaagatttataattgtgaattgtctagtgaattctctaagaaaaaggagataagaagctcatagtgaggacttgactgaaactgccagcaaattcttttggagcattgagctttctcaggcaggcatttcaagggagctggactcattaacctagggacatgaccttgaggagataggagccttgctagaatttagccaagaagagagtgcttgtcaccacattggtgtttgactttctcaaggtcatattgacttgcatgattcagatgtgcatgcaggtgataaagtagcaagagtggtgcataaacaagtttaagaaatttcatagaaagctctctagactaatcatataaaaactgactcatcatataaaaactgacagaatgttcagtttagagcaa

SEQ ID NO: 26895 - DNA, 2290 bp, Bovine  19866880712371
  misc_feature (1)..(1): n is a, c, g, or t
ncggtaaagtacagaaaagcacagctccctgtagaggacgcacacacgtgacgatgcacgccagacacgtgaactaacttgtgtggttggacgtgtgagcacatgtttgcactctgaaagttcacggcttgaaggttcctgtgtggggaactcagcgtacttcatctctagcaggtgtttcagcacattatggtgcacatttaggtgcagcgctgagaggattcagttagtctggaataatttctttggaattgtaaatggtgctgcttggtataatgcgctgcagttttcctttggcccgttccactgtggctctaaggaattcctcataaagacacatctgaaaatgtgcctcttatgggtgtgtctgaacaatgggaataatgtttctgtattggacaccagataccagatgaaggttcaggacatagaatgtttctgactctcttcttgatttgagttccctaccttcaaagactcggggcaatcccctgcagaaggaaatgacagcccactccagtcctcttgcctggaaaatcccatggacagaggagcctggtaggctacagtccatggggttgcacagagtcacacacaactgagcgacttcgcttttgtatatgggggaagacataaaattcaccattgtcatcattttaagtgtacagttcagtacattcatagtgctgtacatcattaccactatgcatttccagaaccttttcatcatctcaaatggaagctcagtatccactaggcaatcactccccatcgcctccgcacccccaccccagtaaccagcctcctgctctctgtgcagtgcgtttgtctatcctagttactcagataagtagagttgtgcagcgtttgtccctgtgtgtctggcttctttcactgagcatgctttcagggttcgtccgtgttgggcatgcatcggtacttcattctcctttgtggctgaataatactccattgtgtgaacatagcatattttgtctgatcagtcatccgttaatgggcctttgggttgtttcccaccttttagctagagactgtttgtagcaaagtcgagggctgtggtggaaaaagtatcagacgtgggtcaacagtgcaagccaatctgtgccagtgagtgcctgtgtgatgttgaacaggaaggaaacttagcctctctaggagcgcgcttccttacctggagatggggatggtggtgctttccacgcctgcctctcaggctggttgagagggccagctcagtgacagctgcaacaaatggctattcagtgcctactgcgtgccaggcgccgtgctcgccacccagtggggagcaaaagaggcccagtcgtttcctcgtggtggaccaagataaatttgctttgaatcacaaagcatcggccttacaagtatagattgttacctaccgtcttcacctatccatactctgagtgaggtcattgatttatcctcattcctgatacataatccgcacccaacccaggcaagaatcttcgccagagaaggttctctctagcctctctgctacctgccccagtgaagggtggagaggcttctctgggtgcaacctatggcctttgtagcagctggaggcagatcagcagggtcagggctcccccagagagtcctcagggatgcctttgcctgccaggccttcctcctcactgtcctgcaccctctgttcccaggtggccatcaagtcaatccggaaagacaaaatcaaagatgagcaagatctgatgcacattcggcgagagattgagatcatgtcatcactcaaccacccccacatcattgccatccacgaaggtacagaggcagagcatttgaagctgagtgtgtgtgtgtgcacacgcgcagtcggaacagatgacacacaggagtagaaaaaggcatgggctttaggcttgggcaggagctggatttgaagcccagctgcatgactttgggcaagtaatgtaatgcagtctctgggtctcagttcctcttttgtaaaatgagataatctcacctgcgtcacaaggctgttgcaaagatcaaattgaacgtcaccaagtactcagctcaggacaggaacgctacagattggaggcattttcgttcttaggttttccgtacttaaacactgcctccccaaacccagtgagagccttggcactgtgggggtagctgaaacatacggagacctgcacctgtctccggcgtgtgggtgctctctttctttgtgcgtctcaagagccaggccccctgtcctctgaatcattcccgccgtgag

SEQ ID NO: 26896 - DNA, 1182 bp, Bovine  19866880717660
  misc_feature (1)..(1): n is a, c, g, or t
ngcgccgtagtgatgcttatcatacacgccttttttgctctaacttcgcacattataacatctcttcggtgaggaagacgcagatcctaagacccttgatctgaaacgcggacagattgctaccttcagagctgcaaatgcaaagggaaggaagagagcgggtgttctgccccatcgcctcctcccctatttttctgaagagtctcagctttgtgctcagaaataagaaagtatctcatttttaacacaataatgtatgtgagagtttttgcaaactgtgaagcagcttttaaataagaaggggttttaatggcaggacattgaaacatggaagagaggaaaggaattcaatctttcccccccataaatctcagcaaaactgggctgagtaatctggaggcagaagagagcaaatactggggttaccaagagatggagctgggtaataataacaaccccatccgagtagctaccttgtggttactgtggataccatgggttttgcccacccagcaggctaaatgaacagttctggaagtaggtcccaggaccagcacatcagcatcacctagaaacttgatagaaatgcaaattattggacaccatccagacctattgaatcagaaacagtgggtcccaagatctgtttcaacaaatctttcaggtcattctgatgcatactaacgtctgaggacctctggcctagaccctagtgaaggggccacttagtatgtgagtcacagtgatctctaaagcgttcacagtttcccaagctctttcacacccatggtaccattctagcctcacttcacttaccctttcagtcctgctagtctgtgagtttcctgactgttctttttcccattccaaccacttgttttaatgcgtgtcctagaagagcctaagttgtttttacttcagccaagcagctactttctaaacaaggcagctccatttttagaacacagaaatttagaatgggctagaaatgtaaaagccccctccacttccactactcagtgtcaggcacaacgtggaaaacgaggccacaagcctccagcattttcagtggtgagggaaaagcagaataccagtgaagtctgtggcaggacacggcagaaccagtcggggccgatgaccctggtgcacgatggtcgctgtcctctgatggctcaccccaag

SEQ ID NO: 26897 - DNA, 3746 bp, Bovine  19866880721875
  misc_feature (1)..(1): n is a, c, g, or t
nctgtgctgtttgaacctgagggcagggcagctctccactggcccaggccgcaggaggtgtgcgggcaggaggcctgaacgggctctcgtggtcagagggaaggggtgaccgatgggctgaggagccagctcaggggcgccttcccgggcgttcaccccctctacctgcctggatgccgctgggcgttcccggagcctgagcagggaatggcagggaggtgtgcctgtgagctggatttcttggaaacactctggatctgagcagagcagtcgtttctcaggccttcactccacaccgcactgtctgcgctcaccgcgctggaggcgagctctgcaggcagggtgggtgccgagctgtggtcataccatccccctgcctcagaaagtccttcacaagacccatgacgggaaggggggcgggacctcagcctgtctccgtgtcctgccaggcttgcccctccttgtgtgtgaaggcagtgccaccagcccccttgtgcgctgctgtgctgagagccacacaccacgtgaccgccgccctcctggcaaggcgggggccaggtcatccccgagcgaagacagcaggggcccagagggctgtgtgggccgcagggttaggccgaggagcgtccatcttccgtggagcccgcgccagagcccacccagctcagccggagagcagtattgtccaacgctccctgccaagcagggtgctcaagagccaccccaaacatacccaccgcaatgccaggagagcgccaccaccggtgcctcggcctgcttggcccggggcaggggagggggcggaagtgtaggccgtttccggctccggaaacccccggcctgagcccccgtctgcccgcgggactcagccatggcgtctcctcctctcagccgtccgtccatccctccgcgccgcagatgctcaggagcagctggcctgagccctggagaccgcggtgccgagaaaccgcggcccctgtcctcagcgctgagtatcgtgacaggcggtgttgatgggagcactctgcatgctcgagccaccagtggctgcaggttgaagggaaggtccttgcggggatagctcgcttccccattctgggccggacgggaacggtcctcccgggtcgctctgctctgcgcttcgggcaggctgcttgacttgtctgtatttcggtgcctctgtctcctctagtcaggccctcctctgaaaacctgtccccacagaggggcatgtgcccagctaaagaagcgggtgccagtctctaggaagcacactgcagggccgggggacagtacctgccccttggccggggtcatggtgaacagacctcttcgccccttgccttgcttttgaggaaatggttgagcttacacttgtcccctgtccatcgccttggcccccttcccagcaagtcctgaggcctagagaaacgttcgcctgtccgagaggctgccggggtcacgactgctctcaccacaaggacttctgtggcctgggcccggagagtaccttcgtgatttccctgaacacagttagccttagaagagggctggaaacagatccgtggatgtttgtggcttttcaagccaagggagggcctcccctgctcacactcagcacccgcacggacatgcacacgcaggccgaggccccatcgctgggcagcactttcaggaggaacagtacaaagcatgaccttgtctggaagaggctgagtccactcccagacacggagatgaagtgtgaagggctgtggggaagtgtgttggaagtgtcggggcagcggtcggaggctgcccgtgccggactccgtctgggcgattcctgtgggcaaaccctgaacagagtctgatccaaaggagagggtttttcccggggaacaacacgggccgcagctctccaaggctcctggagccctctgcaggatcaaggccaagtcacagagcacccccaaaagccgtgtgacgagagcggtgggggtttcccaccctcgcctcagtctttgcgaggctgctctgctaagggctgaagagaggaggcttcccggcctctcagctcgggggcgggagggcatctccgtgggaggatgcagcgcacgctccgtttgtgatgcctcggtcactctgccagtagccacatacaccctggcccgtgctgtgattcggtccccgggaaagaaaccactctgaggatcctggttgatcactacgtggtgggcttaggaggtgcatagagggagatccttgattaaaataaatcagaggagtcaacaaataaagcaaagagcttgaaattacaggaggacactcagtgacctttgcagagcccaactcctgggcagcccctcttcaggacaggcaggggccacctgtgggagttcacgccgaactatggctgtgcccagcctgcccagcttaccctccctccgctactgagaacaggttctgagaagggacagggaaagaaggacagccatccagggaagccgccagaccccaccacacagcgtctcaagccaaaaccagtgccccctactggtctattagtattaaatggtggtttcatcagagtaaagatggaagtgaaataggtacaaagcttaaacaggatcagatttcagcatgcagaggaaccgcagagctgatctgattgaaatgactcattgtacggtcaaatccagagaggggaagggactgtccgcagtcacataactggtaaatcgaggtgaagtccagccttgaactcgggccctctgactccttgtgcagtgttctttcatctcagcacagctggaaacagcggtgttcccgccttggacacagtgatgttacttaagatctggcccacattcttttctgcttctcccacacgcccttatacctccacaaatgaaatcacaggatttttctgagtcccaggtcagtcagtctgccagccccgtggtgaaccggttgtgctgttcaggagagacccaggccaggaggagagggaccagctgattggtgtttgtcaccacgaagctctcccctcgggtggcatctcttgcccccagcatactgcgtccccgcgagagggggcctggtaggctctgtgccctccaccctggccgcgggggagcggggccgtggaagttccacccccggatctgccgggctggcgtgcagcacatgcaaagacttcagtgaagcaataaacacaaaactccgggagacgaagtgcaaaattttgtgcacgtctcttgtttctctttgaaagaggatgcaggtcggacgactgccctgctctcctttctgacttccagactcagtgttctcagtcagctgtcccctgcccggctcccagctctgtgccagcctcgcgccctcctgctctaagcaccggtcgcctgtgacgtggccgctctgtcctgcccctccctaccccacgctgggccccagggacctctggccccgcagcctccccagcacacacattttccagtttgttccgttcagcggggaaatcttttccaaatgtctccatcccttcccacatacccacacacacacaagttggtctgatctttttttcccattggttaaatattttcactcaccgtggcagaccttgttttaacccctctcacatcatgttctttccttttttcgagttattttgcattaaccaaccttgtcagcgacagatgcgtatctgagggtgtcatgttgaccttcagcagggaaggcttcgggccgtagaagaccat

SEQ ID NO: 26898 - DNA, 750 bp, Bovine  19866880746252
  misc_feature (1)..(1): n is a, c, g, or t
ngagcactgtttccagcgaggacatcactacaggaagagttaggcacctgcaatacatcaatttcctggaggaagaaagcaaggctctggaggtagaaggactttgaaaactcccacgtgtgggctgtgggggcctgctcaccaagagacactcaaactatttccaagggggttggaaaaatcttttataagcacattcttttctttaaaccttttttaattacagaagtttcaaacatatacaaaagtagacaatagtataatgaacctctgtgtacccatcacatgcaagttctttttaattctcttacatttaaaaatagatacgttaagtaaagcattggggaagaaatctgttgcaaaatcaaattataggatttcacagttctcaggcaatcacacactccccttctatctttcctcctgtcatagaaggtgtaggtctttgatttctttttcttctataatttattgcccttacttgtattcctagagttctcctacagtatgtaaaaggtgaacattttgattttcaaaaaaagagtaattatgcttatcaacatgactctgcagccatcaataataataataataaagactatataacagggaaagagttatcagctaaagttaaacacagtaaagtacaaaatgctgtgtgcacattgacgacagcggtgtaaacacatactgcctgtgcacataaacaaaaacgagagaaattgaaaaaattaaatcagtttttgcatg

SEQ ID NO: 26899 - DNA, 1474 bp, Bovine  19866880759634
  misc_feature (1)..(1): n is a, c, g, or t
ntttcctgccatgactagtggctgtgggtaaggaccgctgggccctcccatttctgctgagtggactcagggagaccttgccttggggccggaacaccatgagccttagttatgggcgtttattccttttctgaccaacctagtgaccaaagcctgggggcccaagacagccaggggtctacccctcagccacacgagtggtcccattacaaccaagtccaggggaacctggacacatttcctgtaccagacacacagccttagcacgctcacatctgtgttgttcacggtcatcctgtgggtgttattttatgccttcaactttattatatacacattccttgagggagggagccctgtcttgactgcctctgtgtcttccatggcgcctacaacaaagtaaggtctcggtacgtgttgatgggtttattagggggtgagttttcactgatgtaactatcagatccccttttctaaggggctggggccacgggagcaggtggaggccctttattaaacatttattgagcaccttctcccactccttcgttttctttggggaggtgttgcttacaaagcacgttcaggagtcatcctgtgatatcccggggcagcagagctgacatgagtgccctgggaaagtgactgtctaagtgattgcactgggctctgcctacaggaggaatgtgctaagccagggagcttgtctctggggcagtgtgtgtgggaggctctccagaggtctgctgggggagggcaccctgaaccagccacctggtgcgtcctggctgagaggctgccacaccacgaaggccattcatggccacagtgttctctgcccagtttccatgttctctgagtaagcttccctctgaatctcagcttcccctcatgtggaagcaaagggtgaacactgctcatcagcaacccaaaggcctagttggtttgacagcagtttacaaaccaacaaactgacattctggctgtgtctgttcatctcctggagattttttgcaagtctggccctgagtctcctcggtctgtggctagcaaggtgtctgagcagccacgtgaggcccagaccctgaattgaaaaagcatcttaaaggggacctggccaccacgtgagactctgaggaggaaccagccagctccccccaggtgccacccagcccacggcttctccattcatagagcactgcgcttagagacagagccaagccaggggtcctacagcagaagtggggctccatgccaggggccgacctgctttagtaggaagccaaaggaccaggaagacactgcagatcaggctggaggcggattcggaatccagccagagaaccttgaaaggtcactgcactcttccccctgctgctgggtgaggcatgtggtcagccctgctggggagctgggtcagcacccctgggagctggcgtcctccaaggagggaaagcagggatgagcagggagt

SEQ ID NO: 26900 - DNA, 1364 bp, Bovine  19866880764822
  misc_feature (1)..(1): n is a, c, g, or t
nctctctgacaccccttgatgtttaaacatttttttatgaattcccacagaataggaaacaatttcctgcctcttgctattgggaaaagagaagtcttttatttcttaggattaattgcatttacaaaaagaaacaactttatgcttacctgttgatcttgacaccttatcttcaacacttaaggcttcatcattttcaaggtaaatgaactggctgttgacaaggaaaacaggattctacaagcctactctttatcctccttgtttatacacttactactttagcaaatttgctattaccaggagtgttccctttcagcagcctaattgggatttcctttcacaagaagcattaagcttagtgggataatcccacctcttccatgaggcggacagtgggtttagacgagtttgttaattatttttgtttcattcaggctcgctgagcacatactgtgtgtcaagtgttttcacgctcgtttttcaacaagcgttttcagtttaatccttacaataaccatgtgaggatagatattattagcccctgtttacagaagagacaaccaaggataagagaggttaagggatttggttgccccaaaacatgcagagagtaacagaaccagaattcttacatgaattttctaatgccaagacaagtgttcttcccaccacatcatgttatttatttataattaaccagtggaaccaaagtaaactggaaaatgctactcctacatactgaatataatctcttgtattgtaaacttacacatttttatcttatcgtgaacatcaaaatatagtatgtgcctacattttcccaagaaacctttaatagaataatctagtcctttaaataaaatttcaatccaagtattttcaagttctctttattttaggtactcaataattgactgtggctaatgaaaatttgtcatcgtcttcaaactggtggttgcatgtcacacagctctatacacaacttctcaccaaaacttctttggcagcataatatgacactcaatgtaagtcagaaatgggtgagacacatttgaactcccaaggatagaatcactggagtggaatgttcaacttttgaagctggatgacatttctgtttaaagccatggccctcactctgccaggcaatgtttaagtgctttatatatgttatatatataacaccctatgttacccaacaccctataaggttggtatccccacttctaaatgaggaaactggggcttaaggaggttagacaatttgcctccaatcccacggtcagtggatagcagagcgaggatttgtccgcaagcagactggctgcagagtctgagctcttaacctctcaacactgtct

SEQ ID NO: 26901 - DNA, 1400 bp, Bovine  19866880796832
  misc_feature (1)..(1): n is a, c, g, or t
ncacccagacctcagataccaaaagacctgactaagcatttggcccagttttgttaacagtcactcatgaagtataggaatgccagaaaagctaaaaccgctactttgggaaatccttctgagttaggtctcaggagcaccctgaaaagaaaatgagaccatgacacacaaaaaagaaccaacaaagcagcatgggccatgacaaaggagtcaggattaaagcatgactctgacattcttcaagcagctcttctccagtcttaaaaaggcaaggggatacaaataggaactggagactaaagagcagtattgggatgaatttatcaaataggaaggaatgatggcagacttttccaagaaggcctctcagaagaagagaggccaacttcgctcaatgatttcaggtaggctgctgctaatgagccccatcggggtaggtacctttgggcttcagaattgacgtactctacgccacctggaaagggttcgaggatgccccagttcctgcaccctaccaagctctaagacccacctttgaactccatgttggcagcatcatccagaagttcctccttcatggtgttaagagtctcaacgatcatgtccttcatttcctcttgcttccggttggcaatattcatcaatgattcgtacagctcattctccttttttcgagtgtattccagacgtttgggcgtaatctgcaggtcccgctgcatgtcaaaagcctggttaatgaaagatgtcgaggcagcggcagtgcaccaggttcagggccttggctgcgtccaccaggcgagtctgcagcacctggtgagaaaacgtgttcaagtgtctcagcttctcactttgctccaccaacatgctctgagctttggtgtcctggccgggggccccacagttacagaggctgctgctcagatagcccaggtcagtcagctgtcgatgaagtggcgatctttcactctccattctttcagtggaggagtcaattatctccgagcccagcttcggcactttgaaaaagaatatgggaaaggagaaatactttcggatttcctgaagctcttgctcatccctctcagagagttcatctttgtggagcgcataggttatcacaggcaagaaatcattcaccaagtcactcagaacatccactgtgggccggaggccttggcacggtgctaccacaatgtccacttcctggaaggggaagggggtcatatcagcacttcagggtcagaaccagtccttgcctccccagagtcccacactgagaccaaaatccagacctatgatggggcaactgggcttcagtatatgccctaatcacttgtccccctccttcctcggttagcaacactcccctggtgccacctaagcaggcaggcactcatcga

SEQ ID NO: 26902 - DNA, 1363 bp, Bovine  19866880849771
  misc_feature (1)..(1): n is a, c, g, or t
nacctcctattcatttcaatttgaatttctcagtttgtacactagatgtatattctcctcttcgattttgtcataccctccccaaccattgtaatgttctgtagttctgtataaggtgagacttagtcttgggtatttcctactgaagctttagtgctttgtaaacaaaattagaagtttattaaagaaaaaactttctaataattttttttcactttcagatatcctccagtctttggaaaaccgatgctcactttgcagcttcacttttcagcaccactgtcctcaacttcctaatgactaaatgaacctgggaaagacaaatctcagccattacagttgaccttcagtatccatgggtgattggttcaagaccccctgctgctgctgttgcaaagtcacatcagttgtgtcctacttctgtgtgaccccacagatggcagcccactaggctcccccgtctctgggactctccaggcaagaacactggagtgggttgccatttccctctccaatgcatgaaagtgaaaaatcaaagtgaagtagctcagtcgtgtccaactcttcgcaaccccatggactgcagcctaccaggctcctccatccatgggattttccaggcaagagtactggagtgggctgccattgtcttctcagatagcaaaatcagaggatgctcaagtcccttatataggatggtgtagtatttgcatataacctacacatatcatctcttatagcttacattatccatagattacttataatagccagtacaggtaaatgctgtgtaaatatctgtaaatacaatgcaaatatctgtaaatataatgtaaatgctacgtaaatagtggctgtacatggcaaattcaactttggcttcatagaactttctggaatgtttcaagtattttttacccccaggggttgaatcccgggtggatgcatgacctgtggaataaaagagctaactgtacttaacaagtgtgaaaagtgagtgttagtcactcaggtatgtccaactctttgcaactccatggactgtagcccaccgggctcttcatccatggaattctccaggcaagaatactggagtgggttgcctttccctctccaggggatcttcccgaccctgggatcacacccaggtctcctgcatcggaggcagagcctgtactgactgagccaccagggaaacctttccttaacaaatgcctgatttactaaatggtgtccctggaatactcacagtgccaagagcattatgtcaccttcccttcatccttcactgccacacagggaaggacttatggtaaatccaagccagagaacagggaaggctaggcagcatccaccactgaac

SEQ ID NO: 26903 - DNA, 1377 bp, Bovine  19866880851379
  misc_feature (1)..(1): n is a, c, g, or t
nctcccccgtccctgggattctccaggcaagaacactggagtgggttgccatttccttctccaacgcaggaaagtgaaaagtgaaagtgaagtcgctcagtcatgtccgactcttagcgaccccatggactgcaggcccaccaggctcctccaaccatgggattttccaggcaagagtactggagtggggtgtcattgccttctccggaaactaacatagtgtaaatcaattatagctcaactttttttttaaaaaaggcaacatgaagagttcttgtggtgatgggaattttctgtatcttgactgataacttccatattctggttaggatattattatactatacattttgcaagatgttacaagggaacattgagggaagttgggtaaaaggtgttatatcttacaaccgcgaagggaatccacaatttatctcaaaatacaaagtttaatctaaacaaaataaggaaactgaagttcagagtaagtagttaaattcttttagagtcagaatttaaatccaggtctgtcagattcccaggcctgagtgtttcaagacttggctctgttcaggagaactgcatagggggaccccagaagcctgcagttcctcacaccaggcggctcaccggcctcaggggcacctctgttactgcagactgctggtctgataaggccattgccggtcttgaaagaattatttgtcaagccctgtgggttggtgctggagggcccagatttggtacccaggttttcccttcctaaggtgtgtaaagaaggatgatgtggaagggaccactcacgtgtttgcccttccacttctgtctctggctggctgtgtgtccgccaaactgtgcatttgtcagtttctctgtggatatgaccatttccgggtggacggtgtggtggcgatgtgtaaattatgcatgtgtgcacaggttagcgtgtacattgttcggatgcccctgtgtcaggtctgggggtgtcacacccacataacacgttcctattaggttaaaccatctgataatacctcccccatagcagagcccactgttgagccagtctgtcacgaattgggtctgtgtattgtagataaactgggtaattggactctccgcctcctcacccaaaacaaacactcacaaaccgcccaccccgccctggagcgagtcccggcccgtcatccggatacttggctctagggccccgctttccccgaacagtaggcaagggggtgcgcgcctcccgccgggccctttccctcccccgcggccgtagcaccgaggcttatgtaaagcggccgcggggcgcacgcggcttcccgcacaggtgtggcagccgcggggaggctgtgcgcggggccgccccacccc

SEQ ID NO: 26904 - DNA, 2107 bp, Bovine  19866880874177
  misc_feature (1)..(1): n is a, c, g, or t
nagactggctcagctaagatgggcacaatctcggaaacgactgacctcaccagcttcccattttgcaggtatgatagcacttgctgcttttgctgcagccaggagaaggcaagaagcagcgaacatttcaaagtcctctggtggcagcatggagacctaagtaatgtgacttttttatatggctttggtaactttggtcactgtgctctttattctcctgtatctaggctttctgtctctcccatcagcctggggactccctggggtaggtcttccctccccttcagtctggatttcatgaactgtgcctcccccatcacactgcgagctgtctgaaggcaggggctgtgtctcttccattagatcggaagctacctaagattaaagatcacatttcccaatagctttagagtgccctgaaccccgggactcccatctcctcttttaacccccccaacaccaaggacaggggactgtgttctcttctcccctgcaatctgacctctcagaaatccatgaactacacgacggaacctgggagatcagactcttgggagaggatcaggcactcagctcatcctcgatgcccgagcctcacctatctggactgagatgtggagcaactgatcgtgcttggtctctccgctccctccctgtctctctcttctacattccgccccatgagccctgctgcccgccctgggagcagacagaaaggaagggctctctcagcctagcagcacaaccctagtttaatcacagagtgatttgtcctcacaattaatagtttcatgtttcctctcacagtctaatgacaggaaaaagaaacgtgtgcttctgaggaagaggtctacttcagggttttcaggtgataagggttagctatacaatgtacagggtaagtttcatggtaggtaaggtaagttacaggtaggttacaggtaagtttcgtggtagctcagatggtaaagaatccacctacaatgcaggaggtccagattctatccctgggttgggaagatcccctgaagaagggcatggctacccactccagtattcttgcctggagaatcccctgggcagaggagcctagtaggctacagtccatgggctcgcaaagagttggacacaactgagtgactaaacttccagtgtctccttttattctgtatctcctaagaaacttagggggaaaaaaatctgtgctcagatggaatttctatctcccctcagctcatggatttcattattttattccaaatttaatcatcttgttttatttaagccatcacaagagtctttaaatcctaaattatacaaagaagcgttaaaaaattatattgtgtatatatttttgtcttattagtgacctgagaggacagaactatgcagtgattcataaaatgggctttggaattagagacctgaacacacaccagcttttattagttcaccagtgaattaccgtgcagctgtgggccactcgttcaacccgtctgagctttgctgcctcgcggatgcactggggacagcgtgtctgcaatgcattctcactgatctaaatctcttaccaggcctccccctcccggcccgcctagccctctgctctggaccacgctggacttcacagccccacgtgctcacaggctgttgccgccgcctggggctcgctccaccctagcctcacctgttgcgtttccggctggatcctcgtgacatctcagtgtaaaagtctctgcttgggagaggccttccttcgtctcttactttagaccaagataatcccaggctgctggccagtgcttcccaagcttcagtgtacaaccaatgactcacccagtgatcttactaaaatacagcatgcctgggtggggccctacatttgtaatttataacaagctgcatgcaggtggtctgaatgctgctgggaggagcgcccttgagagtgccaaagcactctcgcacaccttagtcatttgtttaatggtatctgtcttcctgctagaccgagctccgtatcccaggcccaggcacagtgccgagaccagaagcactccagaaatgctggccgattaaactgagcaatatctgtgatatctctggcctg

SEQ ID NO: 26905 - DNA, 1621 bp, Bovine  19866880881165
  misc_feature (1)..(1): n is a, c, g, or t
naaattgtttcctgacaatagaacccacattgagaactgatttggaaagaccagccctaaaaggatggcaagtttgcagaagttaacagtggttccctaacttgagcttaatgtacattggaataacccgggtgcttattgaagccacttctctggttccgcaccaggaggatttcattctgaagatctgggatggggccaaataatctgtattttttttgggccacactgtgcagtatgtgggatcagggatgaactcgtgtccctacagtggaagcaccgagtcttaaccactgaacctccagaaaggtcgaaagtgaaagtattagtgtctcaggcgtgtctgactcttcgtgaccccgtggactttagcctgccaagcttctccgtccgagggattttccaggcaagaatactggagtaggttgtcatttccttctccaggggatattcccaacccagggatccaatccaggtctcctgcattgcaggcagactctttaccatctgagccaccagacaagtccctaaataatctgtattttaagaagccttttaaaagcaagtggtttagggattgttttaccaaatccagttgggtgctggttatgagacgtgcatgtatgcgtgaccgtggtttgcctattggctatggcagcaagtcacctcccagattgtttgcttttgcagccagtagctggtttgaaattcaggaagtcatttcattggtgaaggagagtggatgctggggaaagggagtggattatggccccatcaatagaaccgagtatgtttttcctgctaacgcctggcacagtccccaggtgcctactgccaggttacagctattgggcaatcatgtacttcctgactttccttttctttctctttctataaagtgtgatggcccaataagcctccaggcttgagactgctggacccaggctttgttaggggctcagctgaaaaatagcttcttgtggcttgtggctcgtacctcttgttggggggcagactggattggggaggaatggggtggcccagaaactgacactgaaatttagaaaccccattaagctcttgacctgggtcactgcgtgtgtatgggtgtgtgtgtgtaagagagaaagggagagatcattgattctggaatgagataaaccagctttcagtttgcaaacctcagtggctgtaggcagagatttcagctcttattacatcagaacagagaattcagaggtgctccctggcttcatgtctcttgtctccagggagccaagatgagtaggaatgggacctgctccctgatccatagatcaccctgtacttctgctggcagtttgctcagggcctccgacctccttggagagcagctctacacactgctaaactctggtttctctaaattctggagggaaagcctctttccccactgcaccccactcctgcctctgcagtgtcctctctgaagaaagaccgacctggtgtcccaggagaggagtgtgggagcagcccacgacctcccccaaaatgaaccaaggtctttggggaggaggatcacaggaaagcctgctgggtgacttccgccccattcccaattcccagcctgtctgatcggatt

SEQ ID NO: 26906 - DNA, 3225 bp, Bovine  19866880890567
  misc_feature (1)..(1): n is a, c, g, or t
ncacgactgagggactgaactgaatactattcttgcaactttccctaagtttgaacttatctcaaaataaattattcaaaaaatgtttaaagaggcagggatagatttacatctacgattgagaagaaggaatcctatgtactgatagagcacatataacattttttttttaagtttgatctgcctcattcaacacacaacactcacagagagcaatctttaattatatgtgtatatttaactgtatgaatacatttgtgtgtgatgggataagtcacttcagtcatgcccgctctttgtgaccctatggactgacgagcctgccaggctcctctgtccatgggattctccaggcaagaacactggagtgagttgccttgttcttctccaagggatcttgctgacccagggatccaacccatgactcctgagtctcctgcattggcaggcgggttctttaccaccagcgtcacctgtaggcaactgtaaatcacattctatggcacttgggagctcgatactgaagattccatttccattatattatttttcactaagtatattgctttgtattgcagataattaaatatcatgctttttatataatattaatgataagaatattatttatttgtacttatataactccttattctccatcacttctctattttacccactccaacttaatccttacagaattatatgaagttgagattattatcatccatatttgcggatgaaaaaatgaagacacagagagggcaagtgtcttgtccaagttagtggagaactgggatatgagcccaggcggtacagtccgtattttttatatacatgttctttgtttccggagctctatttaaatttctgcaagacagaaactatggcttcttttgcacctattttcttcctaatgaaggtctaacacaacaccctatatacagggtgagtaactgtatatgccctatatacagttaagaaccaagagtagtcgctaactcacacgctgagagccggtggaagctctgcagtcacgaccccctgggtggtcattactttgctctgacccaagtactgtctctcgagagactacagtaaagggtgtgcccaggagatggcacagacgacgaggccagagagccaggtcatcatcgccagtgcaggtgaagcttccctgcaggtcagcagcagggactgagcaactgccccaacccacacatgcctggcgttgagctaaacagaggactcagatacagtttttcaccctcaaaagttgacagcctggaacactcctgggcagagggtggaagtaggggttgattgaaaaggcagattcctagaaccagacccacagagcacatgaggagaaactgctggtggaatgtagtacaggagaggcggcaagatgagaagaaggcattccaggctgggagagcagaatgagcggggattctggccgaaaagagcacgctctgtcggggagagaataaggaacccagatgggaccaggagcacacaccttccagggccagctgccctctgggtgttgcacatggcagcccccccacccaaagacgtgtgcatgcacaaacacgtcaccctttggaaccactcccaggcccagggtgaccatatgccctgttttgccagaacagccctgtttttacttctgctatttcagcatcccttctggtttcattctcaagcatcctgttaggggtaataaattatatggtcaccctactcaaaccccactgtatgcaacctcagtgcttagattgtgttgccttcctacttccacccgaacactgtttttccctctttgggagaaggggacttagagcccgagttatacacacgggcccaactccttcctccatcagtggaagcccaaactgtgtctagagtctatccgatggaaaacactcagttcaaaatgtccacctggctttgctggtagtcttaaccaccgaatcaaatgggccgtacatgtggcttgataacacacacacacacatatagtactcaaaagtgtgcagaaattgacacaatccaaatctcaaagtggtttgtattcccctagaaatcttctgaaataagagggaaatgtgtgctcactggtgtttcagagaaatgtaaacactgcccttgcaggtacttagaggcctgttaggtacagaccagtgcttttaagtaattaaagtctatggtgttcgacaagtgtctcaataaacacactttctaccacattgtacatggaaatttaagtgcttatttacatttactttcagacttaaagttgaaaagatgtcttggggcccttccaagaatcaaaatggcttatataaatccttcagatcaaaacatcttatgccatcacaaactttctattaaattctattgctcatttaaaatattgacatgttttatttcgggtctccgtaaagcaaagcatgaagagcattggtcccacctgatgcattttaaatactcaggctgctattttttctgtaaatgtctttgcaggaactatacaaaaggctttttctgtggaaatgaggtttactgaatggaaaggattcctttaatgagccatttagaagaatttaaaaatccttttagaaaatgtgtaagatatcagaatttcttcatcaaatttgaattatgtttccgtgggaagctgaagctagagtgtactgcgggaatgtttacataggggctccttttcactcggtatttaaactgagcaagtagtctacacactagatcacattggtaaacttacccatttgtcaacagaactgtttggtagatttgatgaggtgagctttgtgctcctactatgcgcaagagcctgtggcagccactgaaggggacacaaggcacctgcagagggacgcgttgcactggcctttgagatgctccttaagtcatcacaggattttaacaggaaggaaaacggggagcaggtgggagaatgaaaagaattccatgcaaagagaacagctgaggcaaaggcctgtggaaagaaagtgagcgaggtgcagaaacaagtaattacagttgagtctgatgagggtgataaagttactggagacactggtgtctcctcacggtgtagaataagcctgcatcctgttctacagcctccaggcaaattagaaatatatttaatctctactggtaggtttagccgactcggtaaagtggaggaagaggcca

SEQ ID NO: 26907 - DNA, 1113 bp, Bovine  19866880898414
  misc_feature (1)..(1): n is a, c, g, or t
ncctctggggtggcagtcgggggtcccttaggatggcctcgaatgagagggcctcacctcctgaccatgcagcctcaactggagggcggagtcagccacgttccttccgctacccgcaccctgccatagcacggagcgcagtgcacggagcgcggcatgcagcatggcactcagcacagagagtagagcctggagcctagagggacgaaacgggggtcaccatacacgcatcagtctgcctgggagcaacctctgcccatttaggtaaaaccaggacattggaaagtggatcacagataaggcattggcagggtggtcatcttgattttcagactcacaagatacacaatttagaaggaagagttggggagcacaaattcctctgctccttaaagcatcagatgataaaagacagcaggaagaggagccttctcagaaagacctcggctacttctctgtgtttattgaggaaattgtaagaggaaatggggcttgtaataaagcctgaggatctgggttataaaaaggaagaatttcctgccccgggagcatcagaaaattaaaataccagcatgaggtgaggtgagagaccatggtgtcacttcccctgggaggtactggaaataggaaagacacagggctgagagtcaaaagacctctgttccagctcacatcttgtcataaccaggctgtgcacctctggaccaagcacatctattctggtgtctgtaaaatgagagaggagggaagtagacagcggcctgaggtctggcccagctggagcgtccttccgcagcgggcacgcagggtgggaagccctagagaaataatcgtttaaccagagtgacaaagcaggaggttccagaatggacatcctcacgttcttctgggtggggcaaccgtacagaggtctggcctccctggctctcatgggtgctccccactccccagggttctgtcaccagaagggaccgtactagggaccttccccctggggctgttgtggccaccagcctcgtttccccagctcagccagggacccggggacctgggcgagctgccgctgcggctaaggactggcttctggtagaccttgggctgccacccagaagc

SEQ ID NO: 26908 - DNA, 1202 bp, Bovine  19866880912186
  misc_feature (1)..(1): n is a, c, g, or t
nctcagtaattttccaactgacctggaattcctcctgactgctgccctcttttctggggcaagagggacaccagctaagggacccaggactccacccaatcctctctgctggccacaaatgggtgtgccaaaggctttggaaagcgattgcagccctggagggtcacctgctgggaggctgggggaggggtaagtgtgcccagagaggcaacttattcagtgatccagaaaatagaggagattcttgtttttttctccctctcctctctcctgtgcccactctcctcatcaccatcaccagggctccactgttcctctctcccttcgagatttcccattcttctctgccttcaattggaagttcccttagagagcctctggccaactccttcttacccagcctcagaatatggaagggacttgttcccacatcatgcctggttgatgtcagggccagccttggagccctgtgccttggtgctggatccatggctacagtcaactaggtcctccccttcaaaagcatcttccccctgatttcacagtattcaaatcaacaatgcacataaatcggagtgctctccactccatggaggaagaaagacacaactgggccccccaccccaagggcagcctgggcccccagttctctcccacctgcacagttcagtcttgttaaaggcatcctggaaacaggcatcttctgggaccttgctcaacagctgataaagggaacattttactgtcaacatatcctatttcccccgcccctttcccgatacacagccttaagcagaaagaaaaaaatctgaaatcttttttaacttcagaaagagggactgagtgagccatcaggaagctctttctgcttccgagaacagcaaacagtaggaagagtaactcggggagaatacgacatctcttgcaagggctggtcctgggtgggtggggtgcggctcggcccgggggaccaggggctggccggcatagctcgcgcgggtaatggctgcagaccggccgcggggagcggaggcgccccgagaagccgggcaggtactacctaaatgtttggtggcaagggcgagggcgagggggcggcgtactgccctaggtaatgatagtctgggagccacgcgggggctgcccgtcgcggtcgcggctacaaagacagctcggggacctcccgctttcctcccctgggt

SEQ ID NO: 26909 - DNA, 1641 bp, Bovine  19866880978362
  misc_feature (1)..(1): n is a, c, g, or t
nttccattatgcccagcaacagcacaaaaacgttaaaatttcagtggctgggacttcccctggtggcacacgccatggagtgactaagcctgtgcaccacaattactgaagcccatgtgccctggagcctgtgctccataacaagagaagcccccacaccacagctagagagcagctccttctctccacagctacagaaagccctcgcgcagcaacagagacccagagcaaccaaaaataaaaagttttcagtggctgaatttacatctcagacttagaagcagtttgggaaaaaaaaaaagaaatgtcattcagaggccacatatcccagttttggtttggaaaatgtggtcagatgagccaagacggaagatgagtttttcaatcctggtctggcggtcatctttggagtccctctgtccatcctggacttacagacggcggccactggagacccaccacgaggctggtctctctgcacactcaacaatctccagtgagaggagctcagagctcaccgaagcgaggtactggtgtttaggctacatcctttctggggactaatctaaatctctccttcctctaaagaagtgctttggttttgtgggactctctctgcttttgccagaatcatagtgtctatgtcctcagtcacctctgctcctgtcttaaagcttgctctcagatactctcctgtttgatttcttgatgctcgatgcaaagagtggccctcacatcaggcaggacgcctgggccaccctgcagcctggggggtcccaggggtgtacagggcgagggccccaggctgccaggcaggcgtcgtgggcgggctggaggggctctcaccgtccacgtgatctccatgttgttcttcctggtcccctctcccttcacatcagaggggttggactcgggggctggaacccaaatggagacaaagtcaaacccagggtacgcatcacagggcacagtaaacagcctctcctccccagctgactggccccttccatgctcatctctgcatttctcaacacactcagtcccctacgcagctgagctcgctctgccactctgttgtacatacgatgtgtgttcctagctgagacttaaacccccaaaggagggatagtttcttctgagttttaatcgctgacaaaatagcatttattacaaggctttccacactttagatgatcaatagagccaactcaatgtggattatcccctttgtggattatccactaagtgtgtttaataccaacttggtttatcctggcattcgacattttgggggagcatctttcaccctcaatgagccagtgtgatttcagaaattgaagcatttcattacccaagtatgttaagaaaccttatgcaacatgagattatatgtttctaccgccaatcttcatagctcttccctttaaagcagatcatcaagaattattcataattattactaataagtagtaataaaaatgtcagttaacatttattgtgtgcttactacatgcacattacattaaggacctgaattgtattttcaaacaattgtattttcacaacagccctgtaacggagatggtataattattctgtttcataaatgaggaagccggaatagctgcctaaattcacggg

SEQ ID NO: 26910 - DNA, 740 bp, Bovine  19866881042940
  misc_feature (1)..(1): n is a, c, g, or t
naaatcctgtatgattctacttatattaggtacctaaagtactcaaattcatagaaacaaaaaacaaaatggtagttaccagagattaagagagaggaaatggggagtcattgttcagtgggtatagagtttcactttgcaagaggagaaagaaaagctctggaaattggttgtacagcaacatgaatacaccctacacttctgaactggacacttataaatgattaaaatggtaaagtttactcatcgttattcattattaatattattaatactcacttgtattcattatgaaatgctactctattatgcatgaaattctatgcagttttccaatactgaatttatactttttatccagactgggtaagggcagtacctccgatgcaaattttaaggaggtgccaaaaaacttaatagtcaagataaataatattttaatgcattatttttaaaaatcaaaattccatgaggaacaaaatatcaaaatttaaatacagaccagatcagtaaaagggccatgtcaagctatactgggccctggggcaaatggaaaaatcggtaatactgattcaaggttaaacctttttgttctccacccactgtcagaggatcttgccataatcttttcagtaagactgaattcatctgatctaacctccatcgcatttcctcctctttgagctgtcagaatttcacttttcctttactcctggtccctggagatgttctccctgttg

SEQ ID NO: 26911 - DNA, 1663 bp, Bovine  19866881043435
  misc_feature (1)..(1): n is a, c, g, or t
nctgctacatgctacagaatcccctcttatttggcaaaaatgcagattcctaccccaccctgatttattgaattagagtaggggagaatgcagggcctggaaatctgcacttggccagcagtccggtcaactcttatgcacgtgaatagctgagaagtcctgctgtcgaccatggactgtggagtgtcacagacctgggttcaaatcccaggcctaccatgaggtagctacgtggactggaactaattcctaacctctcatctgtaagacatggcgtactataccggcctatttattggtcttgctgtgaggattcaatcagaccctgagaaaattgattcaaagcaccaggcatacagcctgctctgaaagcacaccccatctagtggcaaagaggatgcagacataaatgcctcccctgggagggaagcgctgcacattactcaccccccagcaaacacagagcagctttaaaacaattctgaccctgcctttcctctggggtgagctcagtgacgttttcaaggtgactagggccgttcccaccctgaggtgtgagccattcctagctagggtcaggcattggcaaacctctggttggccagggtccctgggaccttcagccttgcagcaggctgccaggaaccgggagtctacaagtccttcctttcccgggctcccctagtctggctgatccaaagaaatgccaaaacttgtaaaaagcttcagccattcataactggtcagctccctcgggaaacactccccgctctgctgaaagcttgccaggcgacttggtgatgtcgtgctctcagcccacacaatgggcagagcaggaaaaacatcccgcctgtccataggctcacatcctcctggggccccaccctgcggctcccagagtttggggatggcggtgcagagggaggcaaagggcagctgtggaggaggggaaagggggtggaagcaggaccagatctccccagtttggctgcctccggaacaagctgggtgggttagattacaagttaaatctgctttttctggctcccctgccagtccccggagaccactgcttaacagccccgacactgaaatggactaaaacctgacctggtaaacaaagctgttcagagggcagtcagcaggtaggcacacccggtgggaggccttgccttgcacttacttgactgtgcaagctgttaaacctcccaggccctcagtttccacatccattgaatggggagtattcctgtatgtcctgtctactacacagcgtgttctcacagcaaaatgggctaccgtgcatgaaagcccctcagtaaccataaacacatcactggtgtcattgtcattgcagagggactggggagtgaggtggcatgcctggggagaaacacccgtgaggacatggccctcttcggcccagccagctggcaacctgaacccagagaagagatctaacagcttggaaacatggacacgtgagtgctgaccacaagctgtgagaatgttcagacaggcttgggggccggggtggggtaggataagtggagagggagcaggggagcgtttactggagaacttacccagagaccacagttccatactaagctctgtgtttttccttagcgtcgtgtatatttagggggcctttggaaaaggg

SEQ ID NO: 26912 - DNA, 1953 bp, Bovine  19866881074898
  misc_feature (1)..(1): n is a, c, g, or t
ncctgcatcaccagtagctgtgcctagaagaagctgtcaccttagcagtttggaaaggcagaagcctggcctccggtttttatgacattcagatagaacaagcaatactcattttctgccaagggatagctcttgaggttagagagttgtccttttctctgtgcatggagttgggtttatttgaaaagggagttagtttatttgaatattgggacgtcaaactacttaaagccaaatttcaatctgcaacccattttccctttttcttgagataagcttgatacaaaatgagttttcttgactcccaaatccctaagttacacttttttctcaaagcctaattcaaaattcacagtggtgctttctgtgtcttaaccactattggagaaaaaaccctgtaaacctgcctgttgccatgtcgtggagcgactggactggtgacatctgtagggcgcgctctgtgtggctggtgggacgccaccattgtgcatacactttgtacatcggggtgaagggagggttttctagattatgggggagggcaaaattgggattttttttgttgttccttttttgatgggatgtaggggtatagtactcagtttatgccctaaataacttgtataaaaatccctgaagtattgtgtgggtgtgtgtgtgagtgtgtgtttgttatatgtctggcaattaaaactttgtcttctggaaattagcgaattctctttttttctccagaagtgtttgttacaagatttgtaaataagagctctacttagtttgtttaccaagaacatgttgcagcaaaccttttacacctaattcccacgaggttgaagtaacgacttttaagatttgccagggtaagcagcagccaggttctcagtcattgttggccttgattcatctttcagacttcattttcccagctctaaaattcccagtattccttaattgtagtccttttatgttctagaagcaggaagggggaaagagaagaccctgcttaaatgtatttaattgtccatgggccgaggcccgggcatccctcaagactgtaatgttgctgggtatatgtgatcagacaccagagggctgggcattcttgcagcaccttaacagtgctgatacctgcagcatggtactaaggaagttaaaagtttgaatgtaaccactttatttaaaagtttttttcttttaatttaaatgaaatgggggttgaagtgaacatgattttgttgaccatgtccgtgaattctagatgcaacatgcattggtagacttgtgcgatggtcttttgtgatacttaatttttacatatcccagtctctgtatgtatctgcataaacaaagataaaacaaactcctgctttcttttattgaagggtttccaggactgcgtgtctgttcctgagctctgttttaagtatgtgtatcctttgcttgtattttgtattaaaaaataagaaaaaagaacactttattgttgagcatgttggcattgtcccttttatttttttctctttttgggacatatgaagcaagttattctttttctgtatctttttttcttttgtaaactttttttgttttgtttaaaaatggctttataaaagggcttttgtaacccagatgcgtgctctgtgtacttcttgtgatactcaagcgaatacactgatttactatacaactgggcaccttggcctggcacctcccagtctaatttgactttagggggaaactgctagatgaatgaattctttagaaattagcggtgaccgtcactgttgttggtaacaggaaaggtatgttttgtctaaactaggactggagttaggaatcaagaaacagactcattaacctttgattaatcaagggagcacgaagctggatgcaaggggagtcctagttagtgctttcctcacgttcatgaccaggttatgaagtctcacgagg

SEQ ID NO: 26913 - DNA, 1541 bp, Bovine  19866881077539
  misc_feature (1)..(1): n is a, c, g, or t
ntttaatctgttttgtgtagtaagaagttaggttaaaaaaagaggttaagtgagttttaggatccttttcaaactttttagagtttgagttccattgcattttttttttttcctttttgactgggtcatatcagttagtatggctacttaagagagtggcagtgttgtgggtatttttgtggtaaaatgcacttacagcgtactgtcttaaccattcttaagcgtgcagctcagtagtataaagtacatcgatattgtgcagtcatcaacatcatttatctccagagctcttttcatctcacacttaccttgtacttattaaatgacttgctgttccttactccctttcagcccctggaaaccatcattctcctttctgtttctatgaagttggaactcatccagtattttttgtgtgtgactggcttatttcacttagcataatgtccttaaagattcattcatgttgtagcacatgtcttcaaaatttctttccttttcatatccaagtaatattccattgtatgtatatgtcacattctgtttatctgttgatggatacttgggttgcttccactttctgtctcttgtggataatgttaaacactgtcttttaaacataggttaagacattgtctttaattgaaggggtaaaagcaagttgaatagagacacttaggttttcacccagtctttgcccagttttaaaaacagaacccgtatctaattactgtaaattatcagaatatttacttactttttttctctgttaaactttagattttggtcctaaaaaccgattctcaggatcttgttgcttccttcagagtaacaactggaacaagcaataccacagccattaagtcaatagagtttgcccggaaggggaggtgagtacccggaaggggaggtgagtgcccggaaggggaggtgaatgtggcctgtctctttagagacagtcttaaaagtgagcagaacgcagaatacattgagagtcatagtttttgtgtgtattatacttaaactttttaagagtttatttaaaaaatatttgtagaaacggttactgtctggttcttaagtttgtaaaatttactgcattgagccagcagacacatcttaccggagtttcacaggcagttgctttacagaaaagatgtctgagtggtctgtgcttagaaccaaaatgcctggcacatggtaagcactgggcagagatgagctatttattatattgtaatcagaattgataccgcagaattcacatagtaattgaatatgcagtttacttacgtgaaacttatttatcctcttactttcagatgttttcctagtaagtttggttacccaactagaagtagatatcaacagaaacaagaagaaaataggttgtcaataagagaaattgtcagtaagagaagtgatggtcactttagtttgtatagaaatcactgttcacacttagaagacattcatgttcaatttctcttgaattcagaaaaagtgaagtctgtaagaaagtggtaaaataagttgtattt

SEQ ID NO: 26914 - DNA, 2682 bp, Bovine  19866881192071
  misc_feature (1)..(1): n is a, c, g, or t
nattcctgggttgggaagatcccctggagaagggaaaggctatccactccgtattcttgcttggagaattccatggactttatagtccatgggatcacaaagagtcggacacgactgagcgactttcacttgccttcacagcattcctttgaatctaaggcaaagggagcaagggctccacacgccccctggtggggctgctccagggccagcgacccagcgctgggactgggcctgtctggggagccctcactgaccttaacccccggctcctcagccctgattatcataccaaaccctcccagacaccatagctctctttcatcctgaaaaggcctctttcctcgtgcagaaagtacctcctccatagctaactttttccttcatcattctcttttcctccagttagatgtcccttctcgcatcttttcagtccctcttttttctctctcatccaactctttcctgaaactctgttgaagtttttctctccctttccctttcctgttcctttgaaagcgccctccctccttttcccattttcctttcttgtcttgtatttcaggatagaacagttcgacatctagcagctagtgcgctagtatgagctccgtactgtgctgggggcagtaaatttcaggaagtctgtacagtgtctatgccccactagtgcccgactctcctttctccatcgtctgctgctagaacctttctcaacacttcatgtgttacctcggctccctaaaccatatgaaggaaaatacaaacagaagctagaatgaaacctctccccctcccagcacctgccatgaggtggacagcggctcaggaccggggtaagagtgcaggctggtgtggactgtggctttcctctgcggtgtccctactctgcatggctaggtgctcaatgaatgtgaaagtgaactcattcacatttcatgctttttcctctacttcttcctacccttaaattctgtacttgaatagactttctacatgccttctagtgatgaggttccttctcaacttgttatcatctccgtaactacctggatttagagaatttatatttgtcatgactataacatcacatgagctcatcgttgcaaatttggaaatggtagaaaattgcaaagaaaaggaaatcttcccataattccaccacatatagataaccaccattattaacattttgttatacttcattccgtttctttcctatacatatgtgtatttttaataaggttttcacagatgtatcataattggaatatgttatgtagggtagggccatactgcaacaataaagattactcaaattttcctatgttttaacacattagaagtgatttgttgctcctgtaacagtcttcgctgattatttagctttgtgtggtggctttgctgcagagagtccttaaagtctggagctccttccattgtgtggttctgctttctccttaaggccttgttattgtcttcagttctcaaaaagagaaacagagcgtgaagcagacacacccaccgtggttccgagtagcgcacaccacttgtccactcatgttccactggtgggtcccttggtcacgtgtccccacctaacgtctggggaggctgggagatgtagtccagccacacacttggctacaatccacttctgttaaaagagggactacttaacagccggtgatgcttcccacagcttccgtaagctccctggggactgctcactgtgaaggcctgtgctctcacacctcactttccttacacaggcatgcaccctcctctgcgggtgctgccccagcgattagagctcccttacccgtcctaacaaccctaagctgccctggcgattgtcactcatctgtgctctcacatgtcacacggtggggttagatgactcggtcgtctcattgagactgtgggtttcttgagggcagcatcttaaacacaaattcagaagttaataattttgttgttgagttctgttgtaaaataggtacttaagatgaatttgctaagcaagacaggaaatagataggagaaaaagtgtggacacggccagaactgcagaggcatcagaaatgagcccacctgatggagcatgtgcgaagagagctgtgtggggatggtctcagggctgcgggtgggagcattgctagaacggaggccggggcagatcccttcatcagggctctcttaaagtgactcctcacgcgtcatttttaaggagacgtgttggtgtgatggctatttagacaacaacacaaaacatcagagaaaaccaggggagacagtcttgaaaaaccgagagaaagtggcgcacgggcctcccggtccctaccagtcacccgcacaggcctcacctccgctcgggctttgctccccaggcccggccctgaccagccagggtggtagcctctgtgcgcagctgctttcctagagtttagaagctggctgtgcttctgggttctgactctgcctgaggtttcacattggagtggtggcagcaggtcaaagtggaaatgggtgtagaagatgtaggtctgataaacgaagtcttttctttcgagctgcttggatgtgaatggaggggacagggtacagcagaagcaggaaagggatatgagttcagtaaagggcttttgcaggaggtgaggaagctggggtaatcttgttttt

SEQ ID NO: 26915 - DNA, 950 bp, Bovine  19866881215150
  misc_feature (1)..(1): n is a, c, g, or t
nacacaacttagcaactaaaaacaacacaagtatcattcaaactttctgtgctttttcttctaatgtcttctctaaggcttacaactcgccattgagcctacaaaaaaactatttcaaattttttctgataagactataaactctttattatgttatgctatgtattaacctctcttgcacagcctctccagaggcattatttggaagggggtttgtctcttctgcttgactggcaatacttttattttacaaatatgtacagggcacgtgctacatgtcaggcaccaataagggttttccaaataccacttatttagtcttcataatgccctatgaaaacagtactattcttatccatcattttccaactgaggaaattgaagcccaggaacttcatgttattattgaacatttaataatgttcttattaaacagcaaatttatgagctagtagccatgaaattaaaagacacttactccttggaaggaaagttataaccaacctagatagcatattcaaaagcagagacattactttgccaacaaaggtccgtcttagtcaaggctatggtttttccaatggtcatgtatggatgtgagagttggactgtgaagaaagctgagcgccaaagaattgatgtttttgaactgtggtgttggagaagactcttgagagtcccttggactgcaaggagatccaaccagtccattgtaaaggagatcaaaaaaaaaagtttccttgattttttatttgaattgtgttgttgctgctttgattatggacggttttatttagtccttgcatagattcccccaccccagtataaaataagcttgttcagagacaccccggtttgtttttgtctctggaagcccgtacaggtaaagcaatataaactaataatgattctttgctggagaccaaatgaaactagctatcttcataaac

SEQ ID NO: 26916 - DNA, 896 bp, Bovine  19866881225422
  misc_feature (1)..(1): n is a, c, g, or t
natgcaggagacgctggagatacggggttcagttcctgggttggaaagatccccggagaagggcgaggcaacccactccagtatttcttgcctggagaatcccatggacagaggagcctggccggctacagtccatagggtcacaaagagtcagacgtgactgaagcaacttagcacaggacacagtgtgctaataaattgaaaaatcagtgaaatttaacatttcctttttatctgtatttgcttcctcagcgtttactaatgcagttttctttctatctgctgttacaggatatttttctctcaaacaacctggctttcctacagatgttcatagaaaaaaaggttatttaaggaatatttttaagacactgtaaggaatatccttactctgatttttttcttttttttaaagaaagcaccagtggcagagagtcgtttcactgttgcactgtgggggttaaagaatgaatttggagattttagtactcggccaaatatgtgaaacttgaacataagtagcaattggactattctctttcatgatggttgacttcacagttgtgaactttgtaaagaggtgttaaagataattccatttgctttattggtttgttcaggtattttaacaagaaggtttgtgttcacatgttttaaaaaacctatcagtgtttccaccatgcacttctgtttttaggggtttataactttaagtcttaacattcctagtaacgtgtgctttcctcgcgaagactagggggaagggtcttttaaaactttagccttagtattttatgtaatagtctctttaatatattaatctgcactaacggtttctgtgatatatgcacatcctttagagtaatcacatcctctaggttatttgtgtgcatttg

SEQ ID NO: 26917 - DNA, 1429 bp, Bovine  19866881238714
  misc_feature (1)..(1): n is a, c, g, or t
ntttttctcttaagacagttgtttgccctttgtaatcataaggcagttgtggcagagtaaggaactggccctgccttctgcagaaagggctccatcctttgccctttatcacacagatttttagaagcctgggaagtgggtctcaagaaggaagagactcatgtgatagcagagggtgagaaggcccagggaagaggaatatatcctctgggatcagagacaagataaatgcttggatcaacacacacccccacagaggtatatttagtaaactttgcttctcatagagcttgaaagatcaaaattgctttttaaaaaataatagaaaggaaacagccactgtggtttcttttgacatcagtccaatttcttggctgtcacaatacttccaaataacatgtgtaagacctctctgggctgtctctttccccctaaaatccaaggcaaaaaacaacaacaaaagtctgctgtttcagctgcatgacaatgtgtggccagaggcttcctgagagctctaacagtcctctatactttatcggacctgatgttttcccagcaaggacaaaatggcgttatgcaaatataatatgggctaatggtgtcaacccaggccaacagcctgaactagtgggttcactatgtaatggtcctgggtagtctttgaaatccacctggccagcatttacaacaacaaaaaatacaggccgttgcagtcttccccatgggatccgatgctgtaaggtaacgcttccctatggccctgagcgctttctcatggactcgccagtcctctaattctcctgcacccacacttttttcttccaggtatagctcagaggagaaagtacgtcatctcctacgcaagattaacctttccatctattgttttgatcccattttacatttaagacagtctctagttattctctccataatcagttttattgaaattaacttacatatagtgaaatgcatccgttttagcaaatgggtgagttttgacaaaagaatatacctggttaagcactagtcccacaaatcaagatataaaacagtgttgcctccccaaaagctgcctcctgcagtcagttccccagcaaccactgctgaaagccggcagacctgcttctgtcaccgtagattagttctggctgtagtagaatttcataaacggtgtcatacggaattcagttttttcatgtttggcttcttttgctcaatataatatcttgagatgcaccctcttgtgtgtgtcagcggtttgctctttttattgctgagtagtattccctcatatagatatgctagtttatttatccatgtatctactgatggacatttggattttttcctggctgtataagctgtaaacatacttgtataatcttcatgtggacaggctttcatttctcttgggtaaatacctaga

SEQ ID NO: 26918 - DNA, 1723 bp, Bovine  19866881252699
  misc_feature (1)..(1): n is a, c, g, or t
ntaattttgttttttgtgtttatttgtttcagactgatctactctcgcccaccagccacagctcacctttccctagttctcttgaagctgagttcctattgaggataggatgagttcctatggaaccctggccaggaccctaccagacccatccctgtctacacaaagctgtgcttttctgctgagggtctgaggcaagctctgggcaggggtgggggagggggagggggctgggacctggggctgctgggccgcagctgtggctccaaattgctcggaggcccactgcctggtctgcaattcggcaggaaccacatcaaacaaatgggctctgatgcattaagtggggagggggaggctgaaataggcgcccccccagtgcagtgttgagcggcagaggctgccttgatgaggaggaccataacgaattcccagattccatcccttcaagggcagctgggcaagaggggatatagccttcactcttaataaagattggaggatgacgcactccctcccactgggtcagttaatccagctccacactagggatcagcatttctaatgggctgggaggcacagccttcagaagcgggggatgagggatgacagatattctggggtccctgggggctctggagggaggctggcctcgctttgtttggactcatttgaatcgaggtccgtgttcttcgagtaagacagtcgtttcatctctctacttctgtgctcttgagtgaaggctcctgctctaaaagtgggccagtggaccccccccccaaagtatccaagtccaaaatccaaaatatccaaaagggtgacacaaaagtttcaaattcacctggctacttctttccttcaaaggcacagctgtgtcattcattcatccatatgcattctgtccttactgtgtgccaggctggcctgcagatatagaggtggaaaaaatgatattaattcaggctgttcatcttttagtgaaagaagcagaaaataagtgttatatgccaagcccctgggagagacccgaaataggtgttctgggggcatagagagggaatcttaacgagactgcactgtgcgtgcgtgtgtgcacatgtgtgcgtgtgtgtgtgtgtgtgtgcgcgcgcacgtgtgcatgtgtactcgtgtggccatagcagaatcagggagaactttccgagacagtgtcccctgcacatcttgttaaagacatgtgacccagcacggaggccacagcctgactttcaggagctgagatgatctgtaggggaaaaggtggttagagagatttgggaaggacaaaagagcctggaattaggtgtttcaaggcctggttgtgagcatcagattatgcattatccggttggacaggtgtctgtaaagttgagaggagagtatttcaagcctgccaacttttgatgataatttatttattgaatccacagttattgagcccgttgtcctggacattgtcacattgcttttgcttacctggtcgtctctcttgatagtctgagtttcctgaggactggaaatctatcctactgattttatgtcattaactggtccagaaaaagttattaataggtgctttttgaggggaattaaattgccaaaatggagaagtctgagaaattgcatgtcaaaggcgctagaaatcgcttgaaaggctaaaatttagggtatatgtaagaatcgtaaaagaaaaaaagactgcaga

SEQ ID NO: 26919 - DNA, 3568 bp, Bovine  19866881330055
  misc_feature (1)..(1): n is a, c, g, or t
ntagaaaggagccctgcatcatcgctgcaacagccttgaggcagccccgctacagctgccccaggggagcccgtatccatagcaaccagcatttgtgagttgccatccctggagggagggcaggcagcatcagtcttgctgtttattctgagtggaaacaggcttttctcctgctggtttgggaagtgctccattcctgacagaggtatcctcacacacttcggtctgtttcccctctctgtcagcaaggtgtagtggagatgatatactgattcaaaggtaggatgttctcccggtttctacttgaagctgatcgtgcataaaatcttgcttctgtgttacctgggagctcggagtaggggcaactagaaaaaaacaaatcacgcagctggtaggaacctgagatgtcccgcccccctgcctctgagccagatggcacctcacctgatctcatggcaaaatcaaaaacacatcttctttttaaatgaatgaaaaatgaaaatgaaaaaattaaaacactcataataaatgctttgcttaaaaggtattccagcctgggactctcatttcaatgtctcatattccttttaggccaggcaggcagaggttctacgtttatcttacaccataggttacaggttaaacatgagtaggggtgagaggcttcctaggatgaatgcaaaagacagtcacaggttttcttttaaaatatttaaataatttggtgcccctttctacagagataccaaccaatctgaccctagaaaatatattcaaactcagaaagcaggcttccatgcgaaagaaactgggcacaccaagccaccttcaccccagaaagagagtgacgtcgccaccagctcccgtgaacaggggccacagcccaccacaagagtcccagccacctgacagctggactacataagccggggcagaaactgccccttcctcacactaaaaaccacgtctctcattccccagctcttgtcccttgaaagatggcaaatcttttttttcttttaaaacacacacagaacaaacctagcccgctgtcttttctctatcgctttctgcagcctctagaacgcactcttaaattccagtcttgactcttcccctcctcccaaagaaatgccctggctttgaaatacaaggaatcccacaatcctctgtaaagttgagagaaaaaatgtaccgtttggctgccccagtcctttgagaaggcacacctggtggcgcttatgtgagcccattcctgcagccccagagatggcccctggtcccctccaccccccatcacctgtgctctcccctcccgacactcgttctgctcagacaggacagcaagaacacacacctctgccagcggcgggacgcgtgaccccagtttccccatctacaaaatagacacaaactgtacccatcttacagattgctttggggggtataatcagacaattatgtcaagcgtctagcacatacatatgtgaattgttattatcagctgttacattagttgctaataatagctgctatttttgtgggccacaaatttttccagagcagatatcaacattacatagttggattcccacgctcagtgtctggcgcatggtggatattaaaaaaaaaaaaaattaaaatgtctgttaaataaatctagttgaagaggccataagcttatttcctattggttcccactccatattagactgccttggctgttcccctaaggggatggttatcctcacataacctctcctcctactcagaaaaattccagtaaaatcaaacggaaggaggaaaacgctttaagagcgggaagtctctctgcatatcacctcgccaggactcaccaggcctctcaaaagatcggtcccctccccctgcctcctggatgctgttcagtaaccagctgaataatgaaccatcagaggggattccaactgatggcaattaacactcttccagctgggaagagagttaacttcacggtgcccagatctgccgactccccttccctcttccagaaaacgccagctgctaccactccacacgggaggaccccacagatcagaaagaagaacctggtcaatgaagcaagactggtgatggagacatgggcaccatgagactgttctctctactcttgtatattgtgaaaaataaacaaaaccctgattaataattccttcttttgcataactaggagaaggaaatggcaactcactctagtattcttgcctggagaatctcatggacagaggagcctggtgggctgctgtccatagggtcacacagagtcagacacgactgaagcgacttagcatgcatgcatgcactggagaagggaatggcaacccactccagcagtcttgcctggagaatcccagggagcggggagcctggtgggctgccgtctatggggtcgcacagagtcagacacaactgaagcgacttagcagcagcagcagcagcagggcaaagaagcccaaagggttactctttccaaatcacaggtggaacaccaggcctggatttatattgtaaaagaaaagatctggaaaatatctctggcatttgaaagatcagtatggcatttaggtggtatatagaaagagtgttggcctctgagcttgggcaagtaacccaagccctctgagcctctcctccgcttccttacccttaaaacttaggctttgtccccacgtcacagggctacccagtgaggcaaaggaagtgaagcttccagtactgtgaaagcacctccaaaggtacctagcacatagtagatgctggataaaatttagtttattttcttcccttaatgaaacaaagctgttctattgtattcttaagaagcttatggaatcaaactccagaagttagctggtggccaagagtaactaagacacattagtaactaagacacaaaagaatgcttctaaggaaaggaactcaactctactgcctgggaaacctgagctcccaatacccatccaagactgaagtgtgtgaatagcgtcacttgtcacaggcactaagccaggagggatagggcggcaggctaagaaggagaagggcattcctctcccaggcctcgggcagcagcaggtttaagcaagaggagatgctagaagggtttgctgagcatttaaataccatgaagaccagaccgatatttgtacacaaatgttcataacattagcattatccacaatagccaaaatgcagaaacaacccagatagccactgacagatggataaacaaaatgtactatttatacaatgaaataacattcagttttttaaaggaacggaattctgatacttgctacaacatggataaccctggaagacattatgctaaatgaaataaaccagatacaggaacactgattccctaacacgaggttactagagtagccagattcatagagacaggaagtaggatggtggttaccagaggaggggggcccacggggagttagtgtctaacgggtaccgagttccggtcaggcaggacggaaggttctggacacaaatggatggtgtctgcacacaaagt

SEQ ID NO: 26920 - DNA, 446 bp, Bovine  19866881351926
  misc_feature (1)..(1): n is a, c, g, or t
ncagcagcaatggaggcctagtgaaatagaccctgactctcccatcacacttgatgccttgcatctcttgatttctgctttgaaactaatcaactcccttgctacctctggtgtccattctcattaccatattcagaagtcagatgatatcatgtatctttcttaatttttgatgagtgtggaaaatacatcccagtgtatgagaccccagggtaaagggattttatgttaccagagtagtaacagctttctagatgctggaggctgccttactatatttcacttataagcccaatatgcaacttgggcaaaagaacataggcagttttctgcatttgctagcagctttatttaaaggtgggatattgcttgcaaaagtaggccatttggagacgtgcaaggaatacaccactaatcacctgccagcatctttcttgcttatacca

SEQ ID NO: 26921 - DNA, 628 bp, Bovine  19866881555765
  misc_feature (1)..(1): n is a, c, g, or t
ntgagatcaagctcatttcccaaattccttgttggccattgctttcagattcttgctgttttgcctttgaattaaacatctgattccgagatgcaggaggagtggggccagataatgtgagtttagggctaccggaagccctaaaccaaaagtcactgtattttttaaagattctaaagttgtattagctttctcttggcttggctttaagaatagccaagcttttaaatgaactctttggtgagagcatttctttctccaaagaaattaattctcacgttaatgttttatagtatcttttccccagtgggctggggaccaggtttgcaggtttctgggttgatgtcttgctgcataatgctgcaagtgacatcaattggccatggtgccctaaaataggtctgttcctcaaagctctggtagtctgagtggaagaagagggagaggttaacagaacaaaatcctgtggcacaacttgcttatgagcagttttgtggctagcacttaacagccataggaaataaatgttatatatagacctttgcctgggggtggaaagtagatagacagaaaatcattaggtaatttaagtgctaaattggatagagtttttagtatccaatcactt

SEQ ID NO: 26922 - DNA, 1153 bp, Bovine  19866881601612
  misc_feature (1)..(1): n is a, c, g, or t
nccctgctcctctctcctcttccgccgcctctcctcccctcctcccctcctttctctggctccctcctcccttccttcccctcctgcttccatctgcactctcttttctgtccctcagcccctccttgctcctcttcggcgtccatgccggatgccccccgcctcctttcagcccagccagcagtgcctcgtcccccgacagaggcagggatgcctgagcaggctctggccctgtggttacttggctcgcccttactgcaccctgggcccatgcctgtcctctccctcagccagattcggatctgactggagttgagggcgggcccaggcgtagatggtgtgtaaagtcccccaggtgttgggaatatgcagctggggctgagaacgttgatctgagcctccccccaggctctcttctgtaccagcttcggtctcggggcagggtgcacgtgggtaccagctgggtctgccgatcatctggtttcctggaggggcataatcctacagcaggcacgggctcctgggtgccctcctccctctggagacagttcaggggagcccagggcacttgggtgagtgcaggcatcgctctgggttggagacagagctggaagcttgagaagacctgccttcaggggtgggccgtgctgcgccctaattcaggaggggagcgcagaggacctgggggatccaagcacagtgaatacggaggggccccctagtgccgcccgtgtcctgccccctcctcaacctcctcaagctcctcgagtgctcagcatggcaggaagaccctgtccctcccacagcactgcagtgagcccccgtcccctaggaggggctgcagctgcccactcagacccactgtccccaccccagggagcagatggacaggcagtgcctgccacccccgcctccccacctcactgtctcccctccaccttcctccaacccctcccgcttcctttgcagaatgaagaaggaggaggattccctgaccatcttcggcgtggccgagcgggaccagggcagctacacgtgcgttgccagcactgagctggaccaagacctggccaaagcctacctgaccgtcctcggtaaccgccgctgcacgccctgccgcggccccaccccgcctccctgccctgaccgtcct

SEQ ID NO: 26923 - DNA, 705 bp, Bovine  19866881619988
  misc_feature (1)..(1): n is a, c, g, or t
ntaacatgaagatggtaacggtccctctctcgtggggctgttgtgagatgtaaacctgcacccaatcaattctttcttcccttctccgcaggtcctgttacaagccaaagcctgtctccttgcagagagtcagacaagactcagctaggggtttcccctggcaccccagcccccggggcccctcttctgcaggcccctctgctctgctaacctaaagggtctgcggctttcctggggggctctggtggccaagcagcgtgacagagggggcccaggggcagcccagcccactccttgccccattcagtccctcctcctccctgccagtgacaagccgctgccctgcaggtaggacaagcatccctgcgcccggaggactgaatgcagaagctggaaacagctctccctcacagactgtgtgggcagcttctgaaaaaccaaagttcaaacccgccccactttctcttgggaggcgcagcacccagacagggagagctcagccagcagagaaacccccttcctgccccagtgccgcaggctctcctttctgaccccacccgtacccgggcagacacagtctcccgaagcactgcaggaacgcttggcgggccctgacctcactctgcccctaaggtgcagaagtcatttccttctactgggcctcagtttcctcctctgcaaaatgggaataaagtgaatgcttgc

SEQ ID NO: 26924 - DNA, 1110 bp, Bovine  19866881660980
  misc_feature (1)..(1): n is a, c, g, or t
ngttggagaattttgaccttactttactagcgtgtgagatgagtgcaattgtgtggtagtttgagcattctttggcattgcctttctttgggattggaatgataactgaccttttccagtcctgtggccactgctgagttttccggatttgctgacatattgagtgcagcactttcactgagccgtattttgagaagggttctagatcagaacttctgaaatcagctccagggaaatgacaggagccgtaaacactgacacgcaggaaagttgctcagctaggttcaagacctactttccaggtacttagagatctgtgtgaggattgttggatagtgctccctctttccactacagtttgaggatggggaatgttctcatgaccagaatgacatccattcacctttgctccagcatcctaaccctcacctccattaaaccacctccctgcagagcttgattcatgagaaatggggtaggcaggaggatgatatgaaatattttcttctggctaaaatatatagagcatgtttttttggggggaagcatattctttatgtcaagcattgtatttggcatatattaatagatacatactaagccagttggaatatgttttggaactcaggtttcagaatcttccagaaaccctccacgaagataacatagacaaaggaaagggtattattgataggttttcaattctccatctttcttcatgcagatcagcccagaaagataaaaatacaacatgttacaaggtcataggctgggcaagcaaagaaattaaccaaaaaggagttccaccagaatggcaggtaacatagtgaaaaaagcatcaaaaacatttagatatggaaaagcattaccaatcttccggtcttattgatgataaatgaattgcagcaaaacaatgttcagggcttcttctggaaagctttgagtcagttactctaaaaaacttctggaaactttgttcttctactcggcagtaaaacagatgacctccgtttgggcttatactaaatttcttttaattgattgtttttccttccatgctctgcaccctaacagccaggaatgccactgatgaaatatttagcattggaa

SEQ ID NO: 26925 - DNA, 869 bp, Bovine  19866881809370
  misc_feature (1)..(1): n is a, c, g, or t
nttcctcttatgagcctttttctgcctaaattaaatagctttgaaatccctgactacttaactgtctctaaagaataagaatatttaagtctttgattttaatcatctctaatctgagtgtctgtttacgaatcttccctgttatgtgactgagaatctttctgacatcacagctgtttcctagcaaccttgacccaagcggattatgagctccttccgtgtttcgtggggtggagggactagactgagaggcagggagatttaggtattctctcccccagaatatatcttttgttaccttgggaaggaagagtgcctaaaagtgagaaactgtatttaatattgcctatcttgctaagcattgattctagaagacctcgtggcccttgccttcgtgaattttcatttctctttaaaattccttacacatgaagagtgtttcacactttacaaagtgttctcatgtacagtttatcatacgatgctcaaagtgaccttcctgaaataggcaagcagttgttaatttacaaaggagaaaacaaatttaggaagaggaagtcacttgcatcttagtccagagtccttaatccttttaatagaaggtttaggagcatttaaaggtgatgatagcttaattcaaattaatcctctctttttagagttagtatttgatttcttatttggtcagatttaacggggattttggaacgtttgaattcagatcccacaatttgggaagggtgaggaacagtatagccctcagtgggcatttgaggttatttggaaattcacttcagcttctgaagccttttcatctgtcttcccaagaggcggatttaaattcattaaaaagatgtgaaaagagtgaa

SEQ ID NO: 26926 - DNA, 1332 bp, Bovine  19866881881491
  misc_feature (1)..(1): n is a, c, g, or t
ntggacagcctttgccaacccagcccagctgaagtgagctacggtgaaaaatccccccaatctctgtctcctgccaccctccaaactcccactggtacagctgaacccaatgggaaaccccagagaaaaaggtgtggcccacagagctgggtggagaggtaagagtggatgtggaggggcgaggaagcactcggtgcaatccctgccatgcaccccacatgagcggcacagagcagcggtgcccgcagctgctcacaggctagaggggaacggcctccatcagcgggccaataaacagcaacagaaataccgactactttcgtgctcacaacaaacacttattaaaaattcaccatgagctagtcatagagtaagttcccacaacttttttaaaactggcatcacatggaccatgctctctgcccacaatgtaattgctataaatcattaacaaagaaggaatttatcctcatagtcagaaacttaaaaacatgcctctgtaaaacttggggcaaagaagaaatcacaatggcaattagaaaacagttaaaactgaatgatgacaaaaatgttacagattaaaatttatgggatacagcaatagtttgtatttaaagggagattctgaacataaatgcttacattagaaaagaagaaaagttgaaaattcataagctaagcatccaacttaagaagatgggggatggataatagaaaaaccctaaaaaggagaacaaaaaagacaattaagacgagcagaaattaatgaaacagaaaacagagatacaatggggaaacaaccaaaccaaaaggcggctctctgagaaaaagcaaacggctcagctgcagtacgtgtgcacgtcagaaggatgcactgcagtaaagacggatgtgctacagtgacagcagattagcttgggtgaaatcagaggcttgcgagtgaaaataaaaagctacagaaggttaaatacaggtaacaccatttttgtaaagctcaagaacacgtaaaaccaagttatgtattactcagggtgtatctgggaaaaaatttttttaaagcaagagaatgagaagcacaatcaggactggcatctgggaagagcccagaggggcctcaagaccatggggaatgttctggtccacaaatttaaaaggatgcttgtaaatatgactttttgcaggtatctaataataatttttaaaaactgtaagcaaatcctggtcagtagaatgtctcagactaactctgcatcgtttctctacgtgtcagtatgggaaccgtctcatcctctgctgccctcttcttttgcccttcagtctttcccagcatca

SEQ ID NO: 26927 - DNA, 1157 bp, Bovine  19866881916575
  misc_feature (1)..(1): n is a, c, g, or t
naaactgttcccaactttctggggcagtgctgtatccccagtgtctagcatatggtggaagttcagcacgaatttgccagacgactaagttaaatgtgtgcctgatttgcctcctttgtttctcctggatttcagtttatgaacatcctaagctgcatgtaagcagcagtcttccacttcttctcacagccctactgtgtttctgccctgcaggggctgatgccgcagaggacgaggaagtagatgtcaccagcgtggaccctatcgcggccttctgtagcaggtgagctggaggccaggcctcagggtgcgcctcctcttcagtctctgggtgtgctgctcagtccccactgttcctcagtcccgtctgcctttaggctcaaagagttaactcctgtgatgtgcaagaggtcccttccattctcccttgatagaaaatcttaaggaagtgaagtaattaattttatgccatttatttttactactcattttatcatattgtctgattttcttttatccatcttggcttttgtgaaattttaggtccgtacctgttgcttatggttagatgattctgccctagaggaagggttcatggtttaagcaactttctcctcttttttcctatcccttttctgatcctgttccaaatagtgatgaagaactggaagattcaaaggctctattatatttacccattgcccctgaggtagaagacccagaagaaaatccttatggccccccaccggatgcagtccaaacctccctgatggacgaaggggctagctcagagaagaagaggcagtcttcagcagacgggtcccagccacctaagaagaaacccaaaacaaccaatattgaactgcaaggagtaccaaatgatggtaagggccgcatttcctctctctcacctgatagacccactctccagcacaacctgtaatatcctttctggctgatattcccttaaaggaagttttccatgagtcttttttgtagtgttttacagctttgtaacaattttatctgctttcacttctcttttaaaatgggggagattctgccctcagtacttttcctacgataacacgctttaagtcttctgacgtcggatcagttgtttaagtaccaggcttcctcacctctcctcccacatt

SEQ ID NO: 26928 - DNA, 869 bp, Bovine  19866880280207
  misc_feature (1)..(1): n is a, c, g, or t
nagaaagaagtgagactgaatcttgtctactgtgtctcttcttgaaaatgctgtttttcgcgaattctgcttaatgttatgtgacagcttggatggaaaggaagtttggggcagaatggatacatgtatatgcatggctgagtctctttgctgtccacctgaaactatcacaacattattaatcagctatactccaattcaaagtttttttgaaagtaatttttaacaatgctgttttgaaattttattttcttataacttaagtgcaataaaatgtgcttttttcatgttaaaataaataaataaaaatgctgttttacgggacttccttgaagagtgggtaagagtggtaagagtgggtaagactctgtactcccaagcatagcacatcaggtaactagatcccacatgccacaactacaacctctgttcagttaagttcagtcgctcagtcgtgtcagactctttgctaccccataaacagcagcatgccaggcctccctgtccatcaccaactcccggagttcactcaaactcacattcaacgagtccatgaatccatccagccatctcatcctctgttgtccccttctcctcctgcccccaatccctcccagtatcagggacttttccaatgagtcaactcttcacatgaggtgtccaaagtattggactttcagctttagcatcattccttccaaagaacacccaggactgatctcctttagaatggactggttggatctccttgctgtcaaagggactctcaagaatcttgtccaacaccacggttcaaaagcatcaattcttcggcactcagctttcttcgcagtccaactctcatatccatacagaccacggacaaacca

SEQ ID NO: 26929 - DNA, 1270 bp, Bovine  19866880361642
  misc_feature (1)..(1): n is a, c, g, or t
natgaactttctcattttcaggattggtttgtctgttttccaactcaaagtccattgcattcagagtctgccatttcactgagcttacaaaccaaatttcctggaggcactggtgtgggtggcaagtccacccagctacccggcagccacatggcaccctgtttggttgtttatttactgatatctggggaaagattatgaattggggattcctaaaggcctcataacataaactttattgtttttcaaattttgcaagaagtatggaagggtaaaatcagcaaccaaacccaacccacagccaaaggaccgtgaggtcttgaatataaaatactgggagtttgggggcacttgacatgggcttgtgtcatgggtgcaaatgtcctaatgagatttttccgctcctctggtaatgattttggatggggccccagaaccaaattctattaaatatacattatggcgaatcgggctgtagggagaatccagtggattgatttataaatctgagcaaagtgatgggcctgttagacaggaggcagagagagggggtgaagtcccaagagtgagctgtgagatgattctacattattagctcagacatttgctccagaaagtctctctctctttctctcccacggttctgtttccgacatataaacaagacctcgaaattttaaacagatgaaatacctctgggcagagtttgctttactgatattggatgcattctgttcatagtgagcagctgggtgttgatctgattagctgagagctagaaaagtgaagactcacccttcttccgcctcctgagtactgggaaccacttatgatttctacaaagtaagttaacctcggctgatgagagagctttccttttcgggttttgcctttgagcaacttcaaacttaacctgaggacaatttaaattatttattgctcaaaattaatttattgaatagcttaggcactatgagaataaaaaaaaaaggtgtaaaactattatgaaagtctactagggttctgttaaaaacatcacgtatgtccaagggtccataatggaaaacagagatatttggacaatcgaatgaaaagtcattccaaagggacatttaacaatatggggaaaaattagttgtcagattgaattttcttcttttctgtcaggtccatggggtctcacccagtagggctcagtagggtggggtaaggcaagatgtttctctgtgagggacttagttgattgaaggattttttttttttttttttt

SEQ ID NO: 26930 - DNA, 3865 bp, Bovine  19866880459081
  misc_feature (1)..(1): n is a, c, g, or t
nctggagtgagttgcccttccttctccggggatcttcccgacccaggggataaacccgcatctcctgcattgccaggcagattctttaccgctgagccatctgggaagcccgagtagaaaagcagctaaactcttcttagttagaagcgctggagaaactgagaaaggaagaccatttcaaataagccaaaatgtaatgctgtgtttggtgttaaataaatcccttacttagaacgtggaggcatataagttttactaatacaaaatcggaatttctcccttctaaatgaatgtggaacaacatttaaggaaacattttgggaagtgccaaagtattaacttgttctgacctcatcttcagcttgatcctggggcctcccccagacctcctcagccacccccaacaccgagggaggcaaggccgagggcagagccagaacagggtatgtggaagagtccaaccccagcaaggagctatgttaaccatgaccacagctcagcatcaggcaagaatctcagcattagacaaggtgggattgaaaacagtcaaggcctagtttcaattcaccccgagatgttcacatttcttttaaatgacattatcgtacatttaattaaaatctattgtcttctgtagacttgtaggtaactgaccagccattatactgctagcaactagttaattcttctactttatctcaatttagttttattttttataatgttttaaaatctcaatctttgaaaaaaatatgtacttttaaaatttatttgactgtcctgggtcttaatcttacgtcttagttgcagcatgtgggatctactttcctgaccagggatcgagccttggcctcctgcgctgggagcacagggtcttagacactgaaccaccagggaagtctcggttttgtttttaaatataggttaactcaacatcttttccgtttaaatggcaatacatgactattttcaagaatgtacaaaaaacagaattgtatatgtaagaccagaaaaatcgcctacaatctcaccaccagaggtgaagacagttaatcatgggtacgcttccttccagtcctttattccctgctaagcacggacgcggtttccttttctgaacacatttgtttctgtacagagctggggttgcgctgctctctggcctgactcagctccttaacctcgtgttgtcacatcttcttttctgccctgtaccagtgcgggtcctccaggaaacaggtttccctctgacctcccgaggattgatgaagggactcggaggcatgctgacctaaacggagtgccaggaagcggtcctccggataaggctgcaggaggggcagtcagggaccaggaggagagagggcgggagggggtggcaggagccccccgacacagtggaagctgcccaggaatcaaagccctgactccactctcctcctactgtgcccacactggacaaacccagagggagggcaagggcaggccgcctggagggtgcagagtgatccggagggcaaaagaagagaagccacaattcgtatcatcatatatgctgtaagtacactttcaaaataagaatgcctagtattcctctataggaaagtatcataaattatttatcacagtccctgtggattctttctgaattttttttttttactattacaactagaaccacagtaaccattcttatacatacatttctggctgcatctctgagtattttctcaggataaactcccaggggtggaattactgagtcaggggaatctatatgtttaaggctttttatatatattgccaaatagccctcccaaaggctattacaccgatttaaatgcccacatgcaatgcatatagagtcctcatcaggggagaacctgccagttaatctagcatgtgccatctaaacgcaccacttctgcctggagacctggctccagctgcctggttgaaggggacactagaggaagaaggagctagcctgagcctgccccggggatcatgtctgtgaaaggtcgcacctcccgggccgggaaaaccgaccggttgtcaagacaggagaaggcttcagagtcggttcactcaagggtcagcgggggtgtctgacagcgggaaaggaggtgatggatattgactgggagtttcgtttcatctgacctcatttccctctggccgaatgtgtagtaaacaaggtgggctgtcatacaaggtgcccgctggagttttctccttggggaatagtttcacaggccaagagaaggtcacggcaggggccgggtgcaaatgagaagccctgacggtttggacatgagggagagaggaggagcgcagggggacccagagctggagccatgaacccacctccgtacctgtgatcactgcccccatctgagtccctaactttaacggattggggcacggagatggggcaggtccctcactgaggaagcttcatggtggattctatttcccttcccccaaaggaatcaacaagcacctggggggccagagaccacccccttaatcacgcgccaaggaaagggggatcaagataaggctcccgccagataaacagcagggtaatggtatcgtaggcttccctggtggctccgtggtaaagaatctacctgccaatgcaggcgatgcagggtacacaggtttgatccctgaattggcaagatcccctggaggaggaaatggctacccactccagtatccttgcctgggaaatcccacagacagagcagcctggcaggctacagtccatggggtcgctaaagggtcagacacgacttagcggctaaacaacaataacagtggtctcgtaaacgaggctgcctgtaattgctccctggcagataaataacatgaatatttgatcagcaatttataaattcaatacaaagaaacaatagaccgagtccaagagggcatagacacataggtttatggtttattattgattgggaagaggagtcatattaataatagccaacttttagagcacactctgcccgtggtgctgagaaatgtacagacggtcagtaatttcatcctcctgacacccggagatgactagagtaacccatcctgtccccgcccggtggcccttgtcctgaagctgctcccaactgtctctgccgctctgacccctccctgggaggctcagaggaagggctgcagtgactagccagaccctgactgccagtcggatgcccgctcattctccattcaactagcaaatactcacaagcccagacgagttctggaaacagtgggaatagccatgaacaaaacagatagaatccctgctctcgggaagctatgcgggggagggagagagagatgatgctttgtcttttggcctcaggccctttgtacttggggttcccttgactgcaaggcttttctccgggcatctgactcagcagctcgcttgctgcactcaggtctccagtcagcgctgcctcctccaaccaggcttccttcccctccctgtctgaaacagagccctttcaactttctctcttttgctgtactttatttttctcctctcaccatcttgatatatatacacatgtgtttctgtgtaaacatttgcttgtttcttcgctgtctctcccactaaaaggttgacattctgagattctggcaggagggtgactcactcagtgttggcctcttgggtccagtggagcccatttcctgggtcccgattatctcttaagtgtaccacactgggtcaaggttcttggttgcaagcaacagaaactttgtctgttgggtggaagactgggaacacttcagtgggagacagaagggcctgggaaatacaggaaagcaaggaaccagaaccgga

SEQ ID NO: 26931 - DNA, 1096 bp, Bovine  19866880502099
  misc_feature (1)..(1): n is a, c, g, or t
ntctggcctttaaaaacatttcacgtttaccactgagaaaaagatggccttgatttaaaaatgatacaagtacttcgaatgggcatgctttctgctctgggctgcaaacacaattaagaagcatctcctcagcaccaaatcacctcaataggatctctgccatcctggaggaacatcccagcctacttgcaaaaaagagaggaggatcgaatgtgttgaggattgaatgtgttgtattctgctgcaggggcttaggaggtttggttttcactggttctccttgtatttaacaccaggagtaaaaaaaatagggagtaaatatagcacacgtgcctcttatctcagcctgtgctcatggtgagtgtgaaaatgttatggcccacttatctggggagcagctccaatcacaccaacttcttataacttgacataagggatggagaaagatgcaccataccatcctcagacggagcactctaaatcagtgtctggtcacatttagaactcgggtactgaaaatggaatgcagctgtggcaaagagaagatgttgctctaatgatatacttgaagaaaatcagaaagggcaagtccccttctttaaaaagagaaaaagagagatttgatcaatgatgcatcaaaggaaggaaacaattaatgtcttggggaggagttccttttgctaaacttcctttgatagcttccttgagatggcatttccatttccgttggtgagatgggttgtcctttcttgcccaggatgggattatttcagccctgctgagtcagagaaacctcactgtacttctgctgaaggtatttgcagctggagggcttttggaattgacttgtgttatggtctgagctgtgtccccaccactccccccacaaaaataattcacatgttgaaggcctacccccatacctcagaatgtgactttctttgggaaaaggtcctttaaggaagtgattaagttaaaatgaggctgctagagtgggccataatccaatctgactggtgtccttacacgaagaggaactgtggactcagagagacacctgggtgtgcctacgcagagggaagacagtgtgagcaca

SEQ ID NO: 26932 - DNA, 868 bp, Bovine  19866880561471
  misc_feature (1)..(1): n is a, c, g, or t
nctcactgaagtccttctgaaagtaggacatatcattaagtgtttcatttccacagggcgcccctgttgggatccagggtttatagaaaatcagagcaacatgcagctgaggggacaatgaaggagagagaaaataatcagtagctcaaaagcagaaaagatagagcttaatctgctgacaacctttggatagattttatgtgtctctattttctccattgccttggaaaaactacttctctttaactctcctgaaatcccaagtttcctcacacaatatccattcttggcatttacttcttgccaaacactgagctaaaagctttccctgcattatctcacttaatcctcacactgaccctcactggtatgtatttgaattccagtgttacggatgagaaaacagctcagagtcagtatagaaggaaatgtgctaagaccacacaggcaagcattcaagctctggttgttctggctccaaaaattgtgcactcacaactgttctacagctagccagcaacaaggaacacaagagtaagttccaaaacttcctctagtcctttccagcatttggaagaactcaaaactgtttgcaccctttgcaggcagattctttaccatctgagccaccagggaagccttttgcatccttctgctccttcaaaattgagtcctttttggattcttttcaatagataagccttaaggtatatgaaagtctactatatatgtatcttttaaaatatttattttttattttggctatactgtgctttagttgtggtacatgggatcctttttttttttttttaagttgccacatgtgggatcgaacccaggccccctgattgggaacacagagtcttag

SEQ ID NO: 26933 - DNA, 3041 bp, Bovine  19866880592551
  misc_feature (1)..(1): n is a, c, g, or t
nttgcaggaaggcactaaatagcctcttaactggcacattgttgtcagtattattacggctttttcctcactcctgtctctggattatggtaatttttttagtcatgtattttaatcagagttgaagtctctgagctgctgacagctcaagagagctgtaactgctctaagattgacttcacactgtcacaaaatcataacacaaggagaaatctggagatcctcacaagcctcctcctgccaattaaaaccaaagcacctttctaaacagcgggcttcttgttcaggctgcacacacaagggagaaaggcacagggcaactccttcccccaactcctcctccctgcagagttcaacccagggaaacgctgatcctggcaagggcggtcctagaagcagacactgcaatttcactaatgtaactacaggaagccagaaatcattgctgtgacatgccgaggctcttacacagcatcaggctctgttgagttcctctggcctggcagggcctcctcccagatgttgttcacgatcactcatctgaacggccaccatggaccagagtgaatggggtagccatcttctttggaggtgatgagacggaggcagccagacccctggccttgccttcttgtcgtcacgtgtgtggaagtcccctactgaccaagtacaatgctgactgcaaagcacctagcattagggcatgtgtttggcagagatcactacatcttttttctgtcaccaatcttagacaaaccctaggtattgctctgctctgctttgagtcctctcttctccacgtgtaacctcgttctctttgctaggaccgtcattcttagaacccagtgaccatgatctaatttaggtttgtcctctacgccgagccaaaccttcatttgcccaaggtcctgttctcaagtaactaccatggacagttgacctgaagacatcaggcaggataaggtaagtgatgctgcaataataaacaatcccaaaatttcagtggccaaaacaagggtttctcaatcctgttgcccgtccatcacaggttgctaaaggactctgctccactgagttgagtgacccaggccaccatctcaaaagttgaaatcatcatgaaaggaaagaaggctctaaagtattttcctggtaattaaatacactggctcaacaattatcaatattacttctactctcaagtcattgaccagaattaaccatattgctccatccaaccagaaaggaagcaggaagtacaatctttttctgtgtatccgaagtatagagatatttggtgcattgcataaatgattaacacaccaattcatgagtgatcactaagaaagaaagtgaagattcacagagttcctctcccacttatactcactggtacgatgatgcttatgatggtcaaatcgccagtgctggacatgggcaatcagatcatgggcacaagggaaacctctcaattcagacttcatatttgtatgatttgccttcttgtcatcatatgtgtggcagtcctctcctgaccaatcaggcccagcgacaaggcatctagtcttagggtatgtgctagttctcaaagtggtttgccagagtaaatcaaaaattatataaacacccactgatgatgaaaaaggatgtggtgaaaaattgaggagatcagggtaggaagaattgaaagccaagcaggaatctgaaagggatggtggcatgatgaaaatgtatctgcacgtgtgctaagtcactttagtcatgtccaattctgtgcaaccctacagactgtagcctgccaggctcctctgtccatgagattctccaggcaagaaaactggagtgggttgctgtgccctcctccaggggatcttcccaacacagggatcgaactcatgtgtcttatgtctcctccactggcagacaggttctttaccactaacaccatcttggaaccccccaaaatgtactcagacaggataatttttgctgttggctgcttgttttctggaagcaagaaaacaaaaatgccagtatgaaaattataacttgagtctaacatgaagcagctggagaagcattgcgaggaaagtaatatctgatctcagtatctgaggctctggtggaggaatcatggacatggtaagatggtggtgtggggagatagactcttgctcttccgggatccaggagagcagctggacaccagcaggaactccagacaagggcagcaagaagtcgagtctcagtaaacagagggaagcaaaataatgctcttgtgccccagcaaatgctatctatgtgcccagggcaaagccagccaaggcaaaagcaaacccaagtacaatccatggtgtggtgttgagaacttattatcaggacaggagggggcagggctgcaatgacagagatgtctgtgcccccaggcagcagctcctggaaagcagacctgtggggtggcaccacatcccacctgggagccaattctgtgggctcttccttcagcacatgaccgaaaggagagtacatgttgccacctccacctgccatcttccgccaagccactctattccgatgcctggatttttgtagctgtagcttcctaactggtctcttatttaaacttttgcctcgtgggtgtctatcttctatgaaacatccagaataatcctcttgaataatcatttctctgctcagtgagaactccttgtcttcccaatccactcagaggaccccaaggctttcccttgccttagaaagccctgcaggatacagtcctctgaatcttatggtacctcaccccccaccatcccttcctcaaccattcagctttagttacaccagcatcgctgcttctctgccaagccttccatctcagggcctttgcacagactctcctctctacctggaaggcccttctctcagtgattggcatcaggcctggcaaacaggcctccttgagggtctctgctcaaataccatatcagtgatatctaatggttactaactcctccttgagggtctctgctcaaatactaccatat

SEQ ID NO: 26934 - DNA, 3960 bp, Bovine  19866880613280
  misc_feature (1)..(1): n is a, c, g, or t
naaaaagcaagagaattccagaaaaacatctacctttgcttcattgactacgctaaagcctttgactctgtggatcacaaaaaactatggaaaattcttaaagagatgggaataccagaccatcttacctgcctcctgagaaatctgtatgcaggtcaagaagcaacagttagaaccagacatggaacaacagactggttccaaattggaaaagcaatacgtcaaggctgtatactgtcaccctgcttatttaacttatatgcagagtacatcatgccaaatgccgggctggatgaagcacaagttggaatcaaaatttccaggagaaatatcaataacctcagatatgcagatgataccactcttaagggagaaaatgaagaggaactaaagagctccttgatgaaagtgaaagaagagaataaaaaagttggcttaaaactggacattcagaaaactaaaaccatgacatccggtcccatcacttcatggcaaatagatggggaaacaatggaaacagtgacagactttattttcttgggctccaaaatcactgcagatggtgactgcagccatgaaattagaagacacttgctccttggaagaaaagcaatgataaacctagacattgtattaaaaagcagagacatcactttgccaacaaaggtccagacagtcaaagctatggtttttccagtagtcatgtatagatgtgagagttggaccataaagaaggctgagtgatgctttccaactgtggtgctggagaagactcttgagagtcccttggacagccaggagatcaaaccagtctatccttaaggaaatcaagcctgaatattcattggaaggactgatgctgaagctccagtatcttcaccacctgatgcaaagagccaactcattggaaaagaccctaatgttgggaaagattgagggcaggaggaggaggggatgacagaggatgaaatggctggatggcatcaccagttcaatggacatgggtttgagcgaattctgggagctggtgaagaacagggaagccccgtgtgctgcagtccatggggttgcagagccggatgtgacttatagacctaacaacagcagcaaatgcgttttagctgtgccaggtcttatctgcagcgtgtgggatctagtgccctgaccagtaatccaacccgggccccttgcattgcaagctcagagtctaagtcactgggacaccagggaagtcctctaaagacagcctttttaaagaaaagaagatagaaaagcaaagaaaagaaaaactttctgtatgggaaataacagaactctcagcacccagaatcagcttgcgctgaggtggtcttacttacccaggttctacattctttttaaagcaaatccaaaacatatcatatttattgggaaatatttcaatatgtatctgtaaaggacaaggagtctcttttttaaaacataactacattaccaccatcacatctagaaactaataatataaggaccagttttctatacttcagtgtccagacctgtaaacaatacataaaagactggcaaggaatttcagtagatgaggataaaggattcaccaacaaaaaatgttatttcacagacttccctggtggtccagtggttacgactctgtactttcactgcagaggcgtgggttcaatccctggtccggtgactaagctcccacatacagctcaccatggcaagaaaataaaaggtaaataaaattaatatatagaattataaaaaacgaaaaaatattatttcagttagtttactagtcttggaataaagcctttaaggaaatctcatgactaaggttttaaatgtggaaaaggaatctgttaaaaattaatctgatttaggggtcacaatggcaatttgataaactgtcaatgaaagacagaattttcctccaaacaacatattagaattttctccttaaagcgcccatctaatacgttttcaaggatcttgtaagaagtgaagaacgcaccagcactggctgtcgcctgtagctcacacttccgcacagtggaagttcctgtaatcagtctagagcagccagctcaagtgtggtggacagcgatgcatattccctttcatttctcttagccccgggtagctgaaaaagctgtgttgaaaaagacttcctatgcgtggttgtattaccattctcccagatgggcacttattttagggggcgggaaaaaaaatctttactttcttgtacctttttaatatgtaaagttgaagagctactcatctttatttcctattcccaggaagcctgctttataaacttgggggtttcacgttcttttctgttaaaaagggtattactttgccttgaaataattttctgaaaaatcatttgggatttttatacagcaatgctatacttctcatttcttaatttccttctcgaacatgtacctgttttgatctttgattttttttaaacttaccatgaggcaaatgtactctccaaccaccacctttgatgcatctcaaattataccccttggaattgcttcagtattattcatttcaaaatggtttctcaacatttcttgaatttcatttatacaggtaaagtctttaagcaaaaggttatttgggggccagcgctcacagaatcccaagcttactcagcctcctgagatgagttcctttggaagcagcccaggaaagaattcaggtcgaaagctacaaagcacagaaaaatgggcagaaaattaaatatatatctgaacatatttgcacttaagaaaattcagagtagaatgcccgattctttccaaagacctattagactgatatgtttgtttatttcataatttaatctttccattgcagatgtaatctccaattaaattcccccttaaaaacaacgttcacttcagagagcaattagcatttaaagaaaagaagtttgctcgtgatttgggttctgcatagaactcaagcaactgcagtcgacctcactaaaaagatgatttccaggagccaagtagatgattggtgaagtaattatgttatttaaggccattctctagcgctgaaagatgaatcacatttgcataggtgaaaacaaagcctcatatgggaaaaaataaagcaaagttgttttgcagaaacaaaaaacaaagcttctgtggcttctctttctgaaacattttcctgttactgccagtctctgcaggctagaaaccaaatcttgggtgaagcactgaggtgacccagggaaggtccctgtgatccaggtccccacagagcagctgcagcatcactgcaatcctgtgtgcaggtttattcaatgataaaggaaccaagtttaagacaatgcatgatgcactcacctcccagtaacattattcataatatctaaaatactgaagcaacccaaatggccatcaccagatgactggagaaacacagtgtgggctatacccacaggggactaggacccagattttcaaagggaggggattttgacacatgttacgatacggatgaaccttgagaacattatgctatgtgaaatcagccagtcacaaaagggcaaatactgcatgattccacttaaaacgaggtacctggagtagtcatattcatagaggcagaaaatagactggtgttgccaggggctgtggaagagtggaaggtggggagttatcatctaatgggtacagagtttgtttcacagatgaaaaagctccagagatggatgatggtgacggttccacactgtgaatttacctaaggtcactgaattgggcggtacttaaaaatgctgacactggtaaattgttttcttagagacttttagttttttaattagtttgtttggagtatagttgttttacagtgttgtgttagtttctgctgttcagcacagtgaatcagctatacgtatacgtatgtcccctcttcagtaaa

SEQ ID NO: 26935 - DNA, 2198 bp, Bovine  19866880620136
  misc_feature (1)..(1): n is a, c, g, or t
ntgtaatcacatgcatttacaggtagatagcttgaaggtaaggatgacatgaagttctctaatcttcttggattctgatcctaaagccgggaaaggggaggagatttggaattgtaaggaatttggactggggaaattaaaactaaaataaacagggctcattttactgcttttaagagggcaaaattattaattttgataattaaaatgaaaaatgaaaaactagttttacttcatcagaaattatttatggtaataatagaaatgaacattaaagcagttttgtatattacatgttgtgttttacactagatatcaagttttggtacacacaaagcggtgacattctaatttaactcatttttaaaatcaggaagtagctgccctcaactggatagtatggagcactgcaactcaagcaaacacttaaattacgtgtctacaatacacttctgtgaaaaagagacaatattagtgattgagcacagtgagtactaattcccaaactactgtttcatctttttcctgagcaatcaggttaacagtacttgtaaagcaatgttctaaatcagcatgtgtgtgtgctcagtcgtatccgactctgcaaccccgtggactgtaacctgccaagctcctctgtccatgggattctccaggcagtaatactgtagtgggttgccatttccttcttcactaaatcagcatggaaatgaccaaaatacaaaaccttcaaatacagaagaaaaccctagtcaatgaaggaaactgtagacaacatgtaggaaaatcccaatggctaatattttaaaatgcagctggttccatgtgttcaagaaaaagaatttttggtctaaattatgcttttagaaacattaaagataatcttaattatgaacccccatccaaactgggatttttcaaaacagacaacctctttttaaaatggtatcaaatattacagaagtatcataagtcagtcgaaatattgatgctggagtcaaactgccatagttcaaagctgggttccatcacttgttagtgctatgtccttaaattgatgcctctatgcttcaatttcatctatacagaacttacctcacaggacagttatcaagattgcatcagttaatgtaagcgagacacagaacaatgctttacattagtaagtgctcaacactgctagctgccattgctactaggataaaaaaaaaaccatagagctttgtggattacatttcaaccttaacaatcactaagaaagcaaagatgcaaaatccagctatggtaattttggactagaatgttttaaaacacaatcctcaacaatttttacaaagacttcttaaattttttcaaaattttatttaaaaattaagctggaacatcttagtagttgtgttgtaacattttaagattccagatatcactatccatccaaaaagaactcaatattggggaagctgtgatagaagattctctattcaagatattttgcctgcttatcactctctgattatctttcttctaaacatttgcattagccacagattattaaaatataaatgctatatgtaacaaaataccaatgatatggtatttctaaaatgtattacagttccatacattccaattctcttacaacaatgataagatttacagcagcttattctggattttgactgcttctttcattcattattatatagaaggcctgtgatttaactgctccagaccaaagtccacagcatatgagcagcataaagattttctatttttcataaactattcttgaatcagctaaaacaaatcacttgggaagatacaaattaacctgtaagtatttctaattttgtaccgtaagttttcaaagtctcatatcaaaaacagggaaactatcatttattatgtctgtgaatttaagcaacaagtgacttactcttttgtatgaacagaaacagaaaatttccagattccaaaaattatactaccactgagcactgaagaatttgatgcttttgaactgtggtgttggagaagactcttgagagtcccttggactgcaaaaagatccaaccaggccaccctaaaggagatcagtgctgggtgttcactggaaggactgatgctgaagctgaaactccaatactttggcccctcatgcgaagagttgactcattggaaaagaccctgatcctggg

SEQ ID NO: 26936 - DNA, 2996 bp, Bovine  19866880659645
  misc_feature (1)..(1): n is a, c, g, or t
naactggaaaaatggcagattgcacgtgacttttaaattcttgctaaatatcatttttctcagtctaacttcttaggataccaggtggctataaaaccaagatggctctccccagcggacacctgggaagctgctgggttgccataggacacagggccatctgccacagcagatgccagcctcctccgatgagccacgaaaatgggaaaggatgtggcctcaggttaggaggacaaggatacaggcaggatgaggaggtagaagcaactttccaggttaagagaagagctggaccaagcccccaaggtaggaggaagtgtggagtgtggaggagacgctgtttgccttgttcatgccactccttcaagtctccactcagaggacccccccacaggctaccccgttgaaaacagcctccttctgcacctgccaggctcacctctctctcaccctgcgtcatcgcactcatcgcctccagagatcccaccagacagctgaagaaaaaacttcggaagtggaagacactgcatacgcagggccctgaggtcagcggagctgccagaatgcagtgaatggggctgcgtgtccagaaaggcccgtggagaggaccctggggaccccgagccagctaccccagccaagtggtgcccagcggtgagcacccatttctctgcacatctgggggtccaccagggcagccctcccccatgggtgtccctctggggcccagccacacagcccctgggcccatcattgtccctgtgacaggggaggggcaggagggcaaatctgaccacctagagtcgggtctgctgccaccccacggccagggcacatctgcaaagaagtccgcatcacagggagggaggactcgacggcctcaggcaggctgtggcaaaaggaccttggggtgttctaccgccacccagcagggagggaaacacgagcagggacagtcatccattcctccacagcaagcgggatggggcagccagcaggtggcgggcggagaggcttgagtggaggtgtgaaggagttctctctctagctgagggccgaaatggaggcagaaagccccggccaaaatatatccaatgaggaccatgggctcactgaagcctgctgtgtgccgggcagctggaacaccagagaagccgaaacacttaagccctgcctcggggccccgcaacatggagccgtggtctccgctctgacagcctgcaggaacggctaggcaggctcggtttcagccctgtggttctcctcgcactcgtgtgcatggacagcaggaggggcggagagggagcaggagcctctggccccggggacggccgctggggacatcacaggagtgggaacagccactcggaccaggtgtggacagagagctccctggcagaactacacgcccacgtggtgttcagagcaggggctgggagggaggcgggcaatctgtgcctcgctgaagctgtaaaaataaggcagccggatgatgagtcaaaggaagctggctggcttcacacccttcaggaagaaaggaacggcaacccacctcttcccatcctacttaaaccctgcaggtgtcacgtctcagatctcccgacagcaacagcaaaatgagatgctccgagaaagcagcctttgggaaagcagtctgttttataaaaggaacacagcgtaaccaggaattcccgtctgtggagaagtgaacaagttgtcagagcgtgtcaagcagacgctgcaggcaacaggcagaggggttcctgagctgggcagggctgggcggagggcctgctatcctgcagggtgactggaggcatctctggatcccagataacagaatgaaagtaaccagctgtcagcggggtacctgacagcttgggctcagataccctcttcatagcgctggggaagtttacaaaaggacagtgattaaagacctaaaaggaaatttctcctattcaaaagttcataggaacataaatagcaaaaactaagcacatataaccagaaaagaagtataaagctactaaatgggtcagatcccggcgcataacttctttcgaatttagtttttcatctttaggctgtggcattcgaaccaagtcacattttaactttccttttagttctgaaactctatgattcattaaaaaacacttgcaagaaatcccccaaaatgtcaaaactaaagccaagaaactgaagacctgggtggaatgcactaaggaatagaaattgtactagctctgggtcatgccctctacctgggaaacgagcacccttaaaatggagaggtcggagcgtgcaataaaattgtggtccgtgcacagaatgttctagtcttaactgacgaaacagatatcaataaaccacccagacaggatggaacccacctaagaatttcaagcaaattcacgggcaggattgtggagctgttgaccacgatgtgaaactagttgttgtaacagctgctgtgttagattcagagcagtcaggtcgctaataccaggctccttccaagactcagaggggactctaggataccgctcactggtcgttgctcccttccccactcaccaagctggcggaatcaccaaatgaagcacggaatggagaaagctcaaatctgcacaacgtacggaggtaaaggcaggatggattctacaccaggagccagctctgattatcagagttctttgagggtctggggaaagaggaaagagtcactcttcaggctttggagttacctttggcaagtgtccacaccaaacgcctactgtaggcaagtaaagaacagttgatgggattccatggtcgtccagtggttaagaatcagccttccgcaatgcaggaagctgggttcaattcctagtcaggaaactaagataccacatgccacagggcagctaagtctgcataccacagctactgaagcccacgtgctccaaagcccatgcaccacaaccaaaccaagcacagcagcgaaagagccc

SEQ ID NO: 26937 - DNA, 2514 bp, Bovine  19866880774357
  misc_feature (1)..(1): n is a, c, g, or t
nataatacgtatatttttttctaggctctgtagctgcaaacttcctttagctctcctgttgatctcagagtctcctagcacccctcgactgcccccctccatcctgagagctttctgtttcaggcataatcattactgtagggactgaattttgtcgttttctttgcttttaatctttcttgataaacagtgttttatttattgggaagaatgaaaacttgagctgtcagtttagtttaacttcagctataaaattaatgttgatgtttatcagatgatgattttgttgactatgtattttgacagtgtaaaggggctgatggaatcagctgtcaacccgtttaagatattaaaatattttctatactcaaaataattctgcacttaaatttgaggtgaatattgataagtgaatatttataatgaataaattattcagtgaatattgttaaatctcagatgctgtgatagtatattactataaattgtataactgacgtcatagaactatgtttacctcactcaaaataactgatttttacttacaattacatcaaaaattcaacagtgtaggaaatataattatctcccccctccttactgtttaatttcttaaattgttaacactgtcaaataccttatatttatttttcataggataaattcccacaatgtattaagtcatcaatttggtgaacttctgcattatagctcagtttaatttttttaaggtatagaaaaaaacaacaaccctatattacttatggtactttaaagaagtatagtattatgtccttatttattactccctggtctgtagcatttttcagagtttttacgagagaaataaatggttcataaaatgtctttagtttaactgaaagattaatgaaacttttgtgcttaaacttgttcatgaaagtaagttaaattatggaccttgaaaagctgaaattaaagaagtttttgtcttctttcttgtactaaagttttatttgtgaattggagaaaattaagttgcttttaaattactctatcatcacatgaagtttttgcatgattgaaatacctgtaattactatgtcatttttgtcattgttgacttaaaggtgtagctataataatcatctgctaaattcttggagagcagctgtgtaagaccagttttaacagctggggtaacccagcacagactataagagttgaacttgatcttgaggcaagttatgttatagtcactgagaacttcatactagacatttctgaaatacttaattcaacccaagagttgggtttttgttttatcacaaatatttctttaaacgtttaatgaaaatagtgaggaaaagtatcatcttgatattaacaacctaaagttctaaggcaaaatatgggaacaaaatccaaagtcagttactcatttaaaaaagtcaaatgcactccaaatatcaccatttatgccagtttggtaaacatgaaattaagagatgcttgctccttggaaggaaaactgtgagaaacctagatagcgtgttaaaaagcagaatcatcattttgctgacaaaggtcggtatggttgaagctatggtttttccagtattcatgtatggacttgagagtttggaccttaaagaaggctgagcaccaaagaattgatgcttttgaactgtggtgctgaagaggaagacttttgagagtcccttggacatcaaggagattaagccagtcaatcctaaaggaaatcagctctgaatatttgttggaagggggctgatgctgaagctgaagctccaggactttggcttggatgccaagagccaactcatttgaaaagaccctatcctgggaaagattgaaggcaaaaggagaagagggtggcagaggataagatggttagatagcatgactgactcagtgtacatgaatttgagcaaactctgggagatagtgaaggacagaggagcctgatgtttcagtcgcaaagtgtcgaacatgacatagtgattgaacaagaacaacctacggttaggaaagactaaaaaacaatgacttagatacagagagtaatctgcctcactctgtatcccagaataaatgaatatgctttataataccatattttcatctccaaaggatattgattctgatttattcctctttcagttgagttcagtcgctcagttgtgtccaactctttgcgaccccatgaatcgcagcacgccaggcctccctttccatcaccgactcccagagtttacccaaactcatgtccatcgagtctgtgatgccatccagccatctcatcctctgtcgtccccttctcctcccgccttcaatccctcccaggatcagggtcttttccaatgagtcaactcttcgcatgaggtggccaaagtattggagtttcagcttcagcatcagtccttccagtgaacacccagcactgatctcctttagggtggcctggttggatctttttgcagtccaagggactctcaagagtcgtctccaaca

SEQ ID NO: 26938 - DNA, 1449 bp, Bovine  19866880800792
  misc_feature (1)..(1): n is a, c, g, or t
ngaggagggctcctaggacagagaagaagcctaagtgggaattttggggcttcagggaaatgcactttgtgagtggtcagatgggggccttgtccaagggggaaagcccttgtgcctctctgtgatttctcccctcagcagcatcattgtgttatgttagcggagatcagagagcctctcctgacctgatttgaagctttacgcacatacatgcacatatatatatacacacacacacacatacctgtgtgtgtatgtgtttatttattatcttattttttaaagattttttttgatgtggaccattttaaagtcttcattgaatttggtgcaatattgcttctgtttcatgttttggctttttggccccagagcatgtagcatgtagagtctcagctccttgaccaggaatggaaccgacgcccccacattggatggtaaggtcttaaccactggaccaccagggaagtccctatttgtttgtttataacacttctgagaggctggaaacagctttgcatctctgagaaaaaagatggccatctgaaatcaagtctctcctctgtaaaagacacctgttagctgtgcctctgagccccaaggggggggcggtttcccttggaaggagcagtgattatggttgggcattgattcgttccatccctgggagatgagttcccaaggagagagctgaagagaaattactcagagcaaatcctaggggaggaagtcagtctcctctgtgggaataactgagatccattaggcaggcatatctacatagcatttgcagaagaccacagcttatcatgacaacactgaaatccaactgacattatgcaccaagtactgggggaaactgatagcaaaattgcttatcacgcagaacgataccctagcaccatgttgctaaaattctgtctggtgtggtttatttggccagagtagacagagcctctgaggagtggaaaaagcaggagtttaatcacaccaagtgccagatcccctctctagacccaccccctcagagcatattcattcctggccccacaactttctccccttcctagggtcctgcccaagttaataagtcttggagaaagcaaagaactggcaagttcccccaagcagactgtgtagtgtcttgctcagctagagggtagtcttctcaaggaggatgacagtggggaagagatatgcagtattcatgaaagatttggggcaacaggggtaggaaaaatgtgcgagatgttttctgtttgggagcacaatgaatgtcaatgtttctcaacccaagaggccggactatccaacagagcaaacccaagagggcagtgaataaagttacctgggaagacgaagtaagtttaagagcagttaggtgtcacagaggggggatctttgcagtgatagaaaataatggggtcaatttttattattaataatgaa

SEQ ID NO: 26939 - DNA, 1712 bp, Bovine  19866880803420
  misc_feature (1)..(1): n is a, c, g, or t
nacctgtaacgaaaaagtccctcccattttaatgcacagtaaatccatttctatgcagatttgaacccacattggatcctccgccacaactcaggaaacgattattatctttcctactccttgacaagagatcaaggaaagaagatgatgcccatttctggagagcttcttcttctgaaacactaaactcttctgaagttcattacttacagagtactctttagatggtgggcattgtgatgggccagaggtctagagatgaatgggtcatagcttctgacctccaggactggccagcaagtttagtggatggggactcaagctgaagacattgaaaatgactgaactggcaccagttgctgcaaattggtcaagagaaaaaactcagtggaaagtggacactcagcctgggtcttccaactgggagaactggggagagggttcattgtatttctaagtttgagaacaatgtctggaacaggtcaggtgttccaaaaattatttattgaatcaagggatgaatctcagtggctgatttcccctttttttggctgggccatttgctgcaaggaatcccccttcttccccaagataggacagtgccattgggtaggtatatcttgggaatttgtaccatctgtttggggcccatagagagggtgtaccagatggaccccaggtctattttggtctttactttgcatgtttcttgtttttctgcgtcccatgcagatggataccgtcaggttatttatagcaggaatgtgctaacaataatagagcagttgctgtaattccaaggccgattgaattagtttggctttgcattctttggcgcacctatagcaaacacagggttaaatagctgtgggaccaggatggttcccatagagcatcaggggccacccatcctgacccccttcaccaagacagttctctctgaaacatgggacacagcgatggtgtttgcatgcattccacaggttttagaaacagtccattcatagatacaaaacttctaaaaaaaatacagcactggaaaatgtaatttaacaggatattaatacccatggccaagaatgcaaagatggttcttatgtaaaagaatattcatgattctagaatttataacagtgcacagcaaaggaaaccataaacaaaaacgaaaagacaacctacagaatgggagaaaatatttgcaaatgatgcactgacaaagaattaatttccaaaatatacaaactgctcatacagctcaatatcaacaaaacaaacaacttaatacaaactgggcagaagacctaaacagatatttctccaaagaagacttacagagggccaataggcacaggaaaaaatgctcaacatcactaattattagaaaaactcaaatcaaagccacaatgaggtatcacttcacaccagtcagaatggccatcattaaaaattctacaaataataaatgccgaagagggtgtggagaaaagggaaccctcctacactgttggtaagaatgtaaattggtgcagtcactgcggaaaacgatatgaaacttccttaaaaaactaaaaataggggccttccctggtggtctagtggttaagatttcaccttccagtacagagggtgcttgctgcatccctggtcggggagctaagatctcatatgacttgctgccaaaaactaaagcataaaacagaaacaatagtgta

SEQ ID NO: 26940 - DNA, 1075 bp, Bovine  19866880830097
  misc_feature (1)..(1): n is a, c, g, or t
naccagatgcaactttcactgctaggactcacattgcagtgagatacatatgtccgcatcagttacatcgagcaagtctcttaaatacccagaatttggaggcagatttccaaacacagggtcccaaatgctcaggtcaggcttctctgcttgaagaaatattcctatactctaactcagtggttctccaacttcagtgtacctttagaataactgtgagtgggagaagggtgttaaaaaataaagatgccagaaattctgactcagtaggttcagggtataacctgaaggatccacagacagcgcgtggagatgcctgacctcgatcagtctttgtttttcaagccttcactggataactaaaatttgctcaaatttcaggaactgctgaattttcaacacgttttccatgtgacaagagcattatcctcctgcccagactcagaacatcaaaccccgggaggtatctctcctccaccacggtgtcctggtgaatccacagcaactggccgccagctccggtgggccccctgggagaagcagcgggagcagaggtaaggaacagaactctgtttgcatgcagatcgtttccatagaaaattaaacaagcaataacggcctacagaaagcattgtgtataaccaccacaacaaaaaaaattgtactttaagggatagctcatctaaatttgaaagtaatattagctctcaaaggtcccgcactcagataagatagaggtcaacttaaggagctgaggaactagaaaggttaagaattcatggtaaagatcaaatcttgcactgagaaattcctgtgttgaactgtgccaaaaccagatgcttttattggtaattattatgatgataattcatttaactaggaataaaatagggcatgattgtttacttctgcccatttccccagacaggcaggggaaatgagaagaaaaatctcagaggttttactcttggttaaatgatataatttcctcaattaaccaggaataaacatagcaacaaaataatttgcctttacattatacaatagttgtaaatagacttcttacacctccttg

SEQ ID NO: 26941 - DNA, 861 bp, Bovine  19866880892426
  misc_feature (1)..(1): n is a, c, g, or t
nctaaagaaggctgagccctgaagaattgatcctttcaactgtggtgttggcgaagactcttgacagtcccttggactgcaaggagatcaaaccagtccatcctaaagaaatcagtcctgaatattcattggaaggactgatgttgaagttgaagctccagtactttggtcacctgatgtgaagagttaactcattagaaaagaccctgatgctgggaaagattaaagtcaagaggagaagctgatgacagaggacaagattgttggatggcatcaccgactcgatggacacgagtttgcgcaagcttggggagatggtgaaggactaggaagcctggcgtgctgcagtccatggggtcgcaaagagtcagaaacaactgagcgactgaacgacagcaacaaccataagagagagcttatgcagattttctgcaggattgcaaagaaaattgatttaaaaaatctttatttctgccacagtgctgttcctttcataggaagatcagacttagaactcaaatgttgcgcactgtcctgctccattccctcttgggctttaaatttcttccatttcttgtcagtttcagatctctttacatcccaggatagaatgaaagtataggcatttgcagcaatgtctttggagaaaataaattccagatatagccaataaatccagcacagtcattccctgaaacaaagagaatgactggcagagcagagaaaaatcctgcagaaaacaaaccatcgaaaatacggcagagaagctggcctgccatgctcctgagagcccacgggagggggctgctcacccctttgccctggggtcctcgtgttgcaggaaggagaccccttccaggg

SEQ ID NO: 26942 - DNA, 1857 bp, Bovine  19866880899365
  misc_feature (1)..(1): n is a, c, g, or t
ncctggcctatggccagctttggggatgggatggggcaggaactctttgtctaggcttcatttgactgcaggggcctctccttggggtccttgctgagcggccagagcagtggtacaagaagaatgctcagatttccacatttggaagcctttcaagagatgcatgccctggtctcaccctcaaacaaaggggacagaaccaaatacaaagaaatgctttttcccagtcccccggcaccaactaaatatcgtccatccatccattaaatagctgtgaagcccctgctgtgtggtgcgctgggtgctggaatgacataaaatgaattgcaccctcatctcaagcaaggaaaacatagctacttttccacagggaagactcagtggggagggagcaagagccaggccctggagggggaggaacacagcccctgcaccttgacaagcctgaccctgtcatctctctctccatcgctcttatgtcactctgggcctgggtgccaaaggtccatggtgccaggtaccaaggggataccctcaaaccctccaccttgctgggaaacttgcaaatcacctaccagtatgttcgccagacttcgggaattactcaaaagttttctgcaccaaaatctttctggagctgacaaataaggaatgatgattccctttagatcaaatatatgtttttaaagggaaacagttttctattgtgaatggaaagtaggtctcacctcagaatggagcccatttgtcagtggtcctggaggcctgggagatgatgatctagatgtctccagggtcagggaagaatggtctgaggacccatctcccccactggctgcccccttactaaacagcttccaagttttaggtgggtgaggttggagtcagaaagagaatggcctcgaacttgacacctgagtgtcctccagctgatagaagatcacttcagtgcagatggagccatcccaaaagaaaaacaattgcaattacttagcaggtcctgtgccccgtgttgaatccatcctgctctattcctcacacacaaagcgagaggcccttagtcatttgaagagatggcccacagtaccagtgttgactgagggctctgtcggaaccactttctcaattcagttaacaagcaggggttgccaagggcccctggccagtggcatgcagccccggatggcacctgagggaggtgttgctgtgattctagccacgtccttcatgctccacctgtggatgcagcacagccagctagctttcagcgaggagcccccctcccacccccaaagctggactgcaaaggcctttcttcccaggccctgagcacaggaccagaggaagctgcctctgctgatgcgagcggagcctctgaacaaaggggcctgtgtgagccgccgcaacagcatctgtgggtgcagagccgagtctggctggagtgcttgcagtgcggcagtgggcgtgctgtggaatacagattgcccccgagccttgggggctttgcttgtcaagtggcggggcctggcttgggcagcccaatatccggctgtcaacagcccgcaggcctgtttgcagcatggccagggtcctgtttggtgatttgacaagagtcccaggctctcctggcacatcagaattcagggtttggtgctgccagcgtgggctggctgcttctggaggctggggtgttctccgccatggatcagctgctggcggagctcaggagaggcagctggaaggtccctgaaatgcctccgcttcctgccctccatcctcaggccctccctccattactcacaggaagacatgacaagatgttccaagatactgtctggagaagggctaaacacacgc

SEQ ID NO: 26943 - DNA, 860 bp, Bovine  19866880906949
  misc_feature (1)..(1): n is a, c, g, or t
ngtaagcatgttgcctgttgagctgaaatgaatgcggatctgcagagcagcacgtgatgttcttttattgccccagccctgtcccctgcaaggcattcatgacacttggctggcaggacccagggccggccacctgccacaaatagaggtgactccagaatgtcagctggacagagacagggtatttatggcacaaacgctttgcagaagaaagggagagggggaaataccattaaaaaaagaagagggagagtcctaaaaacccattttctctgcaggaccagactacctacccccaccccatcctgccccatcgccatcaggggctccagggtccaggtcatccggaaccacaccaagggagagctcactccgctctcagggtttgccaagagagagaaaatgatcagtctatgggaagtcccagttttctgtcccaaaggcgttgttttggtcaattcagataaaggctgagattcagagctctctcattgatctcacacttgagggcacttgactgaggatgtttagaaatctctcttgaaatgaccccgccccacggtaaaccatagtttttgtgtctaagtacaagggcctctttgggaaggtggtgaaatgctaccctctctccctgcacacagcctcctctttaggcctgctgactctccccatcctcacccatctgctaggctggcccactgacaagttggcttgacccttgacctcaggcacacatccaaggccacacgggcttagatggcaggtctgagtaatgccggaggtaccatctgtccggcaggaagaccatcttctgagtcagtcctcaagcactgattccatattttcatcacagctggtaa

SEQ ID NO: 26944 - DNA, 1044 bp, Bovine  19866880907157
  misc_feature (1)..(1): n is a, c, g, or t
ngataccctgcatgccccaaagcattatatattctaaagttgttgaaaataggagcttttggtcattcatgtatcttaggagtaaactttctgaaaaagtcctgaacaccatatgccttacaattctatatttcttaaaatcatttaatgtctacccattgcatagaatgaagtctaaattctagagaatagaaacatgacctttcaagagcatacgtgcattgcatttccctacatgcatgttacattctagccttactgcattaattaaaaatttctgaatttactgtgctatttcatgtatctttttgtatataagttattcactaagcctaaagtatactttcctttatttagcttcaagagtccccacactggtaggctttttatctcatttaagctcaatgaattatatccctcatgctattttatttagtagttaatactgttataagctatgttatagtagtttttttaagatgcctgtctcattcctttaagtgctcgagggcaaggattatatattaatcttagtatcatctgtgccttgcttactatagttgattgattaatgctgattgggtaaatgaacatttttgttcttcatttggagaatatttataggggttgttgcttagttgcttatgagaagatgacacagatgtctacacaacttggctctatgggaaaacagaagacagtaattaattaaataaaagaaaagaaaagtagtttcatctaggaaccgctttctgaagttggaactaatacgttattaaattacctcaaatggaaggtcaaatttctcatatgattaagttttagttgttaaagcaaatggcatgtaagggaattttcaagttcatacagcaaaaacaggaaaaaattgcaaagttagatctctgaggtttctgatgtttcatagactaacaaaaggttgctttattaactgcattaatgaacgaattgcttcactggcttaggcatactggtagctttgtcggcccagagtgctttaaagttcttatttcaattcatggatta

SEQ ID NO: 26945 - DNA, 805 bp, Bovine  19866880931215
  misc_feature (1)..(1): n is a, c, g, or t
ngatctggaacctccgcctcctcctacctgtattggctgccatggatacaggtttcttaaaggggtcgaggatggaacagatgctttacattagcttttatgtcctccataaaattaacaacaagcaaaccccgaggaatggagctataattctgtcttgcaagtctgatccaacacagagcgtaagagcttggctcttgaggctaaaagctgtttccagacatcctcaatggaatgttacctctgtaattcacttattgttattagctttatgtatatttacagatagcgccccccaaaatcacacagcaaaaccaaagtaaagaagaaaagaaaagctagtggttttcacgtttaaattacaatcattatgtaagatacaatatcttgccaccctacagcacttctagactaaatataaaatatgcttcacagcaaggtaaacataatacaatagctttttaaaagaatgaatattacctagctctgtcttcagggatgttattctcaatagcaatatcaattcagaaagaaaagtcaagagaataacgacatcttcttagccaataggactcgcggatgtgaacaagatcagcgaaaggactagatgagatccttgaaaggcctctaaagttattgttcaactgcacaaccaaacacaatccaataaaccttcatcatttatgtcgcagtttctaatgaaactaacgtcgtgaaaaagacaccagtgtacacatgggttggagaggtctgggatcaaatatgcctcttgttgttgttagttttaaaccatttaaggcaatca

SEQ ID NO: 26946 - DNA, 852 bp, Bovine  19866880936058
  misc_feature (1)..(1): n is a, c, g, or t
ntctcctgcactgcaggcagatcctttaccaactgagctatcagggaagcccaatacagagggaagatatgatttatgcaaataaatacttctagagtatgaaggtttcccctagacggtgtcataggaaggcaccctacagacctatagcaatttaaataagtgttcaagtcagtcccaagtgaaacagtatttgaaaagcattcactgttggaaggaaggggagaagtaggagaagaaggagagggggaaaaaaaaaaggaggggcagggggaggcggagaagaaggagaaggaggggaactgggaaggggagaggaggaagaggaaggagaagcagtagcaattgccaagagacagttgttcaatccaataaagtaatgatctgtgtgaactctaattattgtatttgcaaaacagtacgtgtataatttgtgggcatccctgttccaacataataaaagagtcatttcatgaaaaccttttgtgttttctttagaagatttggacaaaaacaatgcatctttaactctgaaagcagaataatggattcttgaaagatttatctggaatccaatgcacatgtcattctgtattgattatcttggctattcattatcatactcagcctatcatttatatgcagatgacgctatcatttatggtagtaggttatgctggaagaaagcttaatattatcttcaagctgatttaaatgagctttaagatcatctggcacaatctaaattactcttaaatattaatgaaacaaagatctcattattcggctcaaaacaaaaagttggagaccgaaaaactggtctagcagcagacctggacagagcagacaaat

SEQ ID NO: 26947 - DNA, 761 bp, Bovine  19866880955661
  misc_feature (1)..(1): n is a, c, g, or t
naaaatactgactttagaaccaaaaattaattctgcaattttgaagggatgcagaaagtcagtaaaatctctttaaacataaatccctaatattctagtaagagaggcaactaaaggaaaaaaaaaaaaaaaaacccaccctagatacaaggcatagaaaaattaaaggcaaaaaggttcactgaaagctaactaagggtagagtatttccaggtcagcatttaacagagccacgtttctaaagtacgaatatatttttagaggaaaaattctcagattaaaatactcattttattttaaatgtaaagcttttttcagctcacgttgtctttccattatttgcttacattcatgatataaaacagaataccagatatccagccacccaccaaaattagaggatactgcagccatctctgatgatacagattttccttctcaggcaggcatacacacacacacacacaatcatacaacacaggaagaaaacagcttacttactttgtaaaaaatcatttttagtgtgccgtagaaacccatattttctggatttttccccttcagtgattctgtgcccccgtgtgtccggctgcttggcagtctctgacaatataaacctttttcaggtaggtatgtcacagattctaatgtggacatgctcaggcacgtcagaaaaggaagattaggaagcagaaccggcaacaaaactccacagtagaggcaaatgcagctcagtatcaaaccgcttctcgggacacaca

SEQ ID NO: 26948 - DNA, 2553 bp, Bovine  19866881029483
  misc_feature (1)..(1): n is a, c, g, or t
ntaagaagaagaattaatgccatttgcagcatcctgtacggacctagagactatcatagcaagtgaagtgagtcagagaaagacaaatacatgatattatttatatgtggaatcttaaaagaaaatgatacaaatgaacttatttccaaatggaaatagactcacagacatagaaaacaaacttatgatgccagaagggaaagggaatggggaggaatatattaggagtgtgggattaacagatatacactaatatatatgtaatagataaataacaaggaccaactgtacagcacagagaaatatactcaatatgttatataatgaaaaagaatctggaaaaaagtatatataactgaatcactttgccatatacctgaaacataaatcaactatatttcaataaaaaattaaaattaaaaaaaaaatgtataatagcaaatgggtgaatgggcctccctggtggctcagtggtaaaggattagcctgcaatgcaggagccacaggagacctgtgttcactctcttagtcaggaagctaccctggaggagggcatggcaacccactccagtactctagcctggagaatcccatggacagaggatgttggtgagcttcagtcatatggttgcaaagagtcggacacaactgaagcaacttagcacacacataatagtgaatacttgaaaacgatctatatgttcgacagtagcaggcttgtctagaaaattatcctgcagtggtgtgatgtaatactctatagctatcaaatagtatacttcaggataatagttaatactattagaaagtggttgtgatatattaagtgaaaacctgcagatcaaacacatatatatacacatatatgatctacccttgcaaatgtgcatgcctaggaaaaaagattgaaagcgtacagtgagtaatttctcagtgcgaagatcatgagtgacttattttctctttctgctttttgttttttaaagatttctacaatgaacatttattacttttgtatctaaaaatatatatactgttttgaagaatagtccttttggttgtttccaggtgggacttggtatctgaagtttatattaaatgctagctcagggcatctactgtgagagatgaccaaagggaaaagaggaagtgtacagccatggtctttaaagcagacatttaaaagattgcttttaatttaatctcaaaaggaaggaaggtggtgtcttctctgtagatatttattaatgctggtttgtacgttacccaggcatctcgaacttgccctgaaagtgaaagtgaagtcgctcagtcatgtacgactctttgtgaccccatggactgtaacctaccaggctcctccatccatgggattctccagacaagaatactggagtgggttgccatttccttcttgaacttgccctaaagcccgtctataaagaactggcatgtgtaggcagcgcatgcgcttttcacatccataaattgcgtgttgcccaagactggtcatctatcaggtttgccgatgaacgaagaccaaccttcggaatctcagctttaagtaaatagcagaaaagcttttgggagaggaagtttttgaggaggaggactgtggacccagcttttgcttacatcctcccgcttgccagtcccctgtcttggaacctggcccccgctcatgggcatttcctcatgcacaacctccttgtaagctcatcttggttaaagacatgagctttctgaagcctgagggaggaacagtctgactcatagtcactgttttaacttgaacaaactgtaatagctgcacagcgggctctgatgattagcagcggaatttatctttcttggtttgcatttacagtgacagtgttatgcgcctagatagggcatctacaaagtcagctgtgtcatgctcactatttctaactatacgaagagcagccatatctaatgtaatccatgatagcactgtaattaaaaagtcctgcataacgaggacgtctaataaacaaagcagagcaagtattatgtttcagaacaaataaatgctggaatttaggcagccttaaaacccagtaactactatatagtctcaaaacttgtcccagcaactgagaaatgaggatcagcctttgatagcagagaaaacaagattagggacaaccttttcaacatgggatttagacaactgttgaagagaaatagagaacacaatttacttgacaaaaactgctcatctgagacagcttggaaagatgaaaataaatgcattagagattgaatctatcctgattattctactttagaatctgataatggctatcagtgggcttccctggtggctcagaggttaaatcatctgcctgcaatgcaggagacatgggttcaatccatgggtcagggaagatccaatggctatcagttcagttcagttgctcagtcgtgtctgactcttttcgaccccatgaatcacagcatgccaggcctccctgtccatcaccaactcccaaagtttacccaaactcatgtccattggagtcggggatg

SEQ ID NO: 26949 - DNA, 932 bp, Bovine  19866881041473
  misc_feature (1)..(1): n is a, c, g, or t
nacatcctaaattcattcacatcatttcacgctggttttagaagaggcacatatcttgaatgacagcaaaaatacattttaagttttaaatgacttctatgaaagtgcttgaaaataatttaagaaaacatttaagatgcaacttaatttaaaagccaaaagaaaaagattgtcagtagctcccctttgcctcctgatttaaatttggaggcagttcactggaggatttaagtgtctcctttcagctttttttctcgtcactgcctgctctgtaacccattcccagactggctggcctgcctgctagtcacagaccacgtgcctgcactcctggtgcccttgtccatctatttctctctgagggaggtgcctctgctcatatgtgccccaccccactccccctcacctgcctctggcaggcagaaatgctgcttatcctctaaggcttctgaaaaccttcatcttcatcttcatcttcgctaggcttagcctagtggttggtactgccccagctgaccaactccaggctgaagcaagcgaggtactcacctgaaatatacattttcaaaaggataccaaaaaactcaggactcaagtattttcaaatgagtacccagtcaagtttcactctttgcatttggttatctcttcattctttttttaatctgtaacattccaaccacatcttagaacatgtagcttataagaatgtaccatatctaatacaccttgaaaagcttcactttataatatttatatatgtaatattttatgtaaacacttggaaaataaaaatgcaaagcatggatgatgatatttgattatgtcagaattttaaataaagacaggatcagcatgactgatttttcctgaaccttgggctccagcacggctccaggcgcaccggctggttccccctctgctcatcactg

SEQ ID NO: 26950 - DNA, 1424 bp, Bovine  19866881059579
  misc_feature (1)..(1): n is a, c, g, or t
ncatataagctttgatttccagctgggtgttgataagacaaaactgttccctaatgcttaagtaattgagtggaaaatagttgacaaaaaatgaaaaggttgattttgattatacatagaatctcttctcttaggaacaaaatgtgtttgaataggcatgagtcatttctacagggttgtaagatgattgatttatttatgtagttgttttttttaattgatttttttgggtgctgaaatccaagattgatatgttttaaaataatacctttgttaatatatggaaaaaccaatacaatattgtaaagtaattagccttcaattaaaataaataaatttatattaaaaataaataaataaaataaaataatacctttactggctttgtacatgtatattataaaaattcaagaaacacaccgaaaaacagctctttactcaaattctcttactcaacaataactagtattaatatatcatgaacctcaattcaaatatctctatttacaaattataattggatgaatgaatagatgaatggacaaaatatcctcataataatggaatcatgttatatttccttttaaaataaaaatacatttttccgtggattgaatagaaggcaaaagaaactgaagcaaaaataaaagaaatagtgaaattcatagatctttcctcattcgtaagagattgctctgaggataagaaaaaagaccatgagtattattaaaaggctgtcttataattacttgtttcaattttagacatttttgaaaaactttgccataaaagattaagtgaccagtatactttgactctcttccacttttcttcactccacctctcgattttttgggagctttaattttgtttgcttagtcaagatatatacatatacattctgttctgcagtcattctttccttggttgctgttttttgtttaattttggctctgcttttaaactaattaaatcctcaccagtggtttatctcgtggtggaatagatttcttcatcatcatgatatataacattgattacagcaaacgtgtgtatatacagctttgctacgagccaggcactattcccagcactgtgtgcatattaattttttttcaaactttaaactttctattttgtgctgagtgaagtctctcagtcgtgtccgactctttgtgaccccatggactgtagcctaccagattcctccatccatgggattttccaggcaagaatactggagtgggttgccatttccttctccaggagatcttcccgacccagggattgaacccgggtctcccacattgtaggcagacgctgtaccatctgagccaccagggaagcccattttgtgttggggaatatccagttaacagtgtggtaggagttttagggaacagtgaaggcctcagccatacata

SEQ ID NO: 26951 - DNA, 1276 bp, Bovine  19866881083719
  misc_feature (1)..(1): n is a, c, g, or t
ntgggaaattgtaatctggacaccgttggctccctgactgtctatactctcttgagtcacctcccatagctgagtgaccagctctcaggaacttcttggaaatatactgttgttctctttttcacagtgacaatgaatcctgaaactgaatggtgctaatgctttccaagagaagcagccccggaggaagcccgctgggcctgccaacagaggatgaagaggatccgaatttaattaacttcaaatcaatgtaaacacaagaaccttttgctgttgcttccaacgcccactcttccgtcgcccaatgcatcacctttacttggaagaatgcttgattgagaagtgctgggcaaaggcctggatgccatccatcgctgagggtgggggagccacgaggtgcagtcagcgctcatcacggggtgttccctccgctcagccgacctctagggactggactaccactctggctatgctgagtccctgttacctttctgcttcattccttgagtacaaaactggacactcttatctctggtttccttctgggtcactttatgacctaaatagctggataatttcttctgattagtcaagtcttctgataggtcagtcacgttcagcaggaactttgctcaaggtgagttatgtcatggaaaagacagcaaacaaagcaagtgtttcaatgtgtacgccatcccaggggggtggtaagcttgttcctgcctgccgtgagacgcagcgtgagatacacagtcaaagggatgctgtttggtgacgtgtggactgtaagttggccaggtgacagagaaatgggaattttccatgaaagagcgactgttttccttctcagctaaaatcagctgcttgtttccacttccccatggctcttccttgtcctcgccacacctccctggcgtgtggtgtgtgggtagatgggagcagctgggcctcttccgtcaccttctgtgtcctggagatctttaaggtcatctggaacaaacagaacggcattaggctctctctgtgtgggtggcggggacctctcctcgcactcaggacctctcctgcgcccgggacaggtctggtgtgctcagcgccactccccaggaggccaacacccgtccatcagagatgacattctacgtgatactgttgacatcctcctgctagaagtgacggcgcaaaatcagaggggcctatttatcactcccactcacgtaaaatcaatctccatttaatccttaattttccacttctgacctttaaagcaatcgag

SEQ ID NO: 26952 - DNA, 1167 bp, Bovine  19866881114494
  misc_feature (1)..(1): n is a, c, g, or t
natgaagatatttagcattagcatcattgcccaaggcctccccttttgtcgaagacgggtaagtctcacacatttgaaaaacaggaatatttgtttaaatgaactacttctgcctcttttggtgaaaacatgcttcaaatttcaattgatatttataactaaaactatcggagcattatgtcgcccctgaaaacttctgtaagtgacagttttagtaacatgatagagagtcttgagggcaaggttacctaatttacctttttgtctctctcatttatttttatggtgttagaattctttaaacttacttaaaattagtaaatttaaaaaccatgttttgaaatatgttggcaaatgctgaaaacccaaatttattgtgtttattttgtgggaaaagtaaagagctggcgggactgtcctttaacatgggaattacagtatctagctcttataaagagtttatctggcacttgaagctagattatttttaaatcactattttttaaattaaacttaacataatagagacattactttttgctgttatgtaaaataaaactagtgtgctgttgtgtggcagttacgatatagtttatatatagacaatcctgaagtaacaaacattttgtagaatttgtactaatctgtaatcaggttatgattttctgtatgttcttcaggataacattctcatcccctccaagttttgaccctgtaattaatggttttgttgtattttttgagttacttcatattgccattttgaattattaactagagtaatatattttagatctagttatgtttaggatcctgaatacattaaaccaaaaaatacctgtcagagatgcacatatccatactattagtgttttagtcctttttaactctctcctcttttcttttaactgaaagacaaatattctattaaacaaataggttaacttatagtacctgaaaaatatttttcctctttatttgctgggacttaaatagtctttgtaaaaatacgttttctaattactttagtttttgaactgtttctacttctactccaaataagtggtagccatgttgaaaagcattttaaggtaggttttaaatgtaatacaaattaaacattgaatataaaatataaatctctctgtcccctcattttcttcttta

SEQ ID NO: 26953 - DNA, 719 bp, Bovine  19866881122827
  misc_feature (1)..(1): n is a, c, g, or t
nccaaaaggcaaagcaatgagaaaataaccctttgatatcctttctctttcgtcgttcctttgacttttttttattatgcagctaacaattatgatcaagtagataatatgtattaaatgtgctctaaaaatataatctcattatttttatgggttttaagttttcctaacagaccttctgcttgtgacattcaaaagcaccattatcatcattcctattgtccctcagggcttccagggtggtgctagtggtaaagaacctgcctgccagtgcaggagacataagagatgcaggttcgatccctgggtcagaaagatgccctggagaaggccatggcaccccactccagtgttcttgcctggagaatcccatggacagagaagcttggggggtctatggtccataaggttgcaaagagttggatgcaactgaagtgacttagcaggcactgttccataatcaaaaatcatcccgtcctcctaactcctagtcatctctattctactttctgtctctatgaatttgcctagaagcacctcacataaatacagcccctgcttttcaatctactctcaaaattgtgcactgcacctcccccgccacactctcatacagaggccagaagccatccattctaaactgtggtctttcaataagacattaccctctgtacaccactttatgaagtccttataaaacctagcaagctacatgtgag

SEQ ID NO: 26954 - DNA, 1277 bp, Bovine  19866881134715
  misc_feature (1)..(1): n is a, c, g, or t
ntctgcctcttgtataaaaggcattgattatctgctagctgcccattaatttgaagggaggcagccaggcggagggcagccacgtcgtgtgtggctgagggtgcagcccccttggaaggcatactgctaaacaatggaagtctatctcctgcaagaaattgttcctgctggctgtgcgaacgtcaggctgcagcctgcccctggagaggcagtgcattactatgtatttgtacaatcagcagagccaatgcatgaatgctcacggtggtggattttacaagctactcacgatgggcctctgcgtctatggttaaagaaaaccatacctcaaagtaaatttagcctattgtgagtccttcttattttaggctttgccattttgaaagggtatcgtttcccccaggagaaaatgctctttgtgtgaaatgacttcgtagacatgaaattacaatatattaccctccatttggtacagcccagcctaccttttatactttgttgaaccacttctcatccttgcaccactgatactctggggacagcagctttgggaggcccacaccatggacagttggcaggccccaaggcttcagaggtcctcccaggagagaggccctcccacggggcagaggccctgctgagcccgcccagggcttggcctccacactcaagactgccgctggtggcccggccatgtcagtatctggtgatggagaggcctctccacctgtctgctgctggcttgggaccaagtcaccgcacacagccagcagcaggtggtaagagtttttaaccccaaccgacagtgctgccttcaaactgaaacttagtgaagtcccccaacttttcatctgccttccctcaagtatcatttgctgtcaactttacccttcaaatcatcctttggaactgcgccattttaaccagccaaattaattttgccattagtgaaatcaataaaacattgtaaaacattcctcttggaactttaaatttggctttaaactttttccagttttattgagaaataaattgtcatgcattaccatagtgaagtttaaggcttacagcatgatggtttgatttacatatattgcaaaacgattaccatcataggtttggctaacatccatcttctcatatagatacaattgaaagaaatgagcagaaagggaaacatttctccttgtgataacttgggatttattctcttaacagtttttctatgtatcacatagcagtgttatagtcaccatgttgtacattgcaaaatttta

SEQ ID NO: 26955 - DNA, 1282 bp, Bovine  19866881152778
  misc_feature (1)..(1): n is a, c, g, or t
ntattttaaacataactgtaataagatgctttatttttcaaactgaagaaggcaaatcatttaaaaaaataatttctgcaccaatgagggagagaatatatgtagagaaactcaacatatacatgtatgtactaaaaaaaaaaaaccctctccccaagaaaataactggcagagaataggcatattcacactttcaatctgattgaacttagataaaatctagtttatgatcatttcaaaacactgctgtgttctcctaaccaataaccttgagattttggacctttaaactttaaaatatttttctgatcagagggtatgaatttttatgatttattcaaaatcaataaaaaaaaaaccttttggcacgtatgctatggaaagtgatccacactgccattttacagcacaactcaaacactaatcatataattgcgtattaacatggaccatcttgccgaatctgcttcaggaatgatcttctgcaatacccgctcctctctaggcttatacttgggaattctgcaaaggaccaggaagaaacaaacagggccaaaacatctcgggtaattcaacaggaatgtaatgtgcagaccacgtaacggcatggacacggcaaacaggcctccgaaaactgtttttgcccgtaaggaaagaatccccatttccttccctcccccatccaagagagaggtctcacaaaacagaagtaaatactctgagagattctctggcctccagatgaaggctggtgagcatttcatttcttgatggcaaaaagccttcaatcaattcgttcatttggatggacaagcataggcatatgcagttatcactagaagaaggaaagttgtaattgtgtgtgaaaacagacacaccaaccactaacccagagggcactgctgtgggaggtaagtgaacacaacccctgagcttagagagtctatttttgattgctttcctaatttgctttgatttactagaactaatttgcaatagtgactggcagtcagcccttggaaagggtgtttctaaatttaaaattcaattttacttcatttccagagatgcttattaagccctttctaagtgccaggtaatatgctaggtcctgggaataaagatgggaacaaaaagcatggtggccctgcctgcagtctagcagaatgtcagaatgaagtttatctactcatttctctcatagaacattgactttaaaacactttctgggattccatctcatgccctccacttggccagtcatctggggcttcctcacagg

SEQ ID NO: 26956 - DNA, 1123 bp, Bovine  19866881153207
  misc_feature (1)..(1): n is a, c, g, or t
ntctggctgttactattatttatcccagtattttgtttggaagtctagccttctgacctatccctgctgctgctgctgctgctgctaagtcgcttcagtcgtgtccaactctgtgcaaccccatagatggcagcccaccaggctcccctgtccctgggattctccaggcaagaacattggagtgggtgacctgtccctaataagatgctaatactgcagtcacttcagtcatatctgactctttgtgaccccgtggactgtagcccgtcaggctcctctgtccgtgggattctctacgcaagagtactggagtgggttgccaggggatcatcccaacccggggatcacacgcttgtgtctcacgtctcctgcattggcaggtgggctctttaccactagtgccacctgcgaagtccccagtaagatcggggacagaaatccaaaaccaccagagacactgtgaaggactcattcacgttgatagtatctccttttctgggagtataaatcctcaacttcttctgtatggatcactttgtatttgcagagagcccacaaagcatcattgtttgtgaaagcgttgctgcttgaaaatgaatctgtgtcctttccttgaaaataaatctggtccttccttcacagcaggcactatcaagacctttccctagggctcaatccagacagatggaatcattggccatgaagtaatagtaacacacaattacctctctgtatttttaagttcatagaggaatgattctttgattgcaacactttcttttgtgttaactgaacatttgccacctgacctggtcatataacaattttttcagaactctgattatgtgcataaaaaatgcagccctgtacccctttctggctttctctgatactgtttcgataacttcgggagtataatacatttacatgagtgagtgaaaggtgttcagttgtgtccgactctttgcaaagccatggaatgtagcctcccaggctctgcagtccatggaattctccacccaagaatactggagtgggtagccattcccttcctccagtggatcttcctggatccagggatgggaactctggtttcccacatcgtggtaggatagaatttaaa

SEQ ID NO: 26957 - DNA, 1308 bp, Bovine  19866881154211
  misc_feature (1)..(1): n is a, c, g, or t
ntatttattttttggtatcaaattagaacacatgtcacgacaccactgtcagtcacttgcattcacgtgcgctttcttgagctggagaaaaagagtggaaattagaaatgtttttctagggtgctagaaatgttttcagaaactatagttcattccacgtgggctgcagcttgagaagtgtgttagcttgggtgacagctgcgttaaactctgcagtcttccccagacttggggggaactgaacaacttcatcttgaagaggctgtacttgcagaactgggtccaccgtgtgctcttgcctctgcccaccaccagctttgtggtcacggtatcaaccctttctgtcagcagcctttcatataaagttacagaacacatatcacaagggcctgatttaactcgaggacaaggaaatgtttacgttctaggcctgctccgagtcataggagactggtcacattgtgtaaccttttttgactatttctaggggcatcccatacatagctgttgcaaggtacactgttacagtttgcccagactctagcacctgttaggcaatttgaaataaaaacaagtcggtggggaacatgataaggtatctgagaacacatttctttccattggaataccgttgcggactattccatttcagtaaactctgcaagcattcttccttgtcattatttgccaagagaagaggggaaaaatgtatctttttataggaaacaaacctgcattcctcaggtccaggggccacagacacagtcttctcttgcttattctcctgcagcctttctcctctcccttgtttaggctagtatctccacccttttaatttgtcccagttgccctttcccaaagagctctcatttcctcttgttccccagatctgcacttcctggccccttgcctcttatgagaggacatcacccgagaagaccaggtaagggaaatgaatgaatgtcacgaggttctcagggcggacccatctgacttcacgaaaagaagggacctggcatctgcatccacttgggtaaccctgagtcctgccctggagctcactctcccaccttgaaattgtctccttgactaggagacggctcaggactgcttagagaaacagcgtggaggtcagcgatatctaaccccactagagtcttcctggttccttaggtgatgcccagactgctttttggtctttttgtttctgttctgaaaatatgagtgcttcccctaaactctttatcagctaatgtcattttttacatgttaggaggcgggagatgtgggggcagacaaaacccgaga

SEQ ID NO: 26958 - DNA, 1113 bp, Bovine  19866881175349
  misc_feature (1)..(1): n is a, c, g, or t
nacaggtccgggggagtcaatgagccaaaaaaaagacgtggtccctgtctgcatggaaatggagagagtggaacagaaagacaaccaccaatcatacatataaacgtcaactgcagctgtggtaagtgtacgatgttactgtctcaggttagattagggagcttagatcatgtcctaaagaagcaaaacttcagttgaggtgtgaaggatagttggaagccaacaagtaaaacgaaagtaaagaacgagtggtctagacagggagaaaagcacgtgccaaagccgtgcaatgcaagagcaagacgagtgcaaaggactggtgaaggccagcacgcgtgaaatgaagagttacggctggagggctaggtgctgttacagagttttgtttttaccccaaaagcaatgagaagccataaaaagattgggagggaggagggaagagctgacaatcagatgtgttttcaaaataaatcactgtgcctttaggatggatactggattagagatgatctgaagaagtgggtaaacaagaaagaaggctcctgtagaaatttcaagcgagattatggtaacaaagtaaagtggttgtagtggaaatgggaaacactagacaggtttaagagatatttagaaaataagactaataaaaacttgttgacagactggacctatcagggagaggagtgaataaggttcactcctactttcctggattttccaactggtaagataatggagttattcactaaaataaaaaacaaagaaagaagaaaaaacatattggggcaggggttgggagtgagggagagaccagtttagtttcagaccttgtatatgagatatctttaatactagtccagagaggtgctaacttaaagtaagatatacagatctagagctcagaggagatagaaaacactcacatccttagaaaagctgacatctttatcctagaaaagcagctaaccataatccccaaacatccaaggaaaatattagactctgaccatctggatttagttaaaacaaaaagctgagaaaaaacacggcagtaatatctcaccagcagtaaacaaaaactacacaacatgcgaaacagatattttaaaaaat

SEQ ID NO: 26959 - DNA, 881 bp, Bovine  19866881188844
  misc_feature (1)..(1): n is a, c, g, or t
nggtttggggaaattttttatgctgactcaaagactgttttaaaccgagtcctgcttagatggagactctctctcactctatgcttccttccctcaccctttcccttgatccctccccccacccccttgctttctcactccctaattgcctacagcttggggaattcttcctgcccattttcctcgggaaaaaatagaagattactattttccttttaattggcattgtgtttggagaagtataacaagaagggaatagctgcctgccatatatgcttgtgacagggagcttatctaatcactaacctttgcactgctattggctattattcagctttagaaaaatcaggtaccatttattcgcttggcttatgggggaactgtagcagcctgttttttatttattgactaggaagaaaagcaggcagtgggttaaaggatattgttatttatcattatatatatttcagtgttattctctgaaagtaaactctttattaaagggtactgattctcctcctcctcctcctaagtcacttcagtcgtgtccgactctgtgcgaccccatagacggcagcccaccaggctcccccgtccctgggattatccaggcaagaacacttaatgcaatatttaaataagcccatgaaaagtagaatgggtagaacataaagtagaaattgttttaactacaaaggaaaaaacttataattccattgtctacagttaacatcaacattatggtcaatatcttatgcaaatttttttcttcatttatttaacaaattgttattgggaacctacagttagctgggcaccaagcactgtaggaacagccgtgagcctctgccttcaaggaactttcagtataggttggattt

SEQ ID NO: 26960 - DNA, 1495 bp, Bovine  19866881237033
  misc_feature (1)..(1): n is a, c, g, or t
ncagacagtgatgttcctgctctccccaaaccaagatattcaggcatcctagggcaaggtcccacacttgggttttttctgacagcttctcctgagtaaagatcaatgaaccccattctatcttcaaaaggacagaatttttcctcctggggaacataaaagggacggtggaagctgacacgtccctttgtttattttccatgcacctctatcagagtccctgaagaacagagcttcccggtcaccccaggttggtccctaaagccaggctagggaacagtccagaagccagcaagccagtgctcaccctttggggtaagacacactggatgtaatgaaggagggcctcctgatgtacaaacggccaactcctccccgcctgcagtgatcgaacacgccagtttctggctttagaggaaaatcatatcacaaacacccacaagagatctcagcttggggttcctcttggcctctggcatccatctcctgggtcccagacaggaggccttctccagcaccaaacaaggggcctctgtactatttttaaaagctctccaggaaatacccttgtgcctacacttcctcaccacccactcaccttcaccagcttctgatctgccttccgccccacctctctctccacccgctggagcctcaggaaggacccgggaccacctcctcagcagccccagcccagtcctcatccttgaccagttcagtatttgtcaggaaatctcctggcttctgggacaggaaactcaggatttcctatcctttttttttttttttttaaatttggccgcaaggggtgttagttgcggcgtgagagatcttttttagctgtggcatgtgagctctagctcactgaccagggatggaacccaggctcctgcattgggagtgcaatcttagccactgggccacaagggaagtctctttcctatcttggtcatatggccatttccccagagacctgagcttctgagcttggctgccaactccctgcctccctccctaacccccatcgctgagcctcacttggcgcctccccgctgatggtcctcacatcacagccctcttgtcaatgcccgccctgatggcatgctctaaggacgtctcttcccaggcacctttcctgggtgtctgaatatcccaggctgcaccagtcatttgctgctctagcgctgatcctcccttcatacagccctctctgaatggcaccaccagccttcagtaaccactctccaatctcagcatcatctctagttcacccattgggctcacctcctgaatccagccagttgccagagtctctctgtgcaatgtctctttccagtcccgtcaagtgcttattttgtactcttttccaaacctcctcaatgagccatctctaccctctcctctgccacccccctcacaatctccatagtatgcttctacaagggtacttttttaaaagtccaacaaaaagacacaatcctctcactcctccgtt

SEQ ID NO: 26961 - DNA, 1128 bp, Bovine  19866881276689
  misc_feature (1)..(1): n is a, c, g, or t
naaatgaactctagagaccaacatacagtagcttattgttcactctctggagaatagaaataccttccctcacaaggtacaatggtgcaaacagggagtaacacttgggcttcaatgagcaaggcgttcagggtcaggaggaggccagtactgctgacctgaatctggtcagtaagaataaactccatcgacaggtataagcaaagaggggacgtgtctttcagcttttcagatgagtcgtgtgttcagatgattttcaaagttgtttacagagagaaacaagttacagatccaattctctatccactgacccacctccatgatttctgcaagggttatatatattaagtcatgctttctctttcactaaagccaatccttattttgcctattctcatagatcttagggagtaagaaaggagagttggtctaaatgagatacctacatggtttttaattacaaaattcttcatcgcatcaagacttttattggagttgcaatcacagagacactcagggcaaaccaacatccccccccccccccaacaccctggctcttgggtctcagttttctcatctatgaagcgaatagtgcatggatcagtgtttacccaattggtcaccgggtgtagaacagatgattttaggtgataggtgaataattgctccaagttatgtatttatttactaactttcaaaacacatgatgtttatgaatattactggttaaagtagatactgaagtcagtgaatagaaagaaaaatactaagtaaatgataaaaatagtcataaaatggtgacatgttatttttgaatgagtaacatctggaaaatactagactggatgatccccaaggtatgttttagctcggactctaaaatgtctataattgttaagtccttgttccaaaccttgctcacattaatggtactaaagaagccaaaattaaataaaacatgaaagttaaacagcggaagtgcagagggcttaagtaattctcagacttgagactcactccaaaattaaaactggatacatttcctttgattttgacatggaattttaacaatattgtctaagcaactccatgcaacactttcataaaagcctttttaagagcccctat

SEQ ID NO: 26962 - DNA, 897 bp, Bovine  19866881286377
  misc_feature (1)..(1): n is a, c, g, or t
ncgtcttccccgtcagtaagagtcgtttatttgtgtgatggtgttgctatttgctgtgaaatataaatagccttaaaaacgtcattcagtgttcctcctgcctgattgatgatttctcccttccagggtggatcttgcctgaggtttatttaaaggagctgatctttatttatttatttatttttgcctatctttttaaaaaggaaaatctctgaatgtttcaatgacataagactagatcacaaagcaccatatattttatcattccatacaagtaaaacgtccaggataggaaaatctatagagacagaatgttgataagcagtagccaggggcgggaggaagaagggggtgggagtgatagttaatgggcacagggtttctttttggagagataaaactgttctaaaattagatggtggggatgatagaacaaccctgtaaatatactaaaaacactgaattgtacactttaaataggtgaattgtatagtatgtgaattatatctcaaaggaatttttattgaagtatagttgatttcaatcaactattcggggcttccctggtggctcagagggtaaagtgtctgcctgcgggagacccggattcagtccttgggttagggaagatcccctggagaaggaaatgacaacccattccagtactcttgcctggagaatcccatggacagaggagcctggtgggctacagtccatggggtcgcaaagagtcggacacgactgagcgacttcactgtcactttccatagctgattcacaacactgtgttagtttcaagcatatagcgaagtgactcagttttatatatacatgtatatgtatacacacacacacacacacttatatactatttcaaattcgttccccttataaggt

SEQ ID NO: 26963 - DNA, 1372 bp, Bovine  19866881317579
  misc_feature (1)..(1): n is a, c, g, or t
ntgacattttaaaattctgaactgataatgtagagatatctatggattattgaaaagctgcttaagctgtttaaattgctcccaagtgaataatctgagatcatccacacataaaaatgtaattaaatataggaataacccaaagatttcaattttcattttcaagactagtaaggagaacaagtttaagagaatttcatccaacattatcatatatattttttttctctcaaaatagatttccccaacattacatgtagtgttagttgcccagtcatgtccgactctttgtgatcccatggactgtagcccgccaggctcctctgtccgtggagctctctcggcaagaatactggagtggactgccatttccttctccaggcaatctttctgacccaggggattagacccaggtctcctgcactgtaactcgattctttactgtctgagctacagagaagccacaacattacatggtcaataaaaaacataagtaaataaacaaatggctaataagctatgtgcatttgaggtcaatacttgtatattaatgtctgagaaatactgttgaattgtttcccccagatctaaaaaaatttcaataaaattcataaacgtatacataaacacttacacacatagacattaccaaaaccacaagaaaaacttttattaatctaatcttaggtttacttttaaaaaacctactataattattttaccttttacccattgtaggaataaagtgctatatatgcaaatagagagatgtgttgcattgctaagttcttgtaaaagaaactaagaatgtcattggttttaccacaaatggtagtcctttctagtattactcctatagaaaaacataccacattttttaaaaatcctacattatagtatcattatttacatctgccacaattatatctaccattatttaactgatttatatgtgagacacattcatttatgcaagtttccattaaaaggtcagggatagggtcaagaactctaattctgacttaggaacaatccaggaagaaatcactgtggcgagcctgatattaaagactacagttttccagcaaaaacatgaaaaacaaaatagtatggcatcatatttaatttttcagagcctcaggataatattctatgctggatactacccagcagtatttgaaaacttatagatcataatatttttcaattaagttaccaacataatgctatcaagtaaggcagagtgtgtgcatatgtattaatatgtatgtgtatggaggcatccttatatacatatggagaaaccataacacaaataaatgatcaccaaccctcttggaaatggggaagtactgatgctgctgctgctaag

SEQ ID NO: 26964 - DNA, 667 bp, Bovine  19866881365662
  misc_feature (1)..(1): n is a, c, g, or t
naatcctacgtaactttacaattggcccttgatgtctgcagtcccacatccaagagttcagccaacctgggactgtgtagaaacatagtagacattgagcaaaagaaatttgtaagtgtagtggaccctcccagttcaaacccatgttgtgcaagggtcagctgtatttcctattattaatacttacacagcttgtttaccaattactgcccactagtgatcagcaaattagtacatggtcctagggctcacagttcagtccttggagtatttgtttcttcatgggattatgtctgtgtcatgaaatattgacgtaaaataaagatgtctgttaacttagaaaaggttattaatttggaggagagggaattggctgcagttgtctgtatgttttgtgatgtgtagcccatttaaataaacccttagattgagaaaataggtaggaactttattatcagtctgggaatttgtagatgtttgttgacttctggtttagcagggaagctgaagaagagtactatagatagtttgctttggttatcaaaatgccaccacttctaattctaattatctgttggcacagttcctacctagcattaggttcctgtaaatgaaattttttattttacatacagtttaatggaactgctttaagtatcgctctttt

SEQ ID NO: 26965 - DNA, 746 bp, Bovine  19866881411407
  misc_feature (1)..(1): n is a, c, g, or t
natctggatgcctgcaggcttctctgtgagctggagctagacctgcgtgcagatgatggaaaagtttaaaaacccattacaaaagtgctccagatgcaccgaatgcgaagctcctgtaatcagtattcaaacagagcaaaaagcctcctgtggcttcatctcccctgctccacggccattacccctgccccggccgccatggcaacgtgaaaacatctgggagggcgcccccgaacagagcattaaaccgggagggagaccaattacccgtccccggcaatcaggccctgcccgctccactccacctggcttcgtctctttattaacagccacctactccctgtgcgcccccgaggctctcacacagccccccacctgcacttgattccattttgcctcctacagccctgccatttcctgccctcctccgtcaggacacctcctcctcccacaggacgcccctttggcccccgggtccccctcccggctgccctccctgcgcagccgacgggagcagcgcagggcggggccggggccggagcgcagcaggagaccatcttgcttatctggcttccgtgctcaacgcgagtgtctttctggagagtgagccgagccaggggtcctggagccacagcctgtttaaagcgatgctttactgccagctgtttcccctgcagctctttcccagagaggcagcccattaagacacctaataaatattaaataataacaactgcagatctaat

SEQ ID NO: 26966 - DNA, 903 bp, Bovine  19866881465422
  misc_feature (1)..(1): n is a, c, g, or t
ngaagaacgggtcatcagccttggccctcaggtggctgaaggagaaaatgtatttggtgtgtgccacatctttgcagccttcaacgacacttttgtgcacgtcactgatctctctggcaaggaaaccatctgccgtgtaactggggggatgaaggtgaaggctgaccgagatgagtcctctccatacgctgccatattggccgcccaggatgtagaccagagaggcaaggagctaggcatgactgccctccacatcaaactccaggccagaggaggaaataggaccaagactcctggaccaggggcccagtcagcgctcagagccctcgactgctcagggatgaagattgggcggattgaggatgtcaccccaatcctctccgacagcactcgcaggaaagggggtcgccgtggtcgccgtctgtgaacaggactcctcaaagtattgctttctgtcaataaattgctttgatgtaaaaaataaataaataaatagttctcactaaactgtgagagaaaaagggaaaactaaagttaatattatttactggaaatggagtttgaaggtgaagctaaaaggtggagattcaataatggtaaacagtttatgcataaataaacctaggcttaaacaagacagactttttttcttcctcttttctaacagaaaattccatagtgggtagtctagggctagtgcaggggaattctcattgcggttatcttttaggctcattctatctttccactttgccatctttgtcatttgatttcatcctcaaagttgtctcatggtgattacaggcaccagtcattgcatcagcattccaggaagtgggaagactataaaaggctaaatggcaaactgagtcagcattcttttaaggagttttcatggaaatt

SEQ ID NO: 26967 - DNA, 1498 bp, Bovine  19866881485957
  misc_feature (1)..(1): n is a, c, g, or t
ntttcaacatttatttaatggataagtaaactgtggcacatccatgcattggaatatttctcagcaacacaaagaagtaagctacgggtgtgtgcagcttgtgtatatctgaagtgagtcatgccaagtgagagaagccagactccaaaggctacaaactgtgtaattccaacactgtgacattctggaaaggcaaaaccaggagacccaccacactggtggttgtcagggtctggggcagagccatcagggtggactacaaaggagcctgagggaacttttgggggtgatggaaaagttctgtatcttgattgtggtgatagtaaatgtaaatctgaaaaaaatctaaatggttaaccacacttgttccccaagtgatctggaatctactgctgatgaaggctgcgtgctgttttctgtcggaagatgtttgggacccacagggctcagggtcagataaccgttctgcctgagcagacactggacattcttctcggggatgggtgggcgggctctgggcccagcccggctcctctcaccaaccagctggttgcccctgaccagcgtcctgtgagaggtgaatttcccccaacagggtcctgcggtcccccgatctagagaattcgcagcagcctcctgaagtgctcgtgacttctggcctgccagtgtgggtgccacacccccaccagtctccaaactgaaatgaagttcaaggtagctcctcgtagctcctggaggcaaaccctcagggacgtgaaagggtcccagagacgccagtggggtgttttgatcagtgtaaacagctttgcagcctgtactttcagggaccaggccaggagttaagaccctgctgttaacagtcactttatcctctccgcccactctgcggagcctggcaggaaggcaggaggagcagcgggcaacagatgcacacagcggctgggcggaggccccgcagataggaagaggcagagtgaaggccagtctgcccacagtgctgaatggcccagttttcttggggtcaagcataaccttgcttgctccgtgaagcccctcttcctttgcctttatcaaccttttctcatgcacggattccatttgatcactatgtaaccagccagaactgaaagcgtgatctgcgatttgaaggcctgtgctttgagaaattgtgtgtttgcactgctgaagttctaggagggtagtaatgaggcacaggaggagagagaataggatggagcagacagaatcagggcttctgtcaccataaggagtaatctttccaactgcccttaagtcctgactctgctaaagcagtgtgccccttcccagccacaacatcttgataagacagagggggaaggggtcctttaaaagcagaccctgcaggaataaggtgtgtgttccaagctcctctggtcctccgctttccccatcagatgacagaggaatgtcttcctgagttttctacagcagaaacctgttggcaaggcagagatca

SEQ ID NO: 26968 - DNA, 750 bp, Bovine  19866881732221
  misc_feature (1)..(1): n is a, c, g, or t
ntaaagacaaggttctggaagcctttgaatcactgagatttgatccaaaagagaaaaagactgagaacggctttttacacagacctggaagaggcactaatgaggtggtaccgaatcgctcagtgtctgaatgtgccagttaatggcccaatgttgcggctaaaagctaatgattttgcccagaaactgggacataatgattttaagtgcagcaatgggtggctggatcgttttaaatccaggtatggtctagtattcagagctcaacctgtagaagccacaggtgtatcagcagacccttcagctgtctggcaccaaaacatacttccttattatttaaatgattatcatcctaaaaatgtttttaatgtaaaagagactgggctgctttatcgaatgttgcctacaaatacctttgcatttaaaggagaaacctgttcaattggcaagttatgcaaagacagaataaccctggtggtcgggacaaacatggatggctcagagaagcttcctctgcttctcattgggaaaaacagaaatccacgttgcttcaaaggcataaaatcgttgcctgtgtattatgaagctaacaaaatggcatggatgactgcagaagtatttgaacagtggatgcagaagctggatgagagatttcaagctcagcaaagaagagtggtgatttttgttgaatcttctcctgcacacccagaggtaaaaaacctgaagtccatgaattagcgttctttccat

SEQ ID NO: 26969 - DNA, 1459 bp, Bovine  19866881740741
  misc_feature (1)..(1): n is a, c, g, or t
nctattatgctaatggagtgtttgtctcattgccagacttgaatgacattatacaaggtctggctttgagctcttggaaattggaattagagcaggagggaaggatcttggcctacaacatttgaaaccttgattttaaattaattatacataattagcataatttaattacacttaggacagaagttctcaaagtatgttctaaggaacctaagattctgtgaagatctttagggaattttgcaaatgttttattgaaaatttttaaataccatatgtttttaattgtaaacaaataatatattatataccaacttttaacaatcagcacataagcttgtgcctgccaacctaactttgagtgtctgagcccagatattggaataaaacttttcctactatcactattaactataaaatgtctggaattcacaaagcaaataggtttttcataatctgttaccatttgcagctcctcatctgtgggaatcagtcttccctcacaattatacaatcaaaaaaatgctaaaataaattggatgtttaggctgatgtaacttcaatttatggccctaagtccctgttttaaattacgtgtcacaaagattttccattatctccttgattggcttctaatgaataaaatttttgagtgaaagcctataaaataaatgtttaataataatttgcccattttaatctgtttcctatgttcgtatagcagaatacttgctgttgcaaattagagaaaaacccaactcaaaacggcttaaagtgataggatttgtcaccttgcatataaagaaattctgggggtggtggatttgatggctcagcaacattgtggaggacctaggttcttcccatcttctattctgccttcctcagggtgttgacttggggttaattcccttcaaaatggcaagacggttgtcagtttcaattgtcccatgctcacatggttgtcagtttcaagcatcccgtgcacacgcatccccaaatagtcaatgggcagaaagggcaaagagtctcctcttaggaccaagcactctttcccagaagcccctgagcaggtctccccctggtatctaattgcctagagcctgtctaaaccaggtttagaaggagaaagcccaccatcattggcttttcctgaatcacagaccttaaaacaaacctgggctcagccagcatgatcacaggaaagaaaggctgttggaaccctactaacagtgtatgctaggacttgggttcattgtatgaattatttgataaaatatttttgccattaaaaaaaaaatcagttggagaaccaggattactgagaacttttcttggattggccttgtggctgtttttgccgaaggtcagctttgctgatcctgccccagttttgctgggagagaagggagagctcccacctgcattaacctcggggcttgcggcctactttttcgca

SEQ ID NO: 26970 - DNA, 935 bp, Bovine  19866881826005
  misc_feature (1)..(1): n is a, c, g, or t
ncttagatgccaggcggtctaataaatccagcctgggttaagattaacattgtgctgaagccagtgcctcttggtctaatctatagtcaaaggggtacccaaacatcttttcatgtggcccactgctgacttttttcctttaattcgcagaagtacgaccaaaggaaaactttaaagctgatgacgttgaactttataagctgaaaatcacctctctctgctgcatggagtaaacagagatttgcatgaactggcaaagcatcacccagcagagacccaggggtccttaaggaagactcattccagccccttcaagagcatcccttcaagagcctcttgaaatgtccaggatggaatttgaaaaaattaagacaggtagctattgacttaatggagggtaaaatactttgaaataaattttcttagtatttaaaaccctacagaagcttcctgctatggaccgaattgtgtcttccacccccaaattcatacactgtaatctgaacccccaacataatggtgttaggaagtggggcctctgggagggaactggggttagatgaggtcatgaggatgagcccccatgtgggattagtgccctaataagaagaaacagcagagcatcttcccatcgtgcaaggacatagcaagaaagcagcctcaatgtcaccctctcacagaggcccccccacaccccatctaaaatctccacggtcacccatagtgtctgtctccttttctgctttattctctccctagcatgtatattttgttctcacttaatctggttcattatatacactccccgtcatgccacgatgagatgagtcacttcagtcatgtccgactctgtgtgaccccttggactgtagccttccaggctcctctgtccaggaattctccaggcaagaataccagaggttgaacccacatct

SEQ ID NO: 26971 - DNA, 779 bp, Bovine  19866881931522
  misc_feature (1)..(1): n is a, c, g, or t
ntctgtggacactgggttgcttccacctcttggctgttataaagatcgatggtgtgaacgtgggtagacaaataactgttcaagtccctacttccagttcttttgggtgttgtgtccagggtggaattgctgggtcatgtggtaattttatgtttattttgaggaatcgctatactgtttttcatagcagctatatcattttacattcccacaagcactgcccaagggttccaatttatgcacatcctcaccaacattttatagaattattctaagagagaaattaaacagttaatatacaacatgccatacagaatgcaaaatttacatgattgttttgtcataacagtgttcgtgttctgcattttggtggttttgagcataggagaaaattagatacatgataaaatgtgtaatttgtattattggtaaaggcagttatactctttaaatgttccacatttcaggtattgatgaaccattgcacatcaagagaagaaaagtaataaaaccgggtttcatccatagtccttggaaaagtgcatacatcagacagcacagaattgatacgaactggaggcggggagaactcaagtctcctaaggtaactgaacgcagtgcagtctaacagaaaccgttaatcagtgctgtggtacacagtgcgctctttccctggcaagccgtgtgatttgacagcccatcttctgtacaaggaaaacaatatatttttaaaataacagaaaatgtaactgacagtgttcctctttactaatttttct

SEQ ID NO: 26972 - DNA, 1720 bp, Bovine  19866880520767
  misc_feature (1)..(1): n is a, c, g, or t
natattattatatttccaatctcagaaagggttggattttctaaggttatgcacctaataaacagcagaatttggacttaggtaatataccaagtaactttttaaggacctaacttctttggatttaaaaattccaaattcttgccgtttcagatactgctagaaaagaggaaaggaaacatttgttgagctaatatttatatttgagcctctacattaaagtattcttcaatttcttttatatttccctttagcacaaactatatcatttcctattagtaaatacttcttttcattaatctcatctccatgttataaaccacccccctttttttttcttaaatcatctttcggtaaggttgcatttttactccttagcaatcagtgctgatttttttttttggccaaattagacttctttccttttccttccaaagaaaaaaacctatgtttggctctcataaacatttagactcaggatgctttacataatcactatctcttttaattttcaaaataatatataaggttaatattattaggttttccattttactggtaacaaagagacttaaacagattacctgacttacttgaggcctcacacctagtaaatatccatactttaaacccaggtatttccctgctgcatcctgctgcctccctggcaggaatgactgaaattcttttcacctgttatgatcccagaagcactttttcttacgtgtctgagcagctgtaaatgcacttcttggttcccatcccataaacctaattccatctcagggtcattctgcacagcttgacttacacataaaaattaacttttaagaggtttactttagcttgatagccatctattcactgatctagaaagcaggtatcctgagtgcaatttcctttctataaatgaatacattgctccactcttctgtgagctcattcttatagagtatcacatttgcattattgttccagactagatgagggcataccgacctatagttctcaaaccctcttggtcttcgaatttccataaacaactaagcctgggcattcagaggacccagatattgaattttttttttctcatttggaggaaaagtaaaagaaaagagaaatagaaagtacttggcaaaaataagcacaaattgatcttggagtggaaaaaaagatttgcagaaaaagatgaaaagggctgaattcccacagcacagacgaaagatgattgaagggaaaagtctttactaacagagatgatattaaaaaggaattctgctgagaaagtttagttgtagcagaatgtttaatacaaattgtgtgtatatatatatgtgtgtatatttgaacttggaatgctgtgtaacccctgaattgttcttattaatattactagctaactcttagttttcctgtgtgctgaacagttagctcatttagttctcgaaacaatcttgtgagtaaggtacacttttttctgtgctttataaagatttggagaggttaataacttgctcaagttcacaggactggtaagttgtagaaatactgacaaatgcttaatagcacttaccatgctctgtaattacttatatgcttactatctgtctcttccagtagaacataagtcccaagaaagtgaaagtgttagttgctcagtcgtgtccaactctgcaaccccatgcactgtagcccaccaggttcccctgtccatggaatt

SEQ ID NO: 26973 - DNA, 3498 bp, Bovine  19866880561805
  misc_feature (1)..(1): n is a, c, g, or t
ntcctcctcctcgccttcctatgtttttatagagcttaaattttgataggtgatatataacctcccccccgccccccgcccccggcaaaaaaaagtgcttcccaggtggtgctaggggtaaaaaatccacctgccaatgcagatccaacaggcagacgtttgatccctgggtcaggaagatcccctggagtacaaaatggtaactgctccactattcttctctggaaaattccatggacagaggagcctggcgggctacagtccatagagtcacaaagagttggacaagactaaaagactggagcacagagcacataccaaaaaagcaggtaaaaccaggtacctgttttgtagctactttctcttccactcagcaatatggaatatatatcattttctatcaattaatcatctatattatcggacgtgagtctcagtgaactccaggagttggtgatggacagggaggcctggcgtgctgcaattcatggggtcgcaaagagtcagacacgactgagcgactgatctgatctgattccacaattatacatgtctcatatttctcttaaccaagcaatggctgagagttcttcaaactgttttaaaatgctgatagcatttttttaaactgttaataagtagggcaatggctgtcaatcttccttacaattctattttaagcatctaaaagaataatttattattaaagataattaatatttaagcatctttgtgcacaaaacagtaatcacttgataaatgtttaagtgaatgaccaggttgatgaacaaacttagattcgtgacattcagttatctccttaggctatattatactttccttacttgacatttttcttcactcacatctctgatccttgttctatatcccttctgcttagaacattcttctctaaagtttactccatgcagctctgtcgattcctgttaatcctgtgcggcagtttcaatgtcactctcatctttctgagtccttactctgagcttacgtgattttaaacactttgagaacacagacggatatctgcatcttgtttactatcacccctaaaaagctttacaaaattcagttgtttcttaactctaatataaagttttacattttctcttggattttgggaaagcttttgtcaatttccttaaggccttgaccagttatgggatatgacttctgcttacaacaatttgaataggtatgtgattgaaagcagagtgaatctttcatttttggcatttagaatgcaagtcatttcccctatattttgaagaaagcaaagattataatttctactttgcaaagagaaagtattatttcaccacacttctacatgttcttattacaaacatgctaaatactacctttcaactatgaatgttccaagctacttattttttgtttagtagaaattttttatctgcaaatccaggaggactacatgaatgtgtgtttaaaacaacagtttccaccaattaaaagggatgatatcttggacctaagatgtccctttaacttcttgacaaaacacaataccagaagatacttcttagttgattgtttttccaagaggcaaacaaaatcaccagataatgttgatcaaaaaacagcatcctctctgtctgccccggtcctctacctgccttacaaaggagtagcacacaattagtagcaagaagaatctgggactgaaaagcctttccttagaaatgctgttagcatactggactggctgagcccagatagaggctctattgtaactgccccgaaatgggagaagactccagggaccacaacttaagcacatttgggggaagttgaagttacaggctttctcttgcactcgtcaatttaaaaaaaaaaagaaaaagaaaagaagacttcttttttctctactaagaaaacttcctatgaaggtaagtgagtaaaatctcccagactgaagattactgggcacctgtcaaaatgaagaatctaaacaaaaagtctgtcataggtgacaccaacaggtcaatttctcaggatttttaaataaactgacagccctcagccaattacgtgaattaccagccgaagtggcatgtctgttcggcaagcaggaaaaggcgctttacatgctgaggcccaccaggtgccaggcactgactggggctccagatattctctcctaacggtactgcacctcggaaccatctctgatgctcaccagggtggatgggtgaagctcatgcattcattgttcaggtgaggcctgaactggggcctgaatttcaaagaagtgttcaccgtttcctcagaccacgctgcctagtagttgcttcatccacagaatgaagccagtgttttattttattctattttccaggaaataaaaccagtattttaaataacgataaatggaatataacctttaaaagtgtgaatcagtatgttatacacctgaaacttacatattcttatacatcaattataccacaataaaaaataataaaaaagagactttggtaaaactaggaagatagcttcacaggcaggtcaattaccagtttgttagaacatccacttttgttttacatatgttatcaatgtatgttgagattctgtgttgccaaacagaaatctcacaaagagacccctgctctgagatgtttctttttcactcaatatgttcttcttggaatcctaaccaatttcacgagtgatgacttcaaacttgcttctctctgttgagcttcagacctgcatttactacatttgctggagtctgtctgatgtccagaacacacttcaaattcaacaactcaaaaaaactgtacttagcatcttccttttagagccagctcactgtcctgggttttccatctctaccttactgttcaagcctgaactaagattctggtctcccaacccagtacatcaaatccactcccacatcctctccagactgttttcttaagagcttctccatttgcccccatactctgttcccacaaacaagccctggtgatttctcctctagattattgatacccctgacttcacgatgcaattcatctccatagcaaagataaacattcgttcatgattaccctaggcattcatatgatatggcacttccttagcagagttaacaaagcctctcgtaatctggctcctctctgcccgcttacctcccaactgcttggcatgcagtgtcagtgtcagtgtcagtgtcagtgtgtgtgtgtgtgtgtgtgtgtgtgtgttcgctgctcagttgtgtgagactgtttgcacccccatggactgtagcccaccacgcacctctgtccatggaattcttcaggcaagaagactggagcaggttgccatttccttctccaggggatcttcccaacccagggattgaaccccgggctcctgaattccaggcaggattctttaccacctgagccaacactttagatctactcaaactgttcctaaatgccggctctctcacac

SEQ ID NO: 26974 - DNA, 802 bp, Bovine  19866880567783
  misc_feature (1)..(1): n is a, c, g, or t
nactttgtggactctcagtgtagtagcattcagagaaagtaattttcagctaacatttttggggaagactccaggagaagcagtgggattttatttgagtcttaaagagtaggatttggaaagttcaggagaggacatgacagttatgggagtagcatgaacacaggagtgtctgcatgtgagtgtgtgttttgtagttgttcagttgctaagtcttgtccacctctttgtgaccccatggactgtagcctgccaggctcctctgtccatgggaatctccaggcaagaatactggagtgggttgccatgtccttctccaggggatcttcccagatcagggatcaaacctgcatctcccgcatgagcaggtggattctttaccactggcatgtacatgcgcatgtgtgtatttaatcaaactcagtgctcaagagaagactggttcaattgaggagcagcgaggaagaggccacagggttcgggagatggggccatgcgccgtccttcacacaggccggactccacagaccagtgaggcacttgagttaaaaagtgcctttggagtcactgacctcttctgataggtgttatttattattctctcacatatgtgctcttggcccccagaaaatgctttaatctaaagctccaaaatcatctgtcattgtccagaatagaattaagcgcaacaaatatgaccatcgctctgagacactcatgggatttgggatgtcgaaaagacacaaaagcctcagcataataggcagagaagtggcaggttcctagcacaggactaattttt

SEQ ID NO: 26975 - DNA, 3001 bp, Bovine  19866880583819
  misc_feature (1)..(1): n is a, c, g, or t
nctcctggggcatatatcccaggcaaaactctaattcaaaaagatacatgcatctccatgttcatagcagcactatttacaatagccaagacatagaaacaacctgaatgtccatcaatgaatggataacgaggataaggtaaatatagacaacgggagtctactcagccatagaaagaatggaataataccatttggagcaacatggatgcaagtagagactatcacactaagtaaatcagatgaagacaaaggtcatacaaatcactcatgtgtagaatctaaacgtgacacaaataaacctatctacaaaacagaaacagactcatagacatagagaacagacttgtagttgccaagggtgtggggggttgggttagaggaaggatggagtgagatcagcagatgtacttttacatgtagaatggataaacaaggtcccactatatagcacagaaaactatattcagcatcctctgataaatcataatggaaatgaatatttaaaaaagaatgtgcatacatatatatacatatatatatatatatatataattgaatcactgctgctgtacagcagaaattaacacaacattgcaaatcagctgttgttgttcagttgctaagtcatgtctgactccttgcaaccccatggactgcagcacaccaggcgtccttgttgtgggaatcaactgtacttcaaattaaaaaaatcttctgtagcattttaaaagataattttgtttatttaattttgactgtgctgggtctttgttgctgcatgggcttgtctctagcttcagagagcaggggctactctatgttgcaatgctcaggcttctcattgtggtggcttctcttcctgcatagtgcaggctctgtgtcacatgagcgtcggtatttgtggcacatgggctcagtcgttgcagctcctgggctctagagcacaggctcaatagttgtggcacatgcactaagttgctttgcgcatgtgggatcatcccagaccaggaatggaacccatgtcttctgtattggcaggtggattctttaccactgagccaccagggaagctcttctttaagaatttctatcctaagttacactctgaaacaactgccaaaataatcttattctctccctatccctctacctccccttctgcattttgaccatttttggtggggacaaatccacttatcttttaaaaccatgacttctgaaagctctccctccatgggaaatagcagcctttggtgatggctatggtaaccatggtcaccatctttacctgaacccaggtccattttggtaatctgtagatccaataccttcccatgtatggtataccttccactaaaatgtcagacccatcagaggcagcaagtttaagcgaggattggtaactaggcaatggtcagctatgaggtccagaagaaaacaattaagaaacatcaaagagtaaaactaagaagaggattgattatctatcaggaaatgtatccagagaaattcaatgagaagtgatgagtgcagtgaagaaatgcaaagctttaaaacaaaaaatcagagctgtgatgaaccgaaagctaagttgaatggaaaaagaccaaagtatataataatataagaatatgctaagatctatgtcctaaagtaacattcactgctgaaagaaataatcttcctgtcttggcttgtactcaacaacagccaggaccaaattccattcacctctgtgtagagcctggcacatgagtgcaggcatgaacaaatgagttgattgctggtagatgatctgaactcagttgtactgctttttttaaatatatagttgacccttgaacaatgtaggcttgaactgcacaggtccacttatatgtagatttttttcaacagtaactgccatagtactataggatgcggttggttgaatctgttggtgtagaaccacaggtaaggagggctaataaaagctatatgaggattttccactgtgcagagtgggcatccctaaccactctctcctccatgttgttcaaggttcaactatactaacttcttgcgtgttgacacaactcaagtgatttgttttaaaggatacagtatcactcaaaatcattttactatctagcttactccccatcaaccctttctgtgtctttgaaacgatcagaaaaaccatgtgtatttgtgtctatgtgtgtttcacaggagaaccataatactccctatcaacttcccagaaaatcacatccattttcaataatacaacttcaaacttctcagcacttatgaatgtttcacaagcctaagaaaataagatattagcaatagtataaataaaacgctggctatttagatatagtcaaatacatatatcattttcacaaatggattcaaattgctaacatgtgtttgcatgtggtctttcaggtacacaataaaatgttagggtaaatactgggttaattttaataaatactctttgtttagactgtagattgtattatagaatcaacaagaatttgttgagctgattaaaataacagagtagatatgaatgcaccaaaatagtcatgcaaaagtgttcatatctcattcaacacagaaagtaaaatataaattctttatactgaatattatatcaactatgacttgaggataggtgattgattcagtgtcttgtacatcatattagctgattgttctattccacataagattcaaggtattaattttagtttttaacgtccctatgttttaggaactacatccttgagcaaataactagatatgctaaaatgatcttgctacagtttcccatatatagagtctgggttatctttgatttagtgtagttaaatgaaaatctctgaacttttcagtacagaatagtacactatttcaaaatcataataaactcaccctgtttggaaatggctatggccccaggttctattattagccatatactatagaggttcaaataaaatttttc

SEQ ID NO: 26976 - DNA, 730 bp, Bovine  19866880596763
  misc_feature (1)..(1): n is a, c, g, or t
nttcctgtgctatacattaggttgccattagttatgcattttatgcatggtatcaatcgtggatatatgtcaatcccaatttcccagttcatcccacccctccttggtatccatacatttattctctatgtctgtgtctctatttctgctatgcaaataagatcatctttaccatttttctagattctacatatttacgatatttgtttttacaatgtttttttaaaaaggcacatgtcacagaagttaaaaaggctgcttctagaacacattttgcccaggctcacccagagaatcatggacacaagggagaggtgtcctttgccacacccatagctcagtttagacagctgaaccctaatcataactgcagaggattataccaaagccctgatggcagattcaaggaaatgaataacaatataataatttatccagtgcctgctctcggccagatattttgtcaggtgccttatgtatgttaccactaatcctcactagatccctacaaggtgagctttttcctcacagtccaacagatgaggaaactacagctcagagagtttcagtaacttgccctcaaagtcatgccactaccatcctgtttttgcagtgcactttactccaaagcccacacactttccattttattaaattccctttatgaaatacagattctaaaacagaagagtcctcttgagaaaatatgacactcattcattaaaacaaa

SEQ ID NO: 26977 - DNA, 1070 bp, Bovine  19866880680278
  misc_feature (1)..(1): n is a, c, g, or t
ncaaacactgatctctgcaaagtactcaaattaggaaggcagaaaggatgaagaaaagagatcggttcatttccaaagtactcatttgaaattttttggtgctgcaaccaaggagatgggtatgaaaaagaaattggatcaaaatatccaagtctatatttctgtataacccaagtctctgaggttagccattgtttacatctgcaataggagaacagagttaaacacgtaacactggtcttttggcttgatgacagaaaagaacatgatgccaagggcaatttatattcctgacatatatatgctactcagtgccttaggtcaaagatttgaccctaatgccttgatttctcaatctgaaaatatggatagagagcaagaagggggctcctagtagatgagagacaccacatttgtactatacttatgctctaattgcaaactacccacagttatgtacattctgttttatgtgctttataagagtcagatgtggaattccctgttggtagtggttgttttaactctctagaaacttgaagggaagttagaactaaaaagaaataaaagaaataagacttaagaattaaatgctttgaatattttcctccctaattttctttgtagagaaatggaagacagactagcatcagcggggtgctttcaagtgaatcataatcaaatgtgcgtgcaaaaccattggtgaagtctagatgtgcaattaaatgcctaattatgctcagagagcccctgcattctttactccctcactgcaccctcaggaaaccacacagcagccttctgtcttgagtacgggctctttaaagtgtttaaatggcatgcaagtgcaactgcgtgcccaattaggggtgcaactgctgggccaaagcatgaaacacagtctattccctgccactctgggttagctctccagacctttagggccatgttcctcagctcctttggcatcccagggctcagtgagaagtactggatggtgctttatcctttgtcagttttagagatggtaccagggagaaaaagtcaaactctgatgcttccaccaaagg

SEQ ID NO: 26978 - DNA, 1513 bp, Bovine  19866880720077
  misc_feature (1)..(1): n is a, c, g, or t
natggtttcagttatcatttctaacctgattgtgagacgagtattatttccgtgctgagtcttgtgactaagcctgcaaaggaattttctggtttgattgagtaaaaagcatctcatttcagtttcttatccaccaagatccaataacttattctaaagaaaagaaaatagttttaatttatgagaacataagtgaaaaagctcaaacgaataacactagtcagaaactatccaaaatcatagtctttggtgtttcatgttgattttaaaatttagaatacaatttataatacagggcaataaaaatgaagattgttcccaataaacaaagtgcaaatggtaaaaacaaaacagcttgaatttctcaaataagtagaattagtattctcttctatctagttcccttagagaagaaggaaaaattgaggttaaggtttgaaatattttgaactaattacccacactggcaaataaaaggtgcttataatctgggagtaaagatatgatggcagttattttaagagtttaaatatttttaactatttttaataggcagttattttcatcctatctgagcatctatttttcttcttcttgacctacaatacatgttcctttcagaaatatacagaaaactattaaatatttcaaaatagttagaatcatccagttctttattacaaagtaaaacagaatttaatttgtcctcagcagactgtcagtgattaaaaagattgcaaacagccagttccagcaaacatgggaaaattatacaaatacaaatatacaaataggtgggaaaaatatacaaattttgtggaaagtaatttggctgtcaatatctattgaaatttgaaatgtgtataccttgtaaggctgttcattgaaaaaacatgataacaatagcaaatataggaggaaattaaattagggaaaaaataaaattaataagggaatggttcagtggtaacaacatacagtcatcaaagagctaaaaagtcctgcatgaaatgacctagaaaatgtccatactatagttttagtaattaaaactgattctagataaaagcatttaataatattccagtttagggtatcaaatacatatgcacataaagtagaaacctaagaaagatgaatgatatatatcaaatagctagccagtttttaaccctgggcagagaaagtgtaaggtgggaagtctctagcttcttattttataaaatccaaacataaatggaaggatagcaggtgaattctatttatttttcaacatatttggaaatattttcaaatttaaaaaatattcagaagtcagaaatctatatttcaataaatatatttaaaagtattctcatcatctacaaaataaaacatccatgaaataattgacctcttaatttagggagaactacatttgttaaaatgaggttacgttgacttggactcttttcctttgccatttgttataaattggtttccagtcactctaaatataataaacatgactatt

SEQ ID NO: 26979 - DNA, 1368 bp, Bovine  19866881086502
  misc_feature (1)..(1): n is a, c, g, or t
ncagggagcacaggttcgatccctcataggggaactaagatcctacattctatgtggccaataaataaattctaaacataaaaatcttgtattaaattttaaaaatgtagaacaatgttaaaagacatgaaaggatcaccagcaccacaaatgagagaacactaacaattgcaaaggaatatatacaatatcccatttccattaaaaaaatacatagatccttacacttgcataggatcaaagtcagagtcactgcttctcaatggttagagtagaagcgtttgtcttagtcagtcccagacctcatccccacacccaaattttacagagaacggcatgaatttttttaaaaagttatttttcaatagtaattacttttataaccaagactgagagagctagagaggccccactagcaaaaggcccactcacgtagatcataagtacaggacagccaaagcagctgaacccaaaagctaacctcaaaagcttagaaatgagttaaaatgtgtgccaagccatgatatgcactaagttgaaaggaaactggctgcgttacttgtgaggcaacatgattactgcaggcccagcgcttctctcgctcttctcttagatccccaaggcatccccttgaatcactccctgggacttgggtccagaaacagcgagtgaagagtgccgtgaatgtatcatgttcttaacctaacagaaatactgtttgtctttatttgtgatgatcattttgataagttttgtgtgtccaaggcatattataaatttctttgtcaaacagctacaattgtaataaaataagcacacaaatatggaataaattacatcttaaaatgttccttttggagaaaaaaacttttacaaggcacatttagcatgacagaaaaaagggaaagaagggagaagggatgggggaggaataaagaccttaaagaaaagaaaggtaaaaaggaaataaaattttaaaaaataagataactagagatgaaattagcataccataacatcccatacacttggagaaaatgagccacaaattcatatctaagcttcatagtagccaatgccacagatgaaacaattttctaattcatagtatgtttaagataaaagcagaaacaagaggggatttctcccatgatcccttaataagaaacacttttgttgttgctgtttagtggctaagtagtgtctgactcttttgcaacactatggactataacccttcaggctcctctgtccatgagattttccaggcaagaatactggagtgggttgccattttctttcccacagttatcttccccacccagagatcgaacccaggcttcctgcattggcaggcagattctttac

SEQ ID NO: 26980 - DNA, 3116 bp, Bovine  19866881109015
  misc_feature (1)..(1): n is a, c, g, or t
ngctgccctgtccttcgctacttcccagaattttctcaaactcacgtccattgagtcggtgatgtcatccaatcatctcatcttctgtcgcccccttctcttgccctcaatctttcccagtatcaggggcttttccaatgaattggctcttcgcttcaggtggccaaagtactggaacttcagctttagcattagttcttgcactgaatattcagggttaatttcctctaggactgactggttggatctccttgcagtccaagggactctcaagagtcttctccagcaccacagttcaaaagtatcgattcttcagtgctcagccttctttatggtccaactctcacatctgtacatgcttaccagaaaaaccatagctttgattatccagacctttgtcggcaaagtgatgtctctgtttttttaataataccatgtcatccttcggatctcagtccaagagtcgattcctcaggaactgttaaattttgcgattgtgtatttgactgtctctctcccttgacagaattataagtccctgagtgcaagagctggaaatattttctctctccatcttgccttcaacagtgtctgggacgtaatagacatttaataagcattgaatgaatgagtgaatgaagctaggactcaactgtggtctatcccttccaaagcatgttttcttacttttgggggaagggggagtccttggggaggggacagttctgccacgtggcgtgtgggaccctagtttcctaaccaggcatgaaactcaagccccttgtattggaagtgtggagtcttaatcactggaccaccagagaattcccaaagcatgttttcttaaatggacatttactgctaaaaagagaaaacccagtcatataaagagttaggggaagggcactcaagatgaaggggttaatccatgcagaaggactgcatgtttaaggaagaaaaagacagccagtgagcaaggcggtatgccacagggaccacagcttctattgctaactagctgtgtgacctcagcctctcagagtctcatctaaaaatgaggcaaacacctactgtatagcattactataaaacttgtataaagtaatccatgtaagtactaagcctggcacatagtgaaaagtaactaaaactaatgtcttacaggatctgagacctttgaaatatacagacctttatctaagagaaattttctgtctcttcttcctcctctcctgtgccctccttgctcctctccaccttttctccaccctcttcctctctctctctctcctctgtgtgtgtgtgtgtctctctctgtctctctgtcaaatcacttcccaagctactggagtatatttgcaaacacactggctgtgaccttgacatggccccattcccactccaccacatcccctgtcacacacatggggacacacacacacagatatactctgtggcaatgtaatccccataaattccagattcctgtgctgtttagctgatcactgctttaaaataaatctaaaagacagaaagaaacacactaaatcctcattttaaatttgctgaggtatttttaacttttatcttcaaatatctaggacttcaaagtttctctgtacatgcagttaagaaaaaaggcaagctaacatagaaagcatcaataagaaaaacagagtttatttggcaatggtgcagaaatatgctgcctgaggctactactcatgaaaaatacattaaaaagagagctcagaaaagccttcaactattgggtaaaaggatataaaaggcctgggtttttttcacatttgtaaatattcggggagatttttttaaacttaactatgacagagatatcctagtctatatatgttcgggggcattccagcagcacactcttcgattctaagaatggattgtcaatattccatatcagttttcttcatttaaatagctagtggcagcagaaaacttcagtttaaagctcacagattttcctatttgctgctctaagagccccataaacatatgtatctttggaaaactatcatgtgttttcaacttcctgaagaattcttgtaaaatataactgaaccacattaccctttgtcctgagcttttattccactaatggacaaattgggaggaggctgagaacaaatgtgctattaattacccagatggctttttaatagaaccttggattattcttcagccactaaacactgtccagaaatttcttaataatgctggtgtgcaaggcattccttccaggagaataaagatctcattgactggcaggctcagttatgtcaggttactttaggagacggtagacaaagggtaggtattgtatagaccagagagaatgacagaccatatctgagctgcccggtctccccagcaatgacagattttctaatttactgcagattctcacaaaactgggtggtcagctttgcagagaaccaacagtgggtctattgattctgggtgggagcaacataattctgaattaacctgaattgattcaatacaacagagagcctcggtattggattaaaattaggattaatacattaaatgttaggtcagaatgttaagtcccagtgctgaaagacctacatgaagtaagtcaaagccattacagaaagatattttagccagcagataatttgtacttttagaccttagaaatacatcactcaaaatccactggcacaaatgaagatttctatgatacagcatgttctgttacggttttgtggggcttttttttttctgctttggttataaacaatcattttgaatgtgtgccctttaagttcatcatatatatatatatatatatatatatatatgatgacaagagagagagagagagaagctttcatctgacacagtaatggttgttagacagcctggctcattttatgttcccgctttcgtaaaattatctcgccagaggcaaaatctgctgcttcgggctttccaagtagacagcaattaactttcactgtgctcttttgcagacgtacgcttctgttaaatcatgaaggatgcaaactaccattttgaatatgttttcccaactacgaaagaatatatttatattt

SEQ ID NO: 26981 - DNA, 3823 bp, Bovine  19866881130736
  misc_feature (1)..(1): n is a, c, g, or t
ncggccctctctcgttctatggcctccgtctcttgccacagccagagggttgaaatctagcaactcggaagagtaagactgacctccggctattctcttgtctctggattaggccagtcttttaccaggaaaggattactcatagattttgagattcgaatgcaaatctaccactattctcccggacacaagctagaaaattacatttttgaaaaacataactgtattgatgtgatgttgtgaaaacatataaaacttggggtatgtgaaagtttacaaagagtcttaatgtagaatataataaataagagcctctgcagtgattattagtagaaaaagaaaacaaacatattacatcgtataataattgtacccaaagcatatatgcaccttagccaggaaaagaacagaaagaatttgagggtaaagggggcaatacgtatataaatgtgtacatatatgtaaatgtgtgtatgtaaatgagtgtataggtaaatgcatgaggatagttatgtacataaatagaaaccaagaattaacattttaaggtgttagcaaaaagtatgtctttttgcttctttagttcagaatgagtgtagaatatttgctaagagagtttagtgcatttctgagacttactgagtcaaatctgtgtgattaaaaagaaatgaaattctgcttgaatgcttaaatactctttaaaaacaaaaacacaactttgtgacttggacactcaagtggagcacatatctctgaaaggcacaggaacatccacctccaagcaagaaaataacaggctgagtttgcaacttgagaaatttcatataggaatacatttttatttttaaaaattgctgaatcagtgcaggaaaatgagaatctgtcctatttctactcccttgagagactagactgtgtttcttggtatcatggtctcaggggtgtgtttccccttgagtccaaacaatagaccagaggactttccggtcctgcctagccctgttcatcccccacctttgagtgcattgttccaaacagtagccaggactccctgtgctcttaaagtattgccactgtaaaagtcatcactgactggtatttaagaagattgtgagtgtattttctaagagttgatgtcaaatcagaatcacttaatcagtgtctgtaggttccttagtatagtctaactttctattatgttgacttaggaaattgctatttctgcagatcagaaaggtctatgatgtcatgtggtctacccagagctgaaactatatcagtgttatcaaacacatattttgtgtttttctttcatgattgtgcattatttttcttttccagccattgggagcagcagcttcagcccaagaccaactcatcagttctccccaccacagatttatccttccaagtaagatgtattttctcttaatcaataaataacttttccgagtagtcttttaccttatttcaagtcaggtctggtgcccacatgttacatcttaagttaaactaaagtgtgtttcatagagacttaagtgtacttatgtaaacttatttggagcatcacctaggagggacactgaaatatttcagcactttgtctatgatagttgaaggttatacatgaagaaacaatctttaactagaatttatgatttggttgttaatcagttaccttgcatgtttccatctaatgcatgggctttctattttctgtcatttctgacaaatagcagaccatacccacatattcttcctaccccttcctcacaaactatggctgcatatgggcaaacacagtttactacaggaatgcaacaagctacagcctacgccacgtacccacagccgggacagccctatggaatctcctcctatggtgagtaatccggttgctttagcagtggtgttgccgagtgggcacacctgtgcgtgtgaaagtgtcacaggagtggtatatagagatggggctcttggtcacttgagaaagggctgtcaccttttgtgtctgaattcttaatatgattgtttctgatgaacattgtaagaaggggtggctgcttatcttgaggtcagaagtggcagatggatagcatggttcatatgctttcttgctctttggtttttttcccccatttatatctcagttcttaatttgccatttgaacacttggtttgggaatccaaagtattctggtgcatatttctgataaaacttctgtgaatgaagtcttttgggggtgaagattcatttcctatttatcaggtgctgagctatgattagagaagtacaagccacattcaacaaaccctggctctaaacttgatgggagcagtcgtttcatatgtcagtgttatcaaccactaggaaaagtgatctatatcatggcttgggctgcacttgaaagagcccaatcaggaaacattgaaagctcacatccttatttgttccctctcacctggagattatttttatcttggtgtaatttaactcaattgttaacagggtcaatacctataaattaaaaataaagccagccaaacttcagagtttaattcttaaaaatcttaggattccaaaaataccttcttttccatggaatggtagctataatcttaaacaaattgcaacttgttggaatataaaaatatgaattattggcattttattacaaaataaataaaacctggtgatccagaaaaaaaatacatgaaattttggaagcaatgactgaaagaaaaaactagtggattattttgtgatcaatattctaattttccttctgctattgttgtttcataatcttctcagtatgttgaaacaaataatgttcttcttcaggtatttcattgatcgttagaaggtaaattatctttgttttttttgtcctgtctttaccccaggcaaatttcccatatatacattttacagaaatgaaaatctaaaattatgtattacttcagcttttatagttttattttaaaaagatcacaactgaatgtgatccagtgaagtgtttttcaactagacttaaaaaacaggcatcaaatggacttcctagaattatctttcatttccatgactttgctgagtttcttaaaatgatgttaaatacagatcaaattatctgtaatttacttttaaactgttcttgtgctgaaagaggaaaaaggttccatgatttgaattgtgtgacttcaaattctgtaatgtgaattaaggcagtcccccaatttatattctcaaaatttatttacaagctgatgatttgaaatataaatgtatattctagggcaaacaatattcaagtactatagatgtatcaatgctgccaggagaaggtacctttcctggtactgctttggctgctactcacataactctcttggtttttttgttttgctcctccccattcagtcatggttgggccctttgccaatttctgggtaaggactcctctagttttaaaccatcaacagatgtctctgttgtttgaaatagttggtccagtagggtgagatgagcagacgttctaaggttatactcccaactagtaaagtgagaatggggattttcatatggtaggtggggattggggaagtggtgagagtaaggctttgtgtgaaggacttgatcccagagccttctgtgcttataaatctgggaataaataattctcagtcctgagcactttcgtgatccaccctccttcttctctttttgtgccttgaaggcaaggagatgccctagagcttctggcctgccattctgtttttcttgggccagtgcacggaaaaatatggcagctttcttttcatt

SEQ ID NO: 26982 - DNA, 1315 bp, Bovine  19866881162378
  misc_feature (1)..(1): n is a, c, g, or t
ncaaagtagaacagccttctaggtaaactgaaaaaaattaaccatttattttgacttctcattccagtgttccaaatataggaaaactctcaggattttctgaactggtgttcagagaatacatgagatcagctttaagaagttggaattgatttccatatttaattatcacatatgtatatgaaaatatctagcagagtgttttaagtgtttaccaaaaaagtggatatgatgacccccagtcagattctaagtgtgtaattgaattctggaaatcaggaaggcctaagagaaattccagtactctttccaggccactgggatgccctataaggaattccttgtcagtttagtaagtatggccccaattccatcatgtcctgataggctgtgccagaggtcatgtgtactaagtcacttcagtcatgtccaactctttgttaccccatggactgtagcccaccaggttcctctgtccatgggatatcccagacaagaatactggagtgggttgctatttcctatgccagaggatcttcccaacccagggatccaatctgcatctcttgcattgacaggtggattctttaccactaggaccgcctgaggccatataattgttctaatgccagggagattgtggttgatgatagtttaattacaatagtaaagataacaaggaatggcccatcgtacctggttagagtttgttttaaagaagtatttttttttgaagtatagttgctttccaagattatattactttcaggtgtacaacacagtaattttgtatttttataggttatactccttgtaaagtataaaatttattataaaatattggctatatcccttgtgttatatattacatccttaaatgtatttattttatacttagtagtttatatcttttaatccccttcaccaaccttgcctctccctccactcctttacgtgattttaatttaataggatgtttcaaataactgaagtggtggtgtggtaggtttctggctttttcacaagtaattcaagtggcatttacattgattttcttctccgtgtgttctgtccctgtactgacagcatacaaaaattagctttctaattttgtttattgtatgtttaaataaatttatgtgaaatgatctaaaataaaaggcaaagtatttacattcaatgggcaatttctcttttatatagtctttggtttttcttatggatattattataattgcaaacaaacaaacaaacaaaccgtattcggctttgcgtatacaactggggggaagtactagtaggagcttccccgctg

SEQ ID NO: 26983 - DNA, 1767 bp, Bovine  19866881299967
  misc_feature (1)..(1): n is a, c, g, or t
ntctgttaaatattaatattttgcttcaaagacttggtgactttgtaacatattatttttaaaaatgaatttttagacatatttttagacaaaatctttctagataagagtacagagaatagagtgatgaattgccgcatacctatcactgaaatttaatacatatttgattcgaaaaagaatttaaaagttaatcatagacttttaacattctgttcctaaatatttatttccatgttcatctctgaaagaattcttctctaataacactagtgtcatcatgcctataaaaatgaataacttttcccagtaaacataagtataaagtttttttaactttatgtaacagtgaaaatattttgcatgttatgttttttagtttgtacccggaatcttctcaaaatttatatcactgtcaacagaaagtagttttttttttttttttaacatttggaaaaaaccttgataccacattatggaatgaacacattccttgtgttccatcttagagattttattgagaaacttattgaataaatctgcatcttttttttctcacattctttagcataatgttttattgttcaaaatacatgtgtttttggtaccatgaataatcatttattcctttatgattttttttttatttgtgggacttgatggcttacgatgagaacagctgaatcatctctcaagtcatactcccggtgtacatgagaaccgatgatacattgaactgtttccattctatgggatttaactcacctaatgtattgggtggtcaagtataagaattacaacattagactttcaaagctctctctaaggaccttgttaggaaccatgtgttttcacagtgtctgtgaatgctttataaggacagttctttaaatgtgactgatacaaaaggtcatcttggacactgggtaagacgtctagaattccaataaaaagcatgtgttgagttccagcttacatcttagtctctgtgtgaccttaggccagacagttgacttctttgagtctcagtttcctaactcgttagatggaacaaaccacagagttatgaggattaaatggtacaaagttttttggaaaaacatactactctattcacccaagttgatagggattgtgctacagactgaactatgtcctgccaagttcatgtgttgaatcccttagcccccaacatgactgtatttcaagataaggtttttagggggtaattaaggttaaatattccttaattaaatatgaccaacctagatagcatcttgaagagtagagacattactttgccagcaaaggtccatctagtcaaggccatggtttttccagtggtcatgtatggatatgagagttgaactgtgaagaaagctgagcaccgaagaattgctgcttttgaactgtggtgttggagaagactcttttttttttttaattttatttttaaaattttattttatttttaaactttacataattgtattagttttgccaaatattaaaatgaatccgccacaggtatacatgtgttccccatctagaacccaccttcctcctacctccccataccatccctctgggtcgtcccagtgcactagccccaagcatccagtatcgtgcatcgaacctggactggcatctcctcttgagagtcccttggactgcaaggagatccaaccagttcattctaaaggagatcagccctgggggttctttggaaggaatgatgctaaagctgaaactccagtactttggcca

SEQ ID NO: 26984 - DNA, 2120 bp, Bovine  19866881305203
  misc_feature (1)..(1): n is a, c, g, or t
ntcctcatagcatttagtctttgcttccagttctacctcaaggctgactccattatcttcaggtattaaaagacactcatattctgataacagataatgattaaaattgtttaaattgacctgctgcaacttacaaccaacactttaatatgaaaattgtgtccaaactaaaagctgaagtgatagtaagaaaattgtatattttctccagttacacataaaaccattacggtaactaaaatagaaaataagttactgcttcaaaaccttatttttcacgaattaagaacttgccgatgtacaagctggatttagaaaaggcagaagagctagagatcaaattgccaacatttgttagattatagaaaaagaaagataatttcagaaaaacatctacttctgcttcattgactatgctaaagcctctgactgtgtggatcacaacaaactatggaaaattcttaaagagataagaatacaagacgacctgatctgcctcttgtgaaacctgtatgcaggtcaagaagcaagttagaatcagacatggaacaactgactggttcaaaatggagaaaggggtacctcaaggctgtatactgtcatcctgcttatttaacttacattcagagtacatcatgagaaatgctgggctgtatgactcacaagctggaatcaagattgctgggagaaatatcaccaacttcagatatgcagatgataccaccctaatggcagaaagtgaagaggaactaagaggctcctgatgaaggttaaagagaagagtgaaaaggctggcttaaaactcaacaatcaaaaaactaagatcatggaatctagttctatcccttcatggcaaatagaaaggggaataatggaaacagtggaaaattttattttggggggttcttaaatcactgcagacagtgattgcaccatgaaatcaaaagatgcttaaacctacgcagcatattaaaaagcagagacatcattttgccatcaaaggtccgtacagtcaaagcgacggttcttccagtaattatgtgtatggatgtgagaactggaccataaagaaggctgagcaccgaagaattaaggctttcgaactgcagtgttggagaaaactcttgagagtcccgtggactgcaaggagatcaaaccagtcaatcctaaaggaaatcaaccctgaatattcactggaaggactgatcctaaagctcaaactccaatactttgaccacctgatgggaacagctgactcactggaaaagatcttgatgctggggaatactgaggggcaggaggagaaggggattaacagaggatgagatggttggatggcatcactgactcaatgcacatgaatttgagcaaactttgggagatagtgaaggacagggaagcctggcatgcggcagtccatggggttgcaaagagtgggacatgacttagtggttgaacaaccaccaaccaaaatattgtgaagtacaaaaaatgcccactctcagaaacattgttataaaatccacagtaggtcatgagtgggaaagggtaggccaaaagaatcactatcttccatgattgatccttagagtctatttgattttttgaaaaacattaactagttcacgatgataaacattaaattcaagatgatgtcatttatattcatatgtcaacactttagttaaagttacagttaagcatcctagctaaatgtttataattatacatccaaaaagccacatatataccctgaaaatggagtacatgtacaactaaataaaatctcatgtatttttacatgagatcatatctcatcgtatttcatgtaagtttcaagtttataacttcatatgaaagcttttaagtaaataagtaaaaataatgtcacaatcatgctgcttgactaaaggccttgctaaaacttgccaaaagtgtgcaaccattgtcatgaatatatgattgtagaaaaatgcatttaaaccatcagaaatacagcctgcaggactaatcaaggcaaatcattacctgctgcgggatctgtaactgcttggctggtaatgccggatggtggctcctgaagctggtaagtggcatttgtggacggcgttgttgggctg

SEQ ID NO: 26985 - DNA, 1958 bp, Bovine  19866881569764
  misc_feature (1)..(1): n is a, c, g, or t
nccccctccccctccatagaacttccaaagtcacagaaaatctctagggttgacccatcttaccttatttttccaacaaaattatgcagctatctaggcagtcgggagttatttccaaaagccgcatggaaatcactcccttaaaaacctgtcactcaaatactggtcaccctgtaatgccatctgtacaatttggatttttgattagaaagagggtagtgtgagcagagccacagggagaatcttttgttttttcttttaatttttcaaagcactgttgatcacttgccttccagacagctgatgtgagtgtgtgccgtgtgtggtagtcgcttcagtcgtgtccgactctgtgtgaccccctggactgtgaccccatggagcccaccaggctcctctgtccatggaactctccaggcaagaatgctggagtgggttgccatttcctcctctgggggatcttcccgacccagggattgaacccacatctcttatgtctcctgcattagcaggcaggttcttcaccactagcgccacctgggaaacccatttgagtgcgttgtctctaaaagcactagaaatactcctgtactccatatattatagttttcatatttaggaataaaaggaaaacgttctggtaacttgcagatgtctaaggtgtcaagctagttatcttattgtttggtggagaggtcagagcagtggatgtaactgcttgatgacagaaggggacagagaacccagccaccgtgtccctggccaactccagcaagtctcagtaggctcactgatgcacagacccaatgaaaattgctccttctctggggatgctttttctttccatttttacttcataaaggaaggtattgaaacaattagtcggcagtatggtgttcgttttctcatggtaaatttggaaaatggagcaaatatcgcttcagtcagcagaatctgggcttatataactcaacttctcccaagacatgtttgtaacatttttatattgttccctttcataacgtgcagactgcctccaagtcttcaagtctgtttatgcaaagcctgcaggtttacttggagtttatgtttctagtgtcaggttcaggggtgtaaacgcctcagcatcctgactgtgatgtcactgtgtttggcacacagaataagacccattgtaactgtcttaattcttttcattaattttcctaaatgaacgtgaatggcatggtgtgtttttacataattatggcacaagtgagaggcttgagggaaaagtccaaccactacggtatcaaagcagaataaatatttgcagaaaaattctgccataacttaatattttgcatatgagcccctgtacaaaatctgagttattcccggagctcagtccaaaagaacatgtctgtggcccagccctggaaggccagagatgatgatggatcggaaaaaggtcagcttgagttgcagtgccaagaataatgacagaaagaaccaaaaaggcagaataacagtgcacccagagttctgagggagaccatgcctttgctgcgtggccgtgagataggaccccctgtggctttcttcctgctcccagccctggacctggtattcagctgcttcatgggttggcagttttccccagccatgcatgtcagcattttataatccagccccacaagtgctgagatgtctgtaagctgagggcccagagtcactgaagcttgccgattttattgattttactgctctgtgagaagcacaagccatggaacataaagggaagccagacaaggctgaactttgggtgttgggtttgtggtgtttatctgaaggatgcttgctcacaggagccgtttcaggtacaacagagcctgcaggccagtgcctgtggactcagcatcatgcttccctggtcgttgccacctgccctcattcaactcgactgtgactgtgaccga

SEQ ID NO: 26986 - DNA, 1636 bp, Bovine  19866880562039
  misc_feature (1)..(1): n is a, c, g, or t
nacaaggagtcccacactgtactgttctctccacttctgcgtaatgtgcagatccatctggatatggcataccagggtcatctaaggtgaagcccaggccattctcatcaaggtccccacaagagcctaatatgccaggcagccaaggggctcctccgggggctattaaaaatgatcctatctgctccaaactttgaaattctagggatcctattttttatttagccaattcagtctgaacaatcaacaagttcatgagtgctcatgttcactgtggcattccctaaatgcttctgtcccatgagagccaggctggttgtcaaattcagattcgtctttcttacaccttcctttctcaatctgtccctgactgaactgcgcccagaggccagatcttctctcacatccccccagagggcactgtgtcttcataaagccagtcaccactattttaggtacttcataaacgaccagagagtggcagttttccttcatgattttctcttctctatttaagtattaaaatatcaaaaggagaaaaagaagttaacctcatagtacttggtaaagagacatgtgccccagcacagtacatgccaagtactcagaatctatagttatatcagttaaaggtcaaaaacactaagaaaagtaatatttttcttactgttaagataaaaaacatagctgtctcaagtgacattcaaaaaaaaggaggacatgcacattaaccaaatcaaaactgttttttctacagttagatgtgacaatcttaagccaaatcatccatgaaagttttctaatgtacttaaggttgtatacgtatatttgcttcttcaaagatattttgcaaagccactttgaggtagaagggaagaggtttcaatggaccgctttttcctgctccactgtaaccgtaattgatcactgctcacagaagacatagcttccgtattttggtccaccacattttccaccatcacgtaagtatgcttgttaggttctcactttattatctgcctatttattgcttccagaatgcccagtaaagctgaaatttttcatttaaagtgatagaaaaattttcctaaaatacttgcttaatcatcttagatttgacttttggcaagacagttaagcacatagaaatgaaaacactacatttcacaaatacacacacaaaaaaatacaaactttcactgtttttcttatagagctcagtcgtaaatgtgcagcttacatataaactaaaaacacttttaaacatgattgtcacaaaaatattttaaacagagatgaaatgtatgaaggcacacacagattgtcgatagtgacatcagttacatcacatttctttagaaacagaacctttcctgtttctgtaaacaactttttttttctcacacatttaaagtgagggttagtgctgacataagattattgctatactcacagtttgagtgtttccactgtgtatgaggtacattttctccatccatacatccctactactcttacctacttgagagttaagagtcaacccaagtctgtaagctatatccattcaataagatttttgtcaatactggaatgataccagataacattataaaacatcagagatcaaaaatatctt

SEQ ID NO: 26987 - DNA, 925 bp, Bovine  19866880096726
  misc_feature (1)..(1): n is a, c, g, or t
ncatcccttcatgggaaatagatggggaaccagtgtcagactttatttttttgggctccaaaatcactgcagatggtgactgcagccatgaaatcaaaagacgcttagtccttggaaggaaagttatgaccaacctagatagcatattcaaaagcagaaacattactttgccaacaaaggtccgtctagtcaaggctatggtttttcctgtggtcatgtatggatgtgagagttggactgtgaagaaggctgagcgccgaagaattgatgcttttgaactgtggtgttggagaagactcttgagagtccgttggactacaaggagatccaaccagtccattctgaaggagatcagccctgggatttctttggaaggaatgatgttaaagctgaaactccagtactttggccacctcatgcgaagagttgactcattggaaaagactctgatgctgggagggattgggggcaggaggagaagggaatgacagaggatgagatagctggatggcatcactgactcgatggacgtgagtctgggttaactccgggagttggtaatggacagggaggcctggtgtgctgccattcatggggtctctaagagtcggacatgactgagtgactgaactgaactgaactgaagataatacattaactagaatttacaattaaaagggtgtttgttttgtgaagaaaaattctctggaatattcatgttattttaatgtgcctctgaaaattcaactttaaaattgctagaattgtggattttcaaagaaaaatgcactgaaaaatgcaagcaatgccagcctttaggttttattctctttaggaaagaataagcttaatcaggcctctgatgaacaaaaaattgtccccagacaacagcagaatcctgtcaaatccaaaaatcttttataaa

SEQ ID NO: 26988 - DNA, 994 bp, Bovine  19866880410141
  misc_feature (1)..(1): n is a, c, g, or t
ntccatattagattttcatccaccaagtgttaacaaggtatggaggttaacatgcatttacacgcacatttgcattgtgctcattaggcatggtttattaactattatcatgataagtgtactatctaagcttacagaggtgtttcagtgttatgtaggcaactgcaaacagttttaacaggctctattttggaaccatctctctgctacattttcccacttatgcaaagacattatataacaggcatcatcttagatgtatattatgcaaccaggtcactactcaagaactgaaaataccacagagatgaaaatgaatttcagagtaaaaaatgcattaggatgtgccaacactttcaattccccaagtgcctgtgcttaatcacaatcagctctgtagtagaagaccgaaggacaattgcagaagtgttgtttatctacttggagaggattcattacctccaacattatttgacatgaaaacagatgtacctctgtcactgctttgaccctctctaataagatgaaaaactaggctgatacagttattgatcagagtgaaacccattccaccggaaatagatgtacatgtacagcaatataaatgaggatttaacatctgttcccagtagattgcctattaatctggaatctaaaatgacacaactagctgtttggcagtactacctcttattgtaggtatacagataaaatcacttcttgtattgctcaggaggcaatgttttataaatatgggtaactgtatatgaaacttgtaaatcaaatatcccaaacttggtcggcattctaagtgtgttgaatattgaaagtgtttatcattttgcaattaacttgtcttctttctaaaggtaacaagaagcatttgtgaatattagtgggtaccaataagtattttatacttattcagatgatctttcactattgttaatatttatataatataatcttactaaaagggttacattaataaaat

SEQ ID NO: 26989 - DNA, 865 bp, Bovine  19866880499571
  misc_feature (1)..(1): n is a, c, g, or t
naaacaattttccacaatcactcttgtagtatggatatctcagaggcagaatttattgccaagaggcagttttaattagaatcaagtagagtacaattggagctttaataataagacaaagattttcctcattaaatacattaaaagaaaatgataaaatgcatgactaattagaaaatattattcaaattttcaattcaatacaaagaaacatatactgtcattgcagtactataaatattacttataattactaaataatatttattgtgaatttttaaagtgctatagtattaaataatggcagtaaatatctgtatcacataaatattttctataaacttgaaacctaacagaaatgtagacattcccacagactactcatctttttatttttgactttactaataaataatattagagaaaaggactataattttaattttcactaaaagatacactatattagagtcacattatgaaatcctctgattccattgtcttcctttctcatatgcttatatatttcaagagttgtcataattcaggttattccattcccttctataatacatctgaatgatatattataacatctgaatgacagttatcttctatctttaaaactacagactagagctcatgaactagttttctctctttattttaaagttcatatttatagctcaatcacactatggaatttatttaaactgaagaatcctacaaatgtctttcacaatgatgcaagttatggtaggcacaaattaataaggggaaataatggtaactgcgaaactatttttttctgacctgtgaactggaaaaaaatatctacttgatatataaacacatggttaacatt

SEQ ID NO: 26990 - DNA, 888 bp, Bovine  19866880562063
  misc_feature (1)..(1): n is a, c, g, or t
naacacccaggactgatctccttcagaatggactggctggatctccttgcagtccaagggactctcaagagccttctccaacaccacagttcaaaagcatcaattcttcggcgctcagctttcttcacagtctaactctcacatccatacatgactacaataacatagtaatcataaataatgttaaactgtatgctttgaccttagaaatccaatatgcagtgaagaaatctgtccattgagcaaatatttatagcacatctactaatgctcagtgctggggaacaaaatagattttttttttgtatcatgtcgtttatattttatttacacttttacttaattatctacatatagtagaatgtactttttagaaaaatcttgccattgttaagtccaaatttacttttaactttggtataaactttccttgacaactctaactcccacgagtataacaaggcaatagatatgtttggcagagcaactatttatgtcctgtcttctgtgttgccagggtgatggtagcaatatcgaaaacattggaggtggttgttattggcaaggatcctaactttcattttcaaatggaagaactgtaaaaagcaaaatgtaggctgggatgtgggctgtagactggtcatggctatacctaaactagatgaatggattattaatggttaaccaagtatggatgctattctcggaaaactaatactgataggcaatatttccttaatatttaaaaattaatgaaatttggtcattacatcaaatacttttattaaaagctaataccatatcattgcacaatattacattttttttgtccacttttctgtctttttcgtggaaaacaattcaaaagctttactgaacttttggttt

SEQ ID NO: 26991 - DNA, 912 bp, Bovine  19866880633416
  misc_feature (1)..(1): n is a, c, g, or t
natctttgagcttgtttgtgtatgtagaataaaagaggttttgaggcaccagaaaactccattataggtggcagaaaggagtcttcaccaaatatagtactgtattttagcaaaaaaaatctagaacacaaagataccatgactatagttacaggaataaattggggcagtaatagatgtttttaataagagaattgcatgttgcttttgaattttccccaagctctttcaaagatttatataaaaccagccaaaagcttgatgtttgtcaacaactctatattgtaagaaatttagtggtggtatacagagctcatctattataagctacctggaggaatgtgttcttttgtattatgtttaatacaaatagtgaaattaactgaatgattcaaatgcctggattcacaggactagtcattttttaaattaccatcactctcttattaggtcataaaaagtatattgaattacatcaactagagtcgtgcaagagatgtgtacccagtctgaatctgtaagcagatatgagctaattggcctaactggccttagatccagtgttatttaaaaggtatggagactttctaaaataaacttaccaaagaaggtaggataatgttatattttgaacatatatatttaaatctcagggagtaaagcaattatttaggtttatctggacattgattattgctacttgaaatctagactagtatttaatctgcaaatgtcaaggtccacctggtgtggattaatatatcagatcagatcagatcagtcactcagtcgtgtccgactctttgcgaccccatgaatcacagcacgccaggcctccctgtccatcaccaactccgggagttcactcagactcatgtccatcgagtcggtgacgccatccagccatctcat

SEQ ID NO: 26992 - DNA, 1358 bp, Bovine  19866880634328
  misc_feature (1)..(1): n is a, c, g, or t
ntttgccagtgaaagcgccctgaccttctctaacgttgagagagacacgtgacccaaatgaatcagattccctgtccttggaactgaaatcttggcagagtgccaccaactctggaactctgaggcaaaataccccaatttgtagcaccgtaaaaagatagttcattagtttctattacctagcctccaggagctgttctacttcctgggctctaggacactggcttttcagttttctcataatatgcttccaaattcattttttgcctaagttttcccaaagagtttttgtggcttgcaactcatgacattgactggtagcaggcagtttctcataatatagttaggggatttcagcgtgacatgctattgttgatgggttatgctttggacccattaatgtcttgtaggtaaggtaacgatataattcatgatcttaatctgggacacttctgaaagtcacagagggcatcatttaaaattagctataaccacagtaaagaccaagacataggtcctactcttacttttagtatatcttgtgtaaaaaaaaaaaaactttagataataagctctggtttgtatttacacacctttgttttaagaagtaataaagaatgggctcgtcattgaacaatcatgtctttctacaaaattttgagtgtgccactcctaagatcccagagtggtggtttgctatcttgagaatttatctgaccttatagttcaagtcttctgcattaaaacattattgctaaggttgttactgtatgaagtaatagaggcacaacaaacaaaaccaccaacaaagacgaaaaggtctggctgatgctctccaaaacatattggctgtatgagacagcccacactcagcccatattcttttgaatatgttccattctatataggtcagtagtactctttgttttttaaggaacagaaaagttgaaaaagtccttttaatagtaaaattcttttaaccatgcctaccatatatatacatacaaatatatataatatatacatatacatatgtgtatacatatacataaatactgatcataattttcacctactgaattacccagtttacacagatattgtgaataaattatgtgataatgtagggatgttcatacatggaaaaaattccacaaaaaaccatgaagagaataaaagtacagttttgtagtgtaaggattaattgtaaatatgacatcgtaattcactttttagctattttccacctttagggttttttttttaacctaggaaagactttttaaatgaaggaaatacagttgatttacaatgttgcattgatttctgctgtacagcaaagtgggttcagttttata

SEQ ID NO: 26993 - DNA, 1321 bp, Bovine  19866880659277
  misc_feature (1)..(1): n is a, c, g, or t
naatggtacagctatttgtgtctatttttgttttttaaaatgtcagtttctgaatgaaaatattgttaagatatgacccccacccaaggagtggtttttaaaccctcaaccctgattaagattgattttctgttgacattatggaagtacttcctctagggattcttcaacacaacaactggaacttttagaattggacataaggatcaaatcagattctttcataagactttgtataaagttactataaaaagaagccacaactcactttattgctgcttagagttgaaattaagaaagaaattggtactggatgatcataacacacaaagtaaagtgacccataatgcatactaatgttttatagacagcattttatctgaaaataaataactgactcaggtccttactgttttagataatcaagtaagaattataacagcttacaagttgcaaaacagtcattattattaagcaacatttttgtttctttaaagaaattgaaaactgaagaaatgaatcttagttgtctaataatattctaggacaatagtgatttttgtctctaaataattgaagttatgctactggaaagaatgatccaatatgaagagcaatttgaaattacctctcagaaaacagtacaacatacaatcacaatattgtttatgtgactctccacctgtgtactttaaaggataggcattcattaaatggtaacagttagaagctacatgtataaccttaatttcttacactttaataggtataatgtaagaaaaagcacccccatacatcaataagaaggaaattctgcaacattatcggtctagcaatctctctcccatgtgatcatttatgtgtgttatgagaggatggttctcaacctttagtttgcaaaagaattcaccaacaggttatttaaaaggtggattctccttctcctatcccagatttctgctaaaattatattggtatagttactaaaatttatatgagtaaggactacttcaggagatttggctcaggtggcccatggattccacttaggaacagaagtggtataaagaactatgttagtcagcaattgagaaaactggggggaaagatatcaaacagttttaatttgtgaatgcttcttgacacaattgcataaaaaatgtaattattattaaaaataacattttttaatcttaagtcagatagagttatatacatgtgatttttgaaacttctacatgtgccttgttatcttctgcttgggtagatagaattacattgatccaaaacaaaagataggagattataggctaagtctttt

SEQ ID NO: 26994 - DNA, 1224 bp, Bovine  19866880685139
  misc_feature (1)..(1): n is a, c, g, or t
nccagtaattggttaaaaagatgttactcatatttcttggaaaagggagatgttcactagtttgtaggtgacatagagacctttttgggactgtttaaataaaattacgaagtgagcttgttttgtttcattgtggtcttgtctgatattgatgttctataagaatgtctaatattcaacaggacagcatggtctagctgtaagcaccaggccagtttctgacaacagcaagtcccagctgtcaatgtcagaccagttttaggccacctaggactgcttttcccttcctttttttttttttttttaaatcaaggctcccagcatagtaagaagtgagttacttttcattccaatggtaaatttgcagaatatagtccttaaaagtggtaactaaacgtagggtaaatatcaaggaaagtgaatattactcatacaaattcattcatttgataaatatattgagtattgagtagttggaaagaactctcagtagcccaaaggggaatgagtatgtagttgcatatgagacagtgattgtctcttaaaaaaacgtacattttggtcttatatataataaatatttcttctaacttagaccatttattataaataaggaaaaactgtctgtgtatttgttaactaaattcttgtttagagctgaattctaaataattatatgtagtaactttaagaatattgtcagagaatccttatggaattatttagcctgctatgtttgtgactatgtttgtgaaactcaaatatttacctcccacagagtttatcaaggctgctatacactgagttgtcagtagaaataaatacatgactgaatttaaccaaagaaatcagtgttaaataatatatgacaaatagctgttcaccacaagaatcaccctgcatgtcgtctctagcagtgctctgcactcacactgatatgatagatgtatgatataaaaccagagctgtgtcatgtagtcttgggtattcttatataaaataaagatttcttcgtaatttttttttctattaagtcacagcaaaatgtgatggtaggaaccactgttctttttggtattgtcatcagccttttatagtcaataaatgcaatcctctaaaaggaaacacaagggaaagcagcccagtttaaagatgttgttaccaaaagtaattgacatgcagaaagagaggtctttaagtcctgtatctaccctgtgggggtat

SEQ ID NO: 26995 - DNA, 787 bp, Bovine  19866880708680
  misc_feature (1)..(1): n is a, c, g, or t
nattactactgtaattgcttccaacctgtcccctactgcttcctagctccaaggctgctttttcatggccagataactttatgggcatggtgtcctttttccaaagttacctcctggtctggcattgatgattcatggggtcagtgcaacactggttaaacagtaataagaaatgaagagtaataaatttgatattcaactctggcgctattccaccagggttgaagaaaactaaatggaaaagaaatacttttttttttttaaaggaaactcaaaagtgaaaaaacattgattatttattgacaaatcaaatcttttttttttgacagttcagcaagcctgtcttgtaatcaaactataacaggttgccaggccacatgaagcctatgtcaataatgcatgttattgacagcagcctggcttgcaaatatccttttaaaacagctttcttccatatcattttcttattagaagattttccaatatctactcagcctattaccatatcataagatcaaagtatatgatgctggaagtgttgatacatttagatagaaactggtttgaaaggttggacagattcttactgaaatataattttcttttagattttgtgagctagagaaccaagcttaatggtcatcagaagtagctctctacttgtttctgatggctagcaagaaggattagcgagagactttggtcaggaatagaccatagggaaagaagcagttacttttaaaatcatacttctaatccataaataggatgttttaacttttataat

SEQ ID NO: 26996 - DNA, 749 bp, Bovine  19866880759069
  misc_feature (1)..(1): n is a, c, g, or t
ntctctgtgatcccttgtatagtaatgcctcctctccatgaaggatggctttcctagaccttattatgctttcctaaatcacctgagtttaaaattcagtggtaatgatttctagtcctcgattactcactgggaatttaacatagaaagcatattctaaaaacagtctattattgaaataaaaaataattcagggtctttacctgaaacagattcatcactggaggttattaactgaccactagaaattaattaaatttctttaatatatcttgaccatttcctagccataagcacgtatcaaagaattggcaattgctaaatgtaagcccagaacattttagactttctgaaattaatatctgtaatggcagtttttaatattttctggaaatgtcttcattgcctagaagtccctgaaatacttgcattgggagttagtgctctgatttatttatgagagaggcatttgaatcaaaataaggactttaaaacatagtaaagggtagtgaatgaatataaaccaaaaatattctcttagcatagatgtggaaaattaacaaaaaagacatataaatactacagatacatagttttactttgttctaaatgcctttaaaacattaatgcattttctgattcattttcatgaaacagtaggggatgtaaatatagaataatgatttccactttaaagttatagaaacagagacccggaacaatgaaaccattcatcgaacgtcaactaa

SEQ ID NO: 26997 - DNA, 1688 bp, Bovine  19866880796284
  misc_feature (1)..(1): n is a, c, g, or t
nggagaaaagtttatataaaacaaggaatgactaattacaggtgggaaggtagttaatctttctagctccctttaaatgctgccatatgggactaccaactttaccttctgtttggtttgaatttgtacaagggaacaaaataagccttaagaaaaatctattgtgtgaaaatatttaaggtacttaaaggccaaatataatatttttgtgctgtagtctaccttagtctgccataatatcagtatcctttatgacatggataattaaatttcattgcattttgaatttaaacagatcagtttggataatctgagacttcagaattagatgagtgggaaaaacatcaagggggtcagcagaagtgaagattacactgtgtaatttgccagtcctgttcaatttagtgctagaaattgagtaatttttcatggacatagaaaacatgcagaggacgtaacttgtttccatctagttatatgcttgtgcagtgaatgtgttatccgattctaaaaccatctttgaattagctttttttttttttttcacgttggtactctgtggtttctgagattttgtatgatcgtatgaactgcaagtgatgctcaatattgacaagtacagtacaaacagcagatggtaagatactgatggagacatttgttaatgggccagtagtcttccttagaagtacagattttggggagagtttttggcttttttaacccactgcttttctatactgagtacctgggaaggaagaaagaatccaaagattcttttgtgtttcttcatgggtagaaaaggtgagtatcaggattccatcaaccttaggtgaaaccactgttagtaaacggagttgctacgttaggaaaaagaatgtatgtaaacaccagctctcacacactagttggtaaacttggacagatttcctaacccttctgaatttaagattcttttaatgtatgttgaagatcacaatatctattttattatgttttccatttactaggatgaagtaatacatgtatagaaaatgtacatagtgatgctcctggatattattatgtaactgggaactaaacaatgtcatgggagatcatagattctactggcttaaagtatgggcttcagaaaatcagaaagatctggatttgaaccccagacttacagcttcctttctgtgggagcataaacaaattactttcttagtttaagcattagtttctttataaaatggagtattgttgttatatggatagtgctgctgctgctaagtcgcttcagtcgtgtccgactctgtgcgaccccatggatggcagcccactaggctcctctgtccccgggattctctaggcaagaacagtggagtgggtcccatttccttctccaatgcatgaaagtgaaaagtgaaagtgaagtccctcagtcatgcccgactcttagcgaccccatggactgcagcctaccaggctcctccgtccctgggattttccaggcaagagtactggagtggggtgccattgccttctcccatggatagtgctgctgctgctgctgctgctgctgctaagtcacttcagtcgtgtccgactctgtgcgaccccagagacgtcaggcagcccgccaggctcccctgtccctgggattctccaggcaagaacacggaggggttgccatttccttctcc

SEQ ID NO: 26998 - DNA, 3234 bp, Bovine  19866880818320
  misc_feature (1)..(1): n is a, c, g, or t
nttaagaatggataatagaagaaagttgatgttttttacttattaagtatagaatatgcccagtacagtcacttaaacaatcattctgcattttaaccaggtgcttaaaaactagagataacaatactgttgtctatctgttttcaagtgtactttttacatttttgtatgtctgaataaagtctattaaggttacaaaagaatattcattttgtgttatctttgaaataaacagcatcaaatacttaaccaatgtcttcatattctcacttactttttcatatcctgactaccaatacaccataaattcagggcaaatcattttgatgggactacatttttcttacagttacttaataaagtcacacattatgttatgactatatttgagaagaatgaaggagaaaaaaacataagaactctacaagtgttactggaatcagaaaaacagattataggttgtttttgcttttaaatctgtcatcaaattccataataacttacaaagatttttgtatgtactctctgcaaatggattcattcatatgtaatttgtaatagctttcttctcaaatatgtatttaaatatacatgaaaataattcaaaatatgctctgtcataattaacaagatatggcactattttataagtccaaatataattgctctaaaatgacaagcaactttttcccccttatatactgcaaaatatttgagtgaacagagcttcattggcacacacaggaatgattcttttaactctactgtatttcaattactaatataattcctattctaatttatctgattttccattttactattagtattaatggcaacccactccagtacccttgcctggaaaatctcatgaacagaggagcctggtaggctacagtccatggggtcacagagtcggacacgactgagtgacttcacttgcacttattagtattaaaatgtagatctaaaccaggtgttgttctttaaacaaaagtataacacaaaatcctgaataaaatccattcaaatgagttaaattattttagaacaaaaatttaaagtacatttaatttaaagttcaattttcttacatgtaaaatgggaccgggttggtgaaaaactatgtgttacttttcaaattaaaatttgaataaacctctactaacatatgattttggcctttcatacagttcatgagtataaatgaacatgaacttgggctccaggagatggtgagagacagggaggcctggcatgctgtaatccatgggggtcacaaagactcagacatgactgggtgactgaacaataacgcataatttaaagaaactaatatggggcatattccatcaaattattgcaatatcatttttgatcacttgagaatttcattagctcttgaaatttattcccttaaataagcctgtgatgtttcatagaggcaaatggaaatttgcaagggcagagcaacaggtcaacagtaaaaatattcttacttttatataatatatatgagctatctatatgtatacatattataccaaaagaggtatgcatacaaaaaaccccagaagtgtattccatttcattttaaattaaacatatcctataactgatgattcataatacatagtaatttgtggcccagtttaaaatatcaatcaacattagtagacgacaattttgaggaaatttgacagggatttacagatagaattataaagtggccaataatctaggagagatattacacaaagtaaaatttttgtttttttcaaatactactgacttgatttttggagaaatagtcaactgtctcagtttcttatcacacgagtctttgtggttaaaagaggtaatacatacatagtcttttccaaaactacttgcaataacatgccagacatattggtgtgtgtagaaaaaaaagagcaaaaacttagggttgaaatattggccttatattattaagtctattattaaatgtcaagtattgaacagaactctgcctagtcaggtaatagtttatcaggtagtagcaaatgaagtacaattttaaataatgctgacgtaagctagaatatgctagaatttcatagggaaaaaatcctaatacaaagaaggttgcagacgtgtttcacatccagtatatagaaatctattagtttcaaccaataatcagaactgttttatacatttatatgtttttaatgtttaaaaatgaaatttaaaaagaggatatgaacctgcctatttctccccatggcttttcttcccactcagacagttattcttcttagatatgaaaggtgggtgttaaaaggggaacgcgggtatacctgtggcggattcatttcgatatttggcaaaactaatacaatattgtaaagtttacaaataaaataaaattaaaaagaaataaaaggagaaaaataaaatgagagtaaactcattcacatgttatgtgctaatggtagatgacatgtaacagtttttaaaaaacttggagatagtacattatcaattacttaaaaattaagtttagtagataatatatctacgcaaaatgaatggttacacacacacacatgcacagtcacacacacacactatttatacagttttctttttactaaagactttacacaatatttaggttatcctggtctcttatcttactattcctttgtttctgagaagtttgatggtttctcttaattattaacaattctgacagaagactaaagaaatagcacaaatgtctgttaatattttaaagacagtatacaaggcaatatacgaaatatatttcattccaatatatttttctatttttatttcaatcattttttctgttttattccaatcttttctgctttaatacagttgacctcatacattactcatttactttatctgtatctatcaattaactatgtaggagttatatactcacttgctgcatatagtttttcctactactttcatttaacctcataatataagtgcatacaaggctatttattaatatctttgcttacatcattaaatatagcaatatagtattttactatgaaaatcaacatcatttaaccattttcaattattacatactgaaaatatttccaggtttcgccaaggaagctcttaaattgtgtttttagggtcatcacaaatccatgtgtaatactgagtgggagagttagggttttcttattggagcatgtactt

SEQ ID NO: 26999 - DNA, 1263 bp, Bovine  19866880845744
  misc_feature (1)..(1): n is a, c, g, or t
naattcagtgctgagtccaagagaaggactaaatacgttcagaaaagtcttaatcctgagtggaatcaaccagtgatttataaaagtatctccatggaacaggtatgcagctattattttctatatgacagatttaggctaatataaaaacagtgatgataaaattattgaaagaatgtgatttatatcaatttttctatataaacaaccaccaaccaaccaaaaataggtaaagtacatataagaaatgtagccataaaaggaactgagtgcagttcaaagaacggtgaaagaaaatgtgcacattttggcaaaacagctaaaaaaataaatacagtaaataagattggtaaaacattttccattgattatttcaaaatgaaatatttaagtagaatgggccctattatattttgagggaaaatatttccagctaggcacatcatgacatttataaacagtatagagatacaaaagaactggacacactgaaatgaattatcccatcaggcaacattttggagatcgtcttttctctaaattgagacttaataaggatctggcattgtggaactgaattgtacaaaagaaagcatgaagaaaactaatgtaaagggttatcaccagaaacagaatgactctaggcaaaactacatcaatatatttgtgaaaatcttcataactatgcatgatttacagaaaataactgatggtttataaggatgaattaagagagaagagaatacaaataaaatagaaagaagacatccatggaaacaatttacgaatgagttgtctttcaaagtgagatttctaatttatcctctggaagatttctaatttgactgtgaaattgaagctggatatcaattataatctgggttcttgagttgaaaataagtcaaattcacctgcaaaaataagataatgctactaatgtgttttggcaatttactgagacaaatccaaatgctttatctaaataacctagacatttttatgacctatgaatttcatgtgttaaagagtatatatagattctgctttgtacttttaataatgggagggggtagaataacaggaaataaagtaaaaatcacccttttgtttgcaaaacagtgaggtaccttatgatcaaacactcggttggactgcaaaatgattgacagtttacataatatttaatgtaagtatacagttttagataaaattaaaactatttttacataaatagagtacaaggaataaaaataaaaggctctg

SEQ ID NO: 27000 - DNA, 869 bp, Bovine  19866880942156
  misc_feature (1)..(1): n is a, c, g, or t
ncatggtattcattgttgttattatgaaaagcatcactttgtaaaggctgggctttggactgtctgggcttcccaggtagctcagtggtaaataatccacctgccagtgcaggagtaaaagagacatgggtttgatccctgggctgggaagatcccctagaggaggaaatataaaaccactccattattcttgcctggaaaatctcatggaaaggggagcctggcgggcctcagtccatgggggtcccaaaaatttggacatgttttagtgactaagcatgcatgtggctgactgtctatttttagagttttcctaattcagacccctatctatgcagttaggtacaagaatttccttttaatgttggttatttaagagaatttactgaaagtaactaaagggctctatgagatgaaaatcatttaatcatatgtgtgtgtgtgtgtgtgtgtgtgtatgctgatgtgtgtatatattcatatggtggtgatggtttagttgccaagttgtgtccatatacatacatacatatatcccaaaccagaagtacttatacatgtggttttaacttctgtaagcttctcacaaggatctaatagaaacacaaagctgtccaagctattcccactcagatttctatcttctttcatctttcaactctgcaccacctcctggcattttcaaagtcccacgaggctcatatcctgctctgtctgcattgttgtagttgctgcttgatgccatggtgtttactaacaattgcacagagaactgtttacagtttagactttgtgtatagaatttttgtctatttttatctctagctatgggaaaatctgtgcactcctagaatttaagagagtgttaa

SEQ ID NO: 27001 - DNA, 1821 bp, Bovine  19866881241332
  misc_feature (1)..(1): n is a, c, g, or t
ntgcaagcttcttgtcttgaagttttattggtcccccgcgtaaaccaaagctactcagcctcttttctccactgaattttcctactgagctatccttattctattactctttatatctctaattaatatctaattgaagctatcgtatcctgaccctcgccgacgccgtctctccttcgagtaccctggatcagccggggctggtcctcggcagtcattaccttaaaaacattctttcagtcttccctggtagctcagtggtaaagaatccatctgccaatgcagcagacaccagtttgagccctgatctgaggagatcgaacatgccacagagcagctaagcctgagctccacagctactgaccctgtgctctagagcccagaagccacaactattgatcccttatgcttcaactgctgaagcccacacaccctagagcccacgctccacaacaagagagaagccaccacaatgagaagtccaggcaccgcaactagagagtagccctcgctctctgcaactagagagaagcatgcacagcaacaaagacccagggcagcaaaaaatacattaataagtaaataaaagtattttttttaattcttcaattaaggattttaaaaagcactgaattttcatatttttagcattttaaaatgacttattatttgtatcttttagcaatgtagagacttctttattctatccatgtacatattttagaagggagaaaagctaacttgattactgtgccctttttctgtttcaaggacaaactacatctgatgtatttcaaaagatatatagaactttccatttttattctaattaccctttttacgatgtttaatgttgtcacatacagtgaggccataaaacactatacactgaggatgcagatgttaatgactgcttcaaaagactatagtttagggaatgtgcagcattgcagacagaaatgtttttttttcctatctctggagggattttcaatgcagcagtactcagaggaactgcatctatgattctgctgagtttacctcaaagacattttctgttttatctttctttattttccaggtagccttcaagctacaaatttacatgagaaaaccacagtgtactgacttttaattaaaacttcacccccaaaaatgcattgggattgaatttaaatatttaattaaaacacagctttaaaaagaaaagaagaaggagggatttgagactaagttatcatttgagtaagagacatcctaatttaaccatgacaagtaccctgatgggtccctgtctaagggactcacctgacctatggaccattaaatttgtcttgctaatgagtagccccttctgtgtattttgtgggcactaaaactcaggtctcccaacactgaaatcatcatcttatcattctcctgtactttttattgtgatgaatgatactcatatccctctagttaccaaagcttgaagccctaatttctcccactccctccctctgcttaataatcagtgtcttttatgaagataacttggcacacagctctgcttacatagggacaatgttaattggcttcatcagtttctttttctacattttgtgcaagtggggtcaaattgattctagaatacagttttagaaatcaatgaactttttctctagaggtggcaagatcatgtgaaagtcacagttgtattgaattcagaatggtgtagcttccaatgaggtgtggctgtagtacttcttgtctcttccctgaaaatcgggtaggtagctttttctaggtcccaatgagatttagctgcaaaatactatt

SEQ ID NO: 27002 - DNA, 783 bp, Bovine  19866881265674
  misc_feature (1)..(1): n is a, c, g, or t
ntgcaaagagttggacatgactgaagcaacttagcatgcagacacatagcctttgagcttctccacaactttacattaaagatgaatctgaaaagaaatgtgataaaactttctgactttcttcaggcatgggaaagacagtgttatagagcagatctacatccatatagacaggagtctgaaattagtgagagtagcagagaatatagcttgcattcctgtgtatatatttatttacacatgtaaactagagatcttgtgttcaaccagtctgtgaaatcacaaatgaattaaatgtttttctggaaacagagctccagaaattctgattgcaagtagcatgatattttaccaggttcccctccctaaggatttgtggaagttgctgaaaaaattgaacgtattccaaaatgcatcgtgaatggcatttaccagttcaaccagcttcctgcctcctgtcatttgctccacaccactgcaagaatatctcaaatcttctgtaatccagggatctgctttactcaagtgatagttgtaatctaatacatcactttcccacgatttcccattactgcttacaatcctgttatgcactttctaatcttctactttctgacttatacttcattgatgggaattttctcaccactcccaggaatctataagcatgccctcaactacgaccatgaaattctttcctgtgacagcagagtacatgtcctttcattcaaagactggttgctctgtatacgttcaagatctcatttctttccccataaataa

SEQ ID NO: 27003 - DNA, 1033 bp, Bovine  19866881312908
  misc_feature (1)..(1): n is a, c, g, or t
nccaggggattttcccaacccaagaatcaaacccaggtctcctaccttgcagacagtttctttaccatctgagccaccagggaagcctaaatataaatttgaaataaatactttattcactttgaattatctttatgtgttaccattaatttttccttgttgtgtagaatcagaactacgtaaaacaaaatatgttacagagtacttctaaaccccacgtttcttttaaatattcaacaatcctgttattgttttgcagaaaatttacaaatttatgaaagcatttatatctgctgacagcctttttcacccttcatgccttcaaataattgactttgacagctttgcaaatgcctgcctttcaaaaacaaacccaacagtgtctatctgatggagataatcataaaaaaaatccagatacacaatggaaatacaatgttgggagcaatatatcaactaaataattttatgctcatgaattaagattgcaatagatttttcagaggctcccttagttcccccaaataaaagacttatcattttttttttcactataaaggctatagtgagtctcctcaactgaaatcaataagtaattgtgacagaatgtcacagaccattaaggatctcattctaaaattcttctctaggccctttcttctccacattccctgactacccaatgggcaggaaggtgtcctatttattccaaatttttgtggccctctttagtgtttgaatgtattcggggattattagtgttaatggggggaaatagtgttcaaaaaaaaggtcaatatttgtattagcaaacaaacactctttactgtatttatgaaatctatggtgatcatgcaataaatgctgaaatcttcaggagatttttaggcttgggagtattgcatttacaactatgataggtatagttggctttttcagcaaatgaaaataggatactgtgtttaaaaaaccaaatgtggaagtgcagtggaaacaattaaaaaggtcagatttgtcaattgcactttcatta

SEQ ID NO: 27004 - DNA, 1253 bp, Bovine  19866881358746
  misc_feature (1)..(1): n is a, c, g, or t
ntggtcatttacattttcaaaattccaacatagagatagcttacaagatttcagtgatactatttgtcatgaatatttttatcataaagcaatagttttatcgtaaatcattttttttgtttttatcctaaattagatgcttatttagaaagtgttttgctgtcacttcataatttaatattgcctgttattgtttaaaacttaatcatgttaaaattattcactgccatattcttaaatatattggaacctaccaaaaagtccctggatattctgacagactattagaataaacacagacttgaggcagtatttatttatcacagtgctctgctgaaaccagcttgaccaactcactgcgagaagctttgcacatctcttcccagcttcactttgaatgccatcatgttgatagcttgaattggccatggtgagagtatttaaacatgaaaatagacaaatgctgtaaatcaaacctttttgttcatttagttgcgttattgactttcagaaagctagtttaccaggatattgccaaatatataactgaaagtatattatttaaaatattctaattatattcatacaacagcaaaaattgggagggctagctaaatgaaaaagaagactatatgaatcaaaacataaccattaggaacaaacactggatctgtatgaattttaaatgactgtaatcctatcatgcctaatactattctcttggtattacagtctaggtaagatacaaagattgaggcccatttgtaagtatgggcatgatatgtttactttcagatagcatacttcagaaagaaatgaatatgctgtttttcttttagaataaaatttgcaacttagtaactgtgcctaatatagtttgacaaagatacttggataatttaaagataaaatttcataaccttctttgtcttaacaacatgaaaatcaccaaatgctacaaatcaggatgattttaagtacagtttcaatgaagtactctgtgatgaagtgactctgtctgtatttggtagcttatgtggctatttttaaattcatgcacctaaattaaaaatagatgtaatgcaaactcattcaagaaagaaaactgaaatgaacctaaaattacatttgtgattttataaactcagacactgccatttaagtcctcatctttttttggaactgagaattttgcaggttgtttcatttgtttaagtgggaactcattaaaagctatgtgcatatgacttggg

SEQ ID NO: 27005 - DNA, 915 bp, Bovine  19866881447410
  misc_feature (1)..(1): n is a, c, g, or t
ntctgaaggcaaataatataatcaagttttcactaaacttgagaaaaaaaaattgtcatgcaattaatattgttccttttgagatgacatttgcctgtcaatggctttcaaaagagtattgcatagttcagaaaactttatttaaaaaaaaaaaagaaagagagagatggaaattcatttcattttgcatgcatttgaggaacatcaaaattcagaacagcacaaattacaccctgctccatctactgtaaagtgtagtagttgagtacaaagtgtcaagtttgtatagttatctatttaattgttttaaatgctacagagagaatttgcctttttactggttggaataataaagccaaactgaaagctaagaaatgttgtaacaggtcctacagaggctgactgtcttccttcctaccctcacatagtaagtcctcagttaaaaaagaatgtgtgaacttcctatagtaatagagtattgaaacagacatctttttcctacatccatcctgaattatcccactagtaattatagagacgagagcaaaaaaggaagatattggtgtgtcccactttatcccctctcccaacccccacttcccccttggtaaccagaagtttggtttctacaaaagaacctactgaatagcacaggaactctgctcaatactctgtatgatctatatgggaagggaatcgttaaagaagtggatacatgtatatgtatagctgattcactttgctgtacagcaaaaactaaaacaaaattataaattaactatattccaataaaaattaatctttaaaaatctctttaagttattgtagatacacagaaaataaatgcaaacagcagagggctggtacagtatgagactgagaggaagaggaggcaggagagtagaagcccatgcc

SEQ ID NO: 27006 - DNA, 1285 bp, Bovine  19866880508091
  misc_feature (1)..(1): n is a, c, g, or t
ntaaaattttctacatgaataattaatatgttttcaagatggtgataatgttttatgctttttaaatagtaatacaacagtattttaaaacacacttgtacaaatctaaattgcaaattaaaaaatcagaatttcctgtaaatttaataaaagttggggcttcccaggtggcactagtggtaaagaatcagcctggcaatgcaggagatgcaagagatgatggttcaattactgggtggggaagattccctggagtaggatatggcaccccactccagtatttttgcctggaaaattccatgggtagaggagcttggcgggctaaagtccatggaactacaaaacttggactggactgagagcatgacatgacaatttttctggaataattgtttcagaaagtcttacataagatattaaaatagtttttactagaataagcatcatactctttgtcacttatgtggttatcatttacagtttcaggaaactacttacactgttgaaattgtcttgctcctttacaagcttccagtgggtattaaataaacctacatatgcaaatgtcttagagcaatgactgacccataaagaccattcagtacaattaaccattattaaaataactctagttacttgtaatttaaaatgtactgaggcctgactataacaaagccaattttgccttcattttttttccaccatcctgcctatacttctttcccaacattctcaaactggcattatactcagagattattttgaactctgtgatattcatagtttcacttctaaaactgtcagttattttttttcctcctctgagttaacagttaatgaagattcccagcagagtgttaaggtagcaattacagaggaatttttgagctgcagcactgagctgaaaagcaaattctatcttaatcaaagccccatcaaacgagtgaaagcaaaagaaaattcagtagctacactggccagttatctgaaataaaaataatgctgctcttatagcccttacaatacctattttcaggtagccatgtttagggaaaaaaaatatccattcttatgttcacacatcagttctgtccttgaaatacaattttaataaaaagagataaatgagattattctttttgctttcttttttctaatcactaaattaaatatggtcattgtataaagtttggaaatcatgggaagggtgccacgaaacagtaaaaaggggttgtaaatgacatgctacttaatgatatactaacttcagctaaaataaagtcat

SEQ ID NO: 27007 - DNA, 1035 bp, Bovine  19866880560584
  misc_feature (1)..(1): n is a, c, g, or t
naatttatcttgcacgcttttctctagtgagtatgtttcataatgcgaggtctgctataatggaaaagaagaaagagaaattagtagtttaaatattaaaaaaaattaatattttaaatgataaaatactaatatctaaacgttatatctttatagtcaattgcaaatgcagttagataaaagcatttaattgtccccagtaataaactagtaagacagaatatattaatagtatgtaataaaaatcagactagttgttattatgcacccatattataccatatataactttgcaacagtaaatactaatttgatctatatgagttactaaattatatcttaaaatatgatataaatctcaagtgtttatatttttctagtacaatacatttttgtagtagatttaacacagtactaaatttgaagtggttaaaaaaaatgtaagatattacacaattatagtattgcaagaatagtggagtgggtagccattcccttctcctggggatcttcccagcccagggatcaaaggcaggtcttgcacattgcaagcagattctttacagtctgagccaccagggaagcccaatacatgcagagttaccacactgtcacttacagttttagcaatctctccagccactgaaaatatacaagaactagatggaatactgatttctctaaactgttttcctgaggcactaatcatcagaaacaacagacaagccaccaaggaccattatgcaaaaatagaatcaatgttgattgcttttattgtggtttgcacatgcttatttcattatttcttcatttcctttgatttgctgccaattttctatcgtattttacaaaaacactaataaaattattaatgaaacatatttgttttgagttaactggaaaatctagtggaaaaaagcagagtaagaggaaattgatcacattttatactcaatatagtgactttcttatctacttaggaagggaagggacacacttcaattggtattttgaagagcacaggaatacaatgca

SEQ ID NO: 27008 - DNA, 1062 bp, Bovine  19866880562067
  misc_feature (1)..(1): n is a, c, g, or t
ntgagctttttttttataaaagagaggatttcatctatgatcaagtcatgtgatcagcaaaatattatcccatgaattataatccttaaatgacatgacaggaaccatctagtgaattattgtgttaacaagattaagatgacattccctttaatatataataaaccccatagaagagatgcaaaaacaaacaaacaattttcttctaactcttcttaatttttaaaatatgttatcatgattttccagaaatttattcaagcacatacataaatatattgctttctgtcctgtaaaatcaattactcgcagcttttaagaaacactcttttcctgaagtgagcagtttactccattagcttgctgtgggcattagatatcatagcaattacagaaagatgattcaatgaatattaattggtaagaaaaatcaatgaggcttggcattgcctcttcatgtaaagactatggtgtcccttacagcattattatgaccattatttgataatccttgctgtgaattctgattgatttctaaaatctagaacatagcatcatttacttggattctgtactgcttggcataaaaggaatgagtctactgttgtgttccctagagcctccttcagattttatattataagagcagactgtgtcatctatacagtaagaaaaagaagagatttcattacagatctattgggtgccagttcttagctttattttggaaatgttttccgggaagcataatcactatgaatgttctgaataaagaattgcaggaggtcaatcacacacacttggaggaggggatgggaagataaggtctggaaagtaaagctaaaggatcaaagaaaagttactcatcaatgttttggaagtaagagaccccagaagcactacaaaggagagccagtgggggctgtgcctctgcaccccttggtgggcctgggtcccttgttggtcataagggccctgggggaaaggggctggacaactgataggaggaagttatgacaagctggaatccaccaagacctctgcatctggctctcatctcat

SEQ ID NO: 27009 - DNA, 1390 bp, Bovine  19866880723904
  misc_feature (1)..(1): n is a, c, g, or t
ntttgtgtgtatacttttgtgtgtaagtgtataataaaatattcaatacttaagactggaaagtaatgaatagatttttaagtcaattccttgtttttttttgtctcaagttgaagcaattgaatgagaagataaattaacttttaattgttggcaggatatccccacattggcatttgtttttcatttataaaattccttaatacaataaattattgaaaataaaattttctatttctatatttgagtgtctacatacgaatatagtataatattgcattcaattaagaaaccacaaagttttataaaatattctaactaatatagagaaaatcaatggggttgtattgtccaatgtaatctctggtagcaagtgaatcagtagatacaggaaatacatttctcacatgaatatctgacattaaagaaccaatgtttgaaaatgagggaggaatggatctgagtaattcatgcaaaaataggacaattatcttatgtattagtgatgcagcttgcaattttagcaacctttatttctctcacagttgaagagaactggaaagatgccatttctacatttgaaagcctttattttcctttatgttgcctggcagcctatggtagatcagtaaggtctgtgcctgtccggatgcacagaaagtaattggcatgtccatttcgtttgtttctctctggccttcaactgctacactcatccattttctggctgtccttttaatatttgacaccaataccagaaagtggtcatttgctctttggtaaataggataatggcataaaaatcttgaaaaaaagacatcaaaataggcatatcaatatcaaaacagctctaatccccagacaatattcattctctcctagatgaacagctgctagattaacagaactatttttaaaagtcagttttcacaatgtaaaacatcagtaaacattgaccaaggtaattctctcaaaattcactattaattctatataaacatatgtcatggttgtggacacattcatttggaaaaaggggaaggcaaatggcagtaagttgaaaagatcaagttggctttttctacaaagcatggattcaagtgtactccataaaaattggattggtgtcaggatcagaacaggaggctaactgactgggtccacgtgtatgctggaactggtccttactggctcatgaaagcaaattttagggaatttcacaagtcagttgttgaatatatccatccttaaaaagtgaatttttgcaaattagaataaaataaatatatttaaatcaaaagtactaagcatgtgagctttttgtctcaacattcaataagtttaattttatagtttaaaattattatccattagttcagttcatttcaat

SEQ ID NO: 27010 - DNA, 2227 bp, Bovine  19866880821512
  misc_feature (1)..(1): n is a, c, g, or t
nattcatgttgatatatggcaaaacccaaatccaatattgtaaatttaaaaaattaaaaaaaaataagaaatgtatttacacagtggaaatgatcaggtgttgagacactaagaatctaccatcatttcttcccaccagcttaggagcatatgtatggtgagaagtttgctccaaccaggctcctatgagacatcactggtggtccagtggttaagaccacccgtggttcatacttccaagtgcagggggcttgggtttgatccctggactgggaactaagattccacatgccacccaagtggtcaaaacaaacaaacaaaaacaggctcccgtgggaaaagctttgggtgcatgctcaagttgacaaaagaactgcctccaccatcaaacccaggtggggaatgctgagaggtatgggaacactgaaaaaggctccaatgacacagatgctgttcagcaccactggaccagctgtcatcctcagcagggacctagtggtcagcccatttcttggggctcctgctacttctaggagagtgaacatgaacagcctggtagaacagcagagttgggaggctgctagaaaaggtggttaggtcacgttggagctccaggagctcaggtgagccagcttggatggccatctggctggagattgcaagtgacccacatagaggccttttcttgaagcagctcttgggtgtctgtgacactggcacctctcatccctcctccttaggatgtgagaaatgagttcactcttggtgggcaatttctaggcaagggagacagtaagaaaggcccttatgcatgttcctaccaggttctagccctggtaccacatacccagagaagaaagacccctatggggctgagtagaaagggcccacagaggcctccaactttttccaaggacaaatgacccaaatactcaggtgaaaatgaaggatcattgaaaggaaaggatttaaggctagagtttgatttaatcttctgcccttcctcactctaaaattcacttgcagccaccccaagcaggcgcaaggtcacccagaaaaatgtcgactgattcagcagcccaagcaccacctgaaactagggacactccctgtgtggtcagtgattgtaggtacagggagtggtgcattgtgtaacctgcattgtatagcctgcattgtatgaccaccatggaacttcacatcaaactctgttagaatcacagtgtgtgtttttttttggagttctttagagaatttaaaataacgtacatcaggaacacgaagcttctttcagtaagccattccagaggatgtcgggactgtcacagctgataaaattgctagaaaatggactgcaatttgtagtcttttatctaactgttttgacaatctagagacatatttattgtcaatcatttatccttccttcaaattctcctcagttgcaaataggataatttttattcagtgagcttccaggagcagctaattcccatattaaaaattaatattggtgactgtgtctgaatgaagcagctaacttttcccaaaattcttgattttaacaggtcgtatgttcatagctttctacataatccctaaaaatagctgaagcagctcagcaaaagtagaattctttagcactcaatttgatccaattatcttttgatatgagcctatgagagaagtttcagagaaggcaatggcaccctactccagtctcttgcctggaaagtctcatggacggggaaagcctggtaggctgcagtccatggggtcgcgaagagtcggacaatgactgagcgatttcactttcacttttcacttttatgcattggagaaggaaatggcaacccacctccaagtgttcttccctggagaatcccagggacgggggagcctggtggcctgccatctatggggtcacacagagtcggacatgactgaagcgacttagcagcagcagcaactcttctttagcattaatattaatatgttaatattaatattaatattaaatatacccttcttcccaggtggctctaaggtaaagaatccccatgcaggagatgcaggttcaatccctgggttcggaagatccctggagaaggaaatagctacccactccagtattcttgcctggagaatcccatgggcagaggagtctagtggctacagtccagggagtttgcaaagagtgaacagactgagcatgcacatgtgtgct

SEQ ID NO: 27011 - DNA, 3385 bp, Bovine  19866880862670
  misc_feature (1)..(1): n is a, c, g, or t
ntttctttgactcaacatttgtcttctttaaccttaaagttattaaaaagcatattgtctaacttcaaatatttggggatttgacgtctatctttctgtttgatttgtactgtaatccctctggctctgaaagcgtactttatgtttttctgttctcttaaatttgttaagacatattttatgtcctcccagagtgtggtcagtcttgatgaatgctctatgtgagcttgtgaaggatgtgtaccttgctgttgttggctgaagtagcccataaatatcaattggttcaaattaactgacagtgtttttcaggtaaaatatattctgattttctgcttgatggtcagtcagttgctgaaggaacagtgtttgaagtcttcagctacagtaatgaatttgtctatttctccctttcatcttatcagtttttgcctctctttttttggacacactcttgttaggtatacacatttaagagaaattaaaattgacttctttatcattatataatgcccatttatccatgataactttccttcttctgaagtatgctttatttggaatcaatacagtactttagttttcttttgattattgttagcacaatgtccattgctccatcctttttaaccaattggagattttaattttaaagttgacttccatcagacaacataaattgagtcttgcttttatacccattctgacaatctttgaatttaaattggtgctctgaccatccacgttgagagttattcttaatacagttggattaatatctaacatgtttgtaactttgttctattcattgaatttattgtttttcccctttttctgccttatctgctactaaatgaacatccaatatgattcccttttacttcacatcttagcacataaattagttttttttaatgttgcatttgccttagattttccaatatacattttctttaactgccctgtctgatagtctttatatatatataaagcagcaacaaccacaaagaattatatataatttttttttatgtatttacttctggctgtgatggttctttgtggttgttgctgcttgggcttttctctggtttcggtgatcgggggctactcatggggcttctctttatggtggctcctcctgtttctgagcacaggctccaggtcatgggggcttcagtagttacagcacatgggctcagtagttgtggctcctgggctttagagcataggctcaactgttgtgatgcttgggcttagtttgccccatggcatgtatggccttcctggataaaggattaccatgtttcccatcttggcaggtggacttttttttttactactgaaccatcaaggaagcctcccaatatgcatggaatgatactcgaccactttcacttgtagcaacagaatatttccaatccctgtttcttctccctgtgacattgctgtcattcactatctatccataggctatactcacacagaacattgttgctattattacttgaaatacagttatcttttatattaaataagaataagaaaaataaaatatttttaatctttttttctctgacatgttcttttcctttaagtagattcaagtttgtggtgtatctcatctttcttctgctaagccccccaatatacatttttaattaatctaattgtcattaaaatactagaccacttcacttgtagcaacagaatatttccaatccctgtttcttctccctgtgacattgctgtcattcattatttatccataggctatactcacatggaacattgttactattattacttgaaacacagttatcttttatattaaataagaataagaaaaataaaatattttttaatcttttaaaaaaattttttttctctgacatgttcttttcctttaagtagattcaagtttgtggtgtatatcatcttccttctggttaagaaatcttttaacttttttttgcatacaggtatgctaataatggggtttccctcagttggtaaagaatccgcctgcaatgtaggagaccccggttcgatccctgggtcagaaagatccactggagaagggataggctacccactccagtattcttgggcttcccttgaggctcagctggtaaagaatccacttgcaatgtgggagacctgggtttgattcctggattgggaagataccctggagaagggaaaggctggccactccggtattctggcctggagaattccatggtttgtatagtccatggggttgcaaagagtcggacatgactgagcgactcacactatgctaatgatgaattccttcagtttttgtttgtcttaggaagtttttatatttctctttcactttagagagtaatctttctggatacagaattcttggctggttctttttatttttctttcaacactgaagatcctaccttctttcttgcataatttctgacaaaaagtccattgtatctttgttcctttataagtaaggtttattttccattctctagattcttttaagatttttttttctgtctttctctctttatgttggaggatgctagctgctgctaagttgcttcagtcgtgtccgactctgtgtgaccccatagacggaagcccaccaggcttcagcatccctgggattctccaggcaagaacactggagtgggttgccatttccttctccaatgcatgaaagtgaaaagtaaaagtgaagtcactcagtcttttccgacccctagtgacccccatggactgcagcctccgtccatgggattttctaggcaagagtactggggtgggttgccattgccttctccatttggaggatgagggtttcttaatattatgtgtgtggaagtagtgttttggtacttatttttgttctgactttcatggatgtgtggtttggtgtctatcataaagtttgggagcttctcagccattattacttcaaatattccttcttattatggtatgccagttatgtgtatcttatatcttttgacattattccacaggttttggatgttctgggtttaggtttttttcccttctttttgaatttcattttgggaagtttatattgatctgtcttcaagctcactgatgctttcctcagatttatctagtttattgatgaacttatcataggcattcttaatgtctattatagggttgggtatttctagcatttcctttgaattcttcctcagagtttgtagctctttgcttactttacccaagtgttcttgcacattatctaactttttaaattagagctcataatgttttgccaagagttttaaaacatttcctgtgataattttaacatctgtgttacatttgagtctagttctgaagcttactttat

SEQ ID NO: 27012 - DNA, 1026 bp, Bovine  19866881299213
  misc_feature (1)..(1): n is a, c, g, or t
ncgactgaagcgacttagcagcagcagcagtttccccttcatatctcagtgctgaattttagtaagtatttagatattctatactaattattaataactctctcttctgtcaaattgtgtttaagtacaggaatatttctaccagaattttgcacagtccttagaatgcaattcactaaaacttctagaataactttggatatctcttcatctcctggctccgaaagaatatccatggaagttatataaactgtataaagtactccttttcaaaagacattttaattttttgggggtctccttaagttccatcattacaaataaaaatatacaataggccatggcgaataaggaatacaagtgtcagaccattcctttagaagtttatatctcaagctttggctatcttgtgatagatacttttagtttatttatactatcctagcactggagttttcattaggctgaaatgtgggcagaacttgtttgccgcttcctagaaagatgtgaggaggaagaatcctattgattttatttctagctcttggcttcgagctaaaagagcaaaaaaggcctcccaagagccttagctactgtgagggagtggttttataaataattgagttacctaccctggaagaaaattctttctttccttatattttggtgatttttcactgaaattttcttttgacattctgtttattctaaataaggattctgaaaaagtgagttaactataccagttaatccacaacaagcagaaatattaatttatacctcatgttatatcgggacaaatgtctaatgaatacattcttattttttaacctggttatatgatggaatattatgcaatttctagtggaaaatagaatatgctatccctttggcatgggaactatttaaaggtaaaagcatttaaaatgaagcaaacacagtaattttcctacatgctaacacacaaattgcaaactttcaaagatggaaacattataaacctattacagcacagtgctacatagc

SEQ ID NO: 27013 - DNA, 1532 bp, Bovine  19866881311802
  misc_feature (1)..(1): n is a, c, g, or t
nataaaaaatatttgtgactgcttttgtgtcctaaattgatttttgtcttaactattatgtggaaaaatttcataaaaacatcagttacatccctaagcagagtaaacaaaataagattattgttaaactataccttaagctacatctgttcaacattatggcctctcaaagcaagtatttatatgatttcaaaattatatttcaaaataggcattaaaataaaaactcataaagagcataaagcagaggggaagggatttgaagggtgggcgaacagggtcaacagtatagtgatggatggcgactagacttgtgggggtgatcactctgtaatatatatacagatgctgaattataatgctgtactcctgaaattcataatataaaagcaaatagaaaataatgtgattacaaaacatctttcttttgctagtaaacttcaaaatgataattaacactatttgaatgtagcttgttatatattctgtttataactgtagtcaaataacttaaatttcacttaaatacttaaattttgcttacaaaacccagtgatataaattataacttggtctgagtatatttacacttctagctttaaaaataaaattactgctctgccaacacatttaataaaacacttttgtgagaattgcaatttgaaatcacatttgaaaaagttacaattactagtggaagcaaattttcaaaggaatttatgcatcttgagaacaaatattttaactttttttttttttttaagcagaacaaatatttgggccttttcaagtgaaaataattatttgctggtttttcctttaagatgattctgtcagtttgccagatgtctgttctgtattccaaatatgtaataatgatccttaaatctgcataacttacaacagttttgctccactccatgtaactcatctcagtctgtaagtagctttagttttgtacaaatatttgcaattcctgtttggaataactgttcatgttcaccatctcacactctactaagagacttgggcatcatgttactcgataaacacacgaaccaaatggcatggacaattttctttcttaaaccccttgtaaagactgagacccatcaaaccacaaacccatactttggccaaatgttttccattaaacccaactggtagtatagcacaaacagcatttctacactatgttctttgtcatctatcctgccttctttattctcccatgcatattagtccaactaatcaagatcttctatagaaaaaaaaagagtaaaatttatatattgtgagcacccattaagatctccccatttggatataggatttatttttttaaggcatattttcattccaatcccaaagaaggacaatgccaaagaatgttcaaactaccagacaattgcattcatgtctcatgctagcaagttaatgctcaaaatcctttaagctacacttcagcagtatatgaacctagaaagtccagatgtacaagctgtatttagaaaaggcagaggaaccagaga

SEQ ID NO: 27014 - DNA, 3998 bp, Bovine  19866881463690
  misc_feature (1)..(1): n is a, c, g, or t
nttggagaaggaaacggcaacccactccagtgttcttgccttgagaatcccagggatgggggagcctggtgggctgtcgtctatggggtcgcacagagttggacacgactgaagcgacttagcagcagcagcatagatgggccactgagactgtatggttgtctgtctgtccttgaatcctttagacacacattatcccatctagacaatgaacacggttccatgtaggtcactactgtgttttatttcttttccagtctcataaacccacaagatctctctggactccttgtcagttcaaggagatcattctactgcttccttgccccacactgggcttccagcctgtgtggcatcatctagtctctacttgtgtcgtgctgttccaggtgctggggaaccgtttcacttttgcaggtcctactgaggcttgaggaattctatgaggctatctcaccctcttgaccctgattaacaccaccactcccccactccgccacctcacccaggcatttctgctctgggattttattgcttcccaagattctattcctggtgactcagagggtagagaatccacctgcaatgcagaagatcccaggtttggggcagggaatagcaagccactccagtattcttgcctggaaaatcccatgggcagaggagcctggtgggctacagtccatggagttgcaaagaatcagacacaactgagtgactttcacttttcaaggttctactcaagaaagggggcaaatagaggatggcagtttgtgctttcaaataccatactcctttctgcttagctcacttccatgctaggatcagaagatgaggtgggcaagtgacctttctcagggactcacaccgtctactcacctttcacttttcttctatcagtcctccactccagtccagggaacacttattgcatctgtggagcccagaatctttctcttacacagtttgttttcagtttgctttcatagtttgttccttccaagttttagtcatacatgatagtctttgacttgttcctggaaactgaatttataaattgaaagcaaggaaaatgtttgcatttcccatttgctatgtcatcattttctagagataaaaacatcctaaacagggagggacagacagggataagtggaattttaaacaaaaaaatcattaccacacaaaacatattggtcaatatttttgaaattttatagtagcccagaagacatgatgtgtttgaacttgcctgctgctctgaaagtggactagtatgggaggaaaagtgatgtcagtgaactgggacttagtgtgaaatgcaaggataaattgtgttttcttgcataggctacactcctgaaatggacttcccaggtggctcagtggtaaagaatccacttgccaatataggcgatgcaggttggatccctgggtctggaagatcccctggagaaggaaatggcaactcacttcagtgtttttggctgggaaatctcatggacagaggagactagtggggtacagtctatggggtcaaaaaagagttgaacacaacttaatgactgaacaacatacacattcctgaaatacttattggtattcactttctttctcttaattctgacatttctttttagtcattggactagaactgcttagaatattaaaatgaggcattactaattcttgagctttttggccagatgtcaatttcaaaggaaagagtaaatttttaaatacagatatatttaatgaaaatgattcttttgctcaaaagtaatttttagaattcattcatttatttatttattgctactctgagtcttaattgctgcacatgagcgttctctggttgtggcaagcagggcctactctctagtggccgtgtccaggcttcttattgtggtggcttctcttgttgcggagcacaggatttagggtgtgcaagctaagtagttgtggcatgtgggcttagttgctctgaggcaagtgggatcttcctgaaccgggaccaaatctgtgtcttctgcattggcagggagattctttaccaccgagctaatgggaagtcctgctcaaaagtatttatcaatcattaacaatatgcttcagttcagttcagttgctcagtcgtgttggactctttgcgaccctatgaatcgcagcatgctaggcctccctgtccatcaccaactcccggagttcactcaaactcatgtccagtgagtcagtgatgccatccagccatctcatcctctgtcgtccccttctcctcctgcccccaatccctcccagcagcagagtcttttccaatgagtcaactttttgcatgaggtggccaaagtaatggcgtttcagctttagcatcattccttccaaagaaatcccagggctgatctccttcagaatggactggttggatctccttgcagtccaagggactctcaagagtcttctccaacacgatggttcaaaagcatcaattcttaggaagtgtaaaacttctttggatgtttgaaactgcctaggaattgccttgataaagtatgttgcctgttgttgatttttaatttgttgtggacttaagaaggaatttgtgattcataaattttaaagaacaaacttagttaattctcatagacctgtgatttcactgtgactttgttgaaacaggttggacctctagctcctataaattggatctaaatgttctttcttattgctgagctcagaatcacatgcatttttagaatctagataataagtactcagttctgcctcctgcaaataataattcacaatagatactcactggtgttgatttatttatgatggtgactgctgcacaaatctcatgtacactaaatgttgaacaagcattatcattattttgacaaatatcctcaggtctttggcactagttttgacaaatggtcacgaggaagctgattcagatgaatgacaggcagttgtagtgcagttctaccagttgattcttcatcatggaatgatttaaaaaaagcgaaggaaagtgctcatctgacttgacagcagagggtccgtctgcactgtggatggtgggtgattgttattgggctggaaatactcggtaaagactatcttcaccagagcaaatcaaagaattatctttgtcaactccctacatcgtaaaaccttggactatatgattgtgtttaaaagtgtatttatataaaaataaaaataaactttatatggacttgtcatataaaatggattagccaagtcattagggttcatctagataaggtgtacatgtgtgggcctgaattcattatatagaaaagggttagtaaattatgagtgatgttttaaatagtgaaaccaaataaaaagaaaataaaatatacagaaacatcctcatgtaagtaaaccttatgtattatttaggttttcaaagaacatatatttgtaaaatttttctccattttatttttttaactgctaaaatgtcgataccatgaaagaaagaagaatgaactgagtcacaaaatctgcattggagtcctgcctcgatagctttacccaattcatttaacacaatgttattattcttccaaagtggtttattaaatattttatcttaattagcttacctccactgaaatgtttatttcacagataaaagctggcttaaaactcaacattcaaaaaactaatatcatagcatctgctcccatcaccttatggcaaatgaaggggaaacagtgaaaacagtgacaaattttattttcttgggctgcaaaatcactatggacagctactgcaggcatgaaattaaaagatgtttgccccttggaagaaaaagctatgacaaacctagacagtgtattaaaaaacagacacattactttgctgacaaaggtccatatagtcaaaactatgatttttccagtagtcatgtatgcgtgtgagagctggataatataaaaggctgagcactaaagaattgatgc

SEQ ID NO: 27015 - DNA, 2098 bp, Bovine  19866881521523
  misc_feature (1)..(1): n is a, c, g, or t
nctggatggcatcactgactcgatggacctgagtctcagtgaactccaggagttggtgatggacagggaggcctagagtgctgcaattcatggggtcacaaagagtcggacatgactgagcgactgatctgatataatggcttggtcttctcaggtggtgctagtggtaaagaacccatttgccaatgcaggagacataagagaagtgggttccatctctgagttgggaagatcccctggaggaaggcatggcaacccactccagtattcttgtccagagaatcccatggacattggagcatggcatcatgtccagagagctggacacaactgaagtaacttagcatgcatgtatgcatgcatacaatggcttggaaacatttaacagcttcagctggtttctttaatcaattactagcctatatggaaaaaaaggggagttgctgttttctaggtttatactgttcatattctagtccattttgctcatttaaggcattaattgcctccctgatacatcagattgactcaatatggcaaagctaatttatgttaacagacaataaaacaggatttcccagatgtcacagtggtaaagagtctgcctgccaatgcaggtgacccaagagatgtgagttagatccctgggtgggaaagataccctggagtaggaaatggcaacccactccagtattcttggctggaaaattccatggacaaagaaacttggtagactaaagtccatgaggtcacaaagagtaggacatgaccgagtgtacacatacacaataaaaacatagaaacacacagcattctagccactgcttttttcactgtacaatattaatattaaaactcactattttaagatcataatgccctgattttgagtaatattttgaaggagaaaggaaaaattgacgatatttctttattaaagttaaagataaaaataagctaaaacattatcagatcatatatgctatgaaaaatttaaagtaaccaaatattatactggaagatcataaagcatctgaaacatacgtataaatgagttccaactctgcccgtctttttaatgacaaaaagcgaagttgcctggagagtatttgggtaaatttatttgcagaaactactgtgaatttacattttgatatgcattctaaagtgaatctgttcaaggtggtgtttagtttacatcttgaaaatttttttaaatgtaccaatttaagttgatgtattattcattcaaaagattgcattgactcagaaatgtgaccagctgaaagaaagtaaatctagctttaatcatatattgaggcaaggacaaaagtgaacatatcttaattgtcttggcccacaaaaaagctgaggctcattttgattattttctggagataattacaacacccaaaatggactctatttgaaactttataagccaatcatactggtattgcatatatatatatatatatatatatatatatatatatatacatatatatacacacacacatacacacacacactacctaggaaaaagaaatcagcaattttctgctaaataatgattaacagaaaaccaaaaatgtaatgtgcttctgggaaaaacaaccttactaacaaatgacatacagagccaaagtgtctattaaagcaagcatctatagaataaatctcttttaattttcagcagttatttataatattatcttgatagatgaacagccaatttgctgtttattcactgaagccaatctgactcttttgcaatcccttggactgtagtcctccaggctcttctgtccatggaattctccaatcaagaatacttgagtgaatggcaatttccctttccaggggatcttcccaacccaggtccaacccaaacctcccgcattggcaggatgattctttaccactgagccacctaggaagcccagcaaaccaattaggaaaaaataataatcattataaaatagaaagggttaaaagaatgtctataaatgataaagacttcataactcctggagggaagtacccttcagaagaaataaacataatcatacagaataaattttaccaaaccttccag

SEQ ID NO: 27016 - DNA, 873 bp, Bovine  19866881613733
  misc_feature (1)..(1): n is a, c, g, or t
naactgaaaattcctaattaatatatcttttgctaactctcaaagggtcagcattttaaatagactttccaatttgccatcagcaacattgatgatactaaaaattaaaattcctatgattcttactgaatctattgggctttatattttattttaaaatttaaaatataatgacagattaatcaaaagctcttttaaatcctaaagcaagtaatgttaacactagcaaagtaattgaaataattactttgtgattttaatacataaagaaggctaaaagctttttgcatttttccaggtcatttaatatctttttcaatagcatgcactacatctgtactgttattgtttggttgttgagttgtgtccagctctttgcaaccttgtggactgtagctcaccaggctcctccatacatggtatttcccagacaagaatactggaatagattgccatttcattcttcaggggaacctccctacccagggatcaaacccaaatctcctgtggattctttaccactgagcaaccagggaagtccatctgcactgtagagaagtggtggttatggaaaaatatataaagcaataagcataagtatatttattcctgagctcactgtttagagatatccattaataacataaaaagtagacacacacatgtcatagtaaaggaaggaagcctttgaggaaagtgataacttttgcttggggggacagcaacaactacaaccataactcaaggatgttcaggaaagagttgaagttacagagccactttgttttaaaatttgaaagtttctagagaggaatttggaaatattagacaaaagcagctaggtggaaaagtagcagattgagattaaaagca

SEQ ID NO: 27017 - DNA, 1434 bp, Bovine  19866881858622
  misc_feature (1)..(1): n is a, c, g, or t
ntgctgtctaggttggtcataacttttcttccaataagcaagcatcttttaatttcatggctgcaatcaccatctgcagtgattttggagcaccccccaaaataaagtctatctctgtttccactgtttccccatttatttcccctgaagtgatggaaccagatgccatgatcttagattcatgaatatgaatattgatggataaaaaatttctggcttcaatagctgagtaggtgatgttgcaaattcttgtgattagaaataagtgataaaaagatactcagtttctttaacaacttgtagtctttttatattctctaaaacttgaattaaataaagctctaatctatcaaaaatatttttaaggaaaagattttatactctatcaaaaatttaagaaaaatatttctatgccatgtaatttaaagtatgttatatttttaactttgttagtaagagtcagatatgtcatcatttagatattgactctgtgtgtatacatatgggtctgtatatacaatcaaaagatattatgactcaccctttataactgtcttaaaagtcatctgttttattttgctttgtgttacattttttcattatcaatacattaaatttcttgtgccaggttaagaatctaatgagtgaacaaacaagtatcttgagggaactaaagcactctagtgtaacgggaaaaattgtggaacagtaagggcctgactagtttggaaaatgtacaatattgttggtttcaagcattcaggaaaatgatatagacaacccccctgctgtccttctgcacattggatctaatttgaattcataatgccacctgctcccagtgcttttctatgaattgtaatgacttagaacatttagtagagtttgataaactaaggaaaaacagagggttatatggttaaaattttttggtaatttttattattgaaaataaaaaaataatagtctatagccatgcaatctgaaaaatgcatatatattcacatcaggacctaataatcaaattttatgaatgggaaaatatacatttcagttcttcaatatcaagaatggagaaagacaataaattaatttcttgactctcattattgaaaaatttaaacgtagcactataaaattgttgcttctgaaattaaatgacaaaatatatgtacattacaattgagttatgaaagttagaattaggacaattgggttttcatattttggttttgctttggcattaatgtgttttaactataaaggaatttcaagcaaacagtgctgattagattatcagctgattagtgcatgtaaagtggtgtcttatgattttgttgtcacttagcaatgatacaaaatatctctccatatgtttccaaggaacaatgtgatgacaactctttaataacttaggactgactgcgtcatcca

SEQ ID NO: 27018 - DNA, 760 bp, Bovine  19866882035956
  misc_feature (1)..(1): n is a, c, g, or t
naaactgtataatttgctgcctatcttaatttaagaaatgtgtaattttaatttgagaataattaacaattttttttccctgcagataaaggtaggatccctccttctgaattccaaccataatcagctattgatattccagtgattaccctactgatcacctttacactggctgtccttccatactttatcatactttaaccaatattatcatcaaagattatgcaaaaacaaaggcacacacccctgacctaaaggtgttggaatttaaaggaagacaggttaggaaatataatgaaggaaccaacgttttcaaaggtatgaactgagtgtttgtatgtgttatactctctaatctaaggggcaagaatttactcacaattaaatctcctatgaactattatttaaaaattcatctaaacatacttatatttgcaaaagacagaagagatttgctaatattccctttgccattgattttattttgagagaaatgatgatttaagagctttgatagtatgtataataggcatatatttgtatttgtttagaaataaaaacttggcaactttatgaaattatgttcatgtgagaaagaatactcatagagcagatataactcaaccatatgccgcattccttggaaacttattcagtcagtgtgccaagaaaaatattgaataaaattgatgttttcatgggtttatgaaccagtaaaatggagtgaactacttctactgaacacagcaagaattcttca

SEQ ID NO: 27019 - DNA, 1293 bp, Bovine  19866880497902
  misc_feature (1)..(1): n is a, c, g, or t
naactgattcaaatgtattctttttaatggctgagtaatactccattgtgtatatgtaccaccgctttcttatccattcatctgctgatgggcatctaggttgcttccatgtcctggctattataaacagtgctgcgatgactacactttcatttgaaaatatggaaatagtatatgttaatctgctctgaggcttatttaagtttaatagacaattaatgcagtataaagaattatctggaaaatttgttcttgttcagtcattcagtcgtgtctgactctttgtgaccccatggactgtagcatgccaggcttccctggcatgtaaaaaccatgtagtttctacatagtaaactgttccctagttccctagtttattatgtataaactaaacattactatgtataaatagtgagagccccctgtataacacagggcactctattcaacactttgcatgcatgcatgctgtcacttgagtctgcctctttgtgaccctatgactgtagcccaccaggattctctgtccatggggattctccaggcaagaatactggagtgggttgccgtgccctcctctgggatcctcctgacccagggatcgaacctgggtctcctgcattgcaggtggattccctgccatgatcccactcaagaccctattgacctaaatgggaaggaaatccaaaaaagaggggatatatgtatatgtatagctgattcactttgctgcacagcagaaagtaacccaaccttgtaaagcagttattttttgtggtggttgtttagtcactaagatatgtctgactcttttgtgaccacatggactatagcctgccaggctcctctgtctatgggatttcccaggcaaaaatatgggagtgggttgccattagactcataaagatacacaatttattggtcaacattgatcaagaaacagtattcaagtactaaatttaacaatagcccttatagacatcccagatatgagattttaataggatgagaaacagaataagtgataaaaagctgagcccctgtaattagccagtcactattgtgctttgattttgtcatttttcttataataattgaccagctcttttactgcgttcaatgcccagaacaaccttgtagtcatggtatgttgacatgcacaggtggaagagatacaggctttgcttgagtaagcaagattttctaagtgacatatacgagtaaaacatattggctttagtgtgccagggttttgcaagaacaagcaattaaacattcttagattctgtgcac

SEQ ID NO: 27020 - DNA, 3404 bp, Bovine  19866880562439
  misc_feature (1)..(1): n is a, c, g, or t
natcttgcctctcaaacagacaggtgctggtggcaatttttcctttctaaaaaaaaaactatgtagaaaacaacttatagaaaatagaaataaagaagataaaaatgaaaacaaatgcacatgccattttggaaatagtagttagatataaaatattgatatattacaattttactgactcagagataaatttaagaaaaaaattaatgagacatactttttacaggtgaaccacacatatttatctaacttaggtgcatattatctctactccatagcttgattttcttagggaaggagtagggcatatttaatacttttattaaaagatcatttttaaccagctgcttcacaaatagtcatgaaaaaagccaaataatgacaatgtctgtaaaagaagacagagcacattttattttatattaatcatatgagtaaaaataaaatgaaaatataaattgagaaattaaatatacataactggaagtaatcgtatagtataaatatgggaaagaggaaggattttattacattaatgtattttttgaaaaatgtatgtaaatatgaaatgaaaaacactgtccaaaagtacactctacagtgtacaaagaatgctattcacaatgatttcattaatgagttctgtttctttgtacttacaattgctgggttatcattgtttatttttatatccaaacagtgaaatggaatatggagcattacaaaacttggagatgtgaactgtgccccaagcaaccacaagtgattctgaatgttatgaactaactttcaatgggattcatgtggcaaagctctgttgtgtctaggactctattgttgggagttctccaaattaacatccacatagactacagtttttactaaagtaaaagtaacatgaatgcactaattagaagttcagttatatatttcatcagtattaactgcagcaattttctctaataacaaacgatatttttataagaagaatgtttaatcaatgatgttaataatactgaaagtcacttaatcatgtctgactctgtgaccccatggactgtagctaggctcctctgtccatgaaattctataggcagaatactagaatgagtagccattcccttttccaggggatcttcccaacccagggattaaacccaggtctccttctttgcaggaagattctttaccatctgaaccaccataagattagcaacacaaaatgagtgttttttgttttttttttaagtccaatgttgaattgattttatcactgcttatggatttcccatagattttttttcccccccacagcttggacaaaccgctttacctgacccactgttggtccaccactggaaaggatgcatagtaagtacttcacattgagtgtaacaatatttaagtttcaaaacacttaaatgacattgaaattaaattaattagaagtatctaagctgtgtttggcagacattcatttcaacctgccgtaagaaggaatttattaagatactatgggaaagaaaacttttaagaatcaggagagttccaggtaatttagtctctagaacatgaattatttttgctatgtttctttatatcccatttttacatggtatgggaaaacctgtaggatcatactgttactgaaaaagcatataagctgattgtggtgaaggaaagtacagcatttattttaagggtcaagcaggaaatatgggcagctcaccccgctccagtactcttgcctggaaaatcccattgacagaggagcctggtgggctacagtccatggggtcgcaaagagtcagacaacgactgagtgacttcactttcactttcatgcattggagaaggaaatggcaacgcactccagtgttcttgcctggagaatcccagggacggcggagcctggtgggctgccgtctatggggtcacacagactcggacagactgacgcgatttagcagcagcagcagcagcagtgctccaaagaccaaactccccaatgtgtttcagagaagagtttttaaatgcagggtaaaaggaggggagtctctgggtgtgtgatcagcttatgcacaattctctgattggttgatggtgacatcactggatggagtcacaggttaacattattatgtgccaggcagtctggaaactatgtgtttaggattatcatgcagttaacttctcctatctggttccagttttatttgtaaaacaactgaaaacaatgagacactgctatctatgttctttagtgaggaactagagattccgtgactgctatatggcagatttcctgttgaaattgttactagtcctcctatcccagctgccatgtattttgtttctaacatgtgttaacattctttcagtcattaactcttgagccagcaatttgtttttaagctcaggggaggcctgggaacctagtgtttctacaaacaaaaagcagatggaggacaagaggaggagtctgtcctgggaaggccacataggattctgcttgtttacgttatttagaattgacattctctattgttgctttgctgccattctctattgttgctttgctgccattctctattgtgactgctatctttgaggttacattcctaacttctgaccaagaaatgaatgggaacaattcctaattatctccaattagaaaaacctaggaaaacaatatgatcagtctggctttctttgagtatccatttcataactatgagtagattcaaaaaaggaattgaagatctttgcttgaatatttatttttaaattataacgcattattatttatatgcatatgtgttttccattaaccttgaaactctttagaacagttgcagacaacagttagtgtaggttcacaacagtcaagtagaactctaaggctaataggaatagaatattctgtgataactaatagtgagaagttagggagaagaggaaactggtgagttgctgtattaaacatctgtagctgtattgaacaaatgaaaaatatggagaaggatatttaaagacatgaaatgaccttttgcagtgctcagagacagatatgttgggtgttgtgaatatgggctataaagtgtacaaaatggtgtaagagatgtttcctgtcttagaggcatttggggagataaggaaaatgttcaattatctagcaatataaagtttatctgactgattttaaatgaatgtgtccatcaaaaggtgtattatgttatattatgatgattattatattttgcataaacatttaaaggaagaaaattgatggtatacaagtgtgtccagtcacatagaggcaaagggcttagagtaggaaatctcaatcgacaataactggatctgaatacagaatgagataaggcccattttcatgtacaaaa

SEQ ID NO: 27021 - DNA, 750 bp, Bovine  19866880637948
  misc_feature (1)..(1): n is a, c, g, or t
ncattgacagtgtttagagaagaatgtataagagagtgaaagatctcaaatgggtatcaaatagtgtcagctgtgtgtcaactctgtgtcaaataacatgtcaactgtataataatgtctagtcaagcagattttcattgccagttgatgaaagcatcttgcttgaaaaatgaagctttactgcctgaatatataatgcccataaggaagtaaaaagtcctagagcaaacattgtttttagtatttgaaacaggataatttatttcacaaacataaaaaatgttttttcaactgcatttgtgaacagagaaggactgactcatcatttggattggtcagaaactagatttcagccaacttaaaaatgtagcaagagatggtttggcattctattgacctcttcacatatgacacacagtaacaaagaaatgtcagtgaaggacttcacaaatcaaggaatgttacctgtggtgttagctataacattaagagcattagatagaacattaagaacattgctttgaataatttgagaactctgtaatcagtgtagaagacttttaatgtgtgtttctacacaaaggaatcaaactgttaagtaaattaaaaaacaaatcttactattaaatgttataacaactttattcaaacaacactagttaaatatatgatttaaatattaaaaataatgtaaaaaatttcagatatatgcaaagtgtttaatcatgtgttctgaagcttcaaggaaaa

SEQ ID NO: 27022 - DNA, 2523 bp, Bovine  19866880697688
  misc_feature (1)..(1): n is a, c, g, or t
nttccctttactaacctggtacaatgggccataaccttgagtttgtgaataagattaaaaataaaaggatgcaaaggatattgccattccaggaaagctgacttcacattccttatttttaaaaaagtgcttgcacattttcagagcattagcaaggtgactgaggtattaaattttttgttcgttactgcatgtcaagtctatgctaatggcaacacaagggcagaccataatcaaccatttaaacccagagtaaaggcataataatgcaaaaattacaatctgatcatgtacttgtttttctttgatataatctttgtttcttaagcctcgttagggccttagaaaaggtcaggattaggaggaaattgggtgaatcagtttataacatgggtagagaggctagatatatgcccttaagatagtgcaaatacaaaatgattcctatcaccatgaagtaatcttctccatgattaataatatttttggctgtaaaatcaaatttgtttgttgttattatagcttttcaagttttcttttgattattattattgaaaatgttttccctttattttagcatatttatttgcttacattttaaaattagttttcttttaggcatcatacagtttgatttaattcagttaacaacacctgactcttaattaaattgtctagaatatttgcatttactgtgataattgtttctaatatttagcattaaatctatcattattattttcattttacatcatcttccttttctgcttttttcagtattattaatatcatactagaatgttaactatatattttgttttgtgtttctgtaattatttatagttaataccatatatcttcaagggatattgtgccatttcatgtgtattttaggaacgttacaatattatcgtttcattatatctctcctggtttttgggcaaattttgttattcattttacttctacatgtattataaactaaataatacactgttaatgttttggttttcagttcagttcagtcgttcagtcatgtctgactctatgaccgcatggaccgagcaggccaggcctccctgtccatcaccaactcccagagcttaatcaaactcatgtccatcgagttggtgatgccatccaacaatctcatcctctggtgtccccttctcctcctgcccccaatccctcccagcatcagtgttttccaatgagccaactcttcgcatgaggtagccaaagtactggagtttcagctttagcatcagtccctccaatgaacacccatgactgatctcctttaggatggactggttggatctccttgcagtccaagggactctcaagagtcttctccaacaccacagttcaaaggcatcagttcttggtgctcagctttctttatagtccaagtctcacatccatacgtgactattggaaaaaccatagccttgactagacagaaatttgttaccaaagtaatatctctgctttttaatatggctatttagattggaaataaatttcattccaaggagtaagtgtgttttaatttcatggctgcagtcaccatctgcaatgatttgggagcccccaacaataaaggcagccactatttccagtttccccatcaatttgccatgaagtgatgggaccagatgccatgatcatagttttctgaatgttgagttttaagccaacattttcactctcctctttcactttcatcaagaggctcttcagttcttcttcacttcctgccataaggctggtgtcatctgcatatctgcaattgttgatatttctcccggcaatcttgatcccagcttgtgcttcttacagcccagtatttctcatgatgtactctgcatataagttaaatattcaggttaacaatatgcagccttgatgtactctttttcctatttagaaccagttgtttgttccatgtccggttttaactgtttcttcctgacctgcatacaggtttctcaagagacaggtcaggtgtctggtattcccatctctttcagaattttccacagtttattgtgatccacacagtcaaaggcttttgcatagtcaataaagcagaaatagatgtttttctggagctcttttgctttttctatgatccagtggatgttggcaatttgatctctggttcctctgcattttctgaaactagcttgtactggggtccagcccaggttggatccagggatagcttcaggatgacggcattggcaattgaaagtatagataaaaggggagagacagaggcttgatctgactagtttacttgggaaaccaataaagttcgtaacaccgagcttgttctgaccacagaggccgcaggcgccttctcgagttggtcttagaagcccaggcaggtaagtggtctcagagggcccccacactccaatcagtcatcttgaaggaagaacagagaagaaaagaagagaaaaggaagcaagaacaacatggggagaccgagcctgatgagcaaggcccgtagcttta

SEQ ID NO: 27023 - DNA, 824 bp, Bovine  19866880850458
  misc_feature (1)..(1): n is a, c, g, or t
ncaaaatgaccaagcataagagctctatacgtctgacagactgatgaaaggattcctatttgacattatcttttagaaaataaataaatgaagtgattacaactcttttttttttttttttttttgtaattgacctgtaagttactggcagaaaaatcaataaattccaaatgaaaaaaaataatgcaataaccacactcagctttgacctaaaaacatgtataacaatcaatatgataaagactctgtaaatgtgattttaaaaaagaaaatgtagtgcattcatgtgaaaaagtcattttgccagctaaacattctctgctaatactgaacattcatttcgcttaggttttaaatattcctatgtcctgaaaatgcatacattatattctcagtgttcaaaataataatgtgctagaatgaaagcccatctctgcaggtgattattatacatacattatctatcctgtgtgtttgtaggaaaaatatatttttcagcattagatgttataaaataacatgaatttagtagactgtttctagaaaactggaaaaaatatattgcattattaaatagtacctttaattaatgtaggcatgctataatcttgtgttctgaactatgactagcagaactataacgagcagaagacctactcacaaacttgcttgctaagttgttgaagtcatgtctgattctttgagacgctatggcctgtatcccaccagactcctctgtccatctgattctccaggcaagaatattggagtagattgccatttccttctccaggggaatcttcctcacccagggattgaaccag

SEQ ID NO: 27024 - DNA, 1386 bp, Bovine  19866881331504
  misc_feature (1)..(1): n is a, c, g, or t
ntattttaatacagcttaccctttattgtccttaataattcttttggatatacttatcagctttctcagatttaatttgtttcaagtgaattaataatagtcaaaagtcaaataacaagtaatattatttctaaatgcttaaatatgcaaatttggctagtagaagccctctacattgacttattattctttcactcattccttagcatttttgacagcaggatactctcaactcttcctcattttattcatcccaaggcatggatctgggtagcatcaaaggagccttggcttcctttgctggagaatattagcagaggactgaagataggatgacgacttggtggtgggtaaatgttttgcccctggtgctgctgctgaggcaattctgagggaaagaacttgaaaaagatttcctttctggttatgagttgacattgatcttacaaatttaacttatcatattgctaccctactttttaatagtatgtggtttcattgatcaccaaagtttcctctacattgacatttggcatgtcagatgtcaggctgagttagcaacaaagacagcctagggcacaggacgtaatatgggagccagagaccacaactagaccacggggatataaatgtgatttaaactttctccctacaaacctctgtcaaatactagcccctgcttcctgcccctggcagccaccatcactttcaccttgctttcttttttctcaatagcagataaaagcattttatatgtgttatttgtttccttcactggaatctaagctctatgaagagatgatattcaattttgttcaccattaggttcccgttgcaaagagagttcttggcatattatagttccttactaagtaattgttaaacaaaattttccttataaaatccataggctgaatgacctcaccaaaagaaaatatttaaagtgaaaagaactgaaggtgaagaatgtaattaagtcatgttgtatttcaggacaagggaagaacagtccaaaacggtggctgaaaagtctcagggaaaaaaagatgggggggggtgggtggggagaaggaaacccagatacgacagacaccagacaaaaaaggaatcctaaattggattttatggccattagcaccaaatgtacatagtggtcaagaaaaggaaaaaagttcgcattatgtttggcaccacacagcagtattttaaagctggcaagaacagttatggtgcgatagtgagaatgttgccaaggattggatttacaggagtgaatggaaagtcagaccttaaatggaacccacatttggcattttctcagaaagtttggtataaaggacaggatgggattgtggggactctcaaaaatgtttacacttttcttta

SEQ ID NO: 27025 - DNA, 904 bp, Bovine  19866881586095
  misc_feature (1)..(1): n is a, c, g, or t
nctgctcgtgggagttaaacatgtagtcttggaaggaaaagacaaagtactttcattggttatataaaattcaaacagggattttattattgatattttcaaggccccactggatatcactatgctatagcaataataaagaaatatgaagacctgtggccaaaatacatggaatagctaatactttctttagaaaatctaaagaatgctttatcttctgactctaattgcaacatagccttatacaatcttgttaactagaacagtcatggctctgtcctgcaaaaactttttttcggtgattcaaatcatcacaccctcacaataaagctaaatattatttctgacaaataagttactcaacagaaaacaattcattatttttgaagcattctgatttttgttgtcttcacatgttttcatgggaaagtgaaatagattttatcaatccccactgtgcttaattgctcaatcgtgtccagctctttgggaacctctggactgtagccagacagtctcctctgtccatcagatttttcaggcaagaaaactggagtggatttccatttcttcctccaagagatcttcccgacccagggatcaaacacatgtctcccaaggtttgaacccatgtctcccatgtctcctgcattgcaggcagatttttactcactgagccatcagggaagccccactaattatatgctgtttcaaatggaaatcttactggcatctcttgatggaaacaaaagtgacttgacccaagaaaatagactagcatgtaatactgcatcgctagatgtctcttttcaaaggtgtagtttcccattgcatgttattcacaaagtagtgtagagaaaacaaaaggaactcagaattttttttattgatttcatatatgcag

SEQ ID NO: 27026 - DNA, 2174 bp, Bovine  19866880158516
  misc_feature (1)..(1): n is a, c, g, or t
naccaaactcccctcccatccaggctgccatataatattgagcagagttccttgtgctatgcattaggaccttggtggttatccattttagatatagcaatatgtatatgtccctcccaaactccctgtctcttcccccattcttcccccaactccagcaaccgtaaagtctgcctcaccgactctttatattaatgtaacacactaggctttggagaactctgataacattggttccagggccccaaccataggcctaagaaccatatttaaacaaagtcaattcccaattcataaaaaatgatctcagaggccatactaaagctaccaatgacttgagccaccagtctgtcagagagcaagcccagaagttgagatgaaggaaaagacaatgactgaatttctctgactttgtaaaaatagtcaaatcatggagacatttggaaacattcataacttttttcttatttggaatgcttcaggctattgtgtagaaatggcagagatataatcctcctttgtcttctcaattagtgtttctacttattagataatcatatataagcttaaaaaattacaaccttgtttgtaaagtgaataaatgtgtttctaagatacacaggaagcagacatatgaagaaagaaagtgaatttttaaactatcttgttttcattttagacccagccatggtttacttgcttcggtcctccatagtactgatttatttttttatatttcatccttggagtttgtgattatgtgaggtaaataagacagtgattcactatttattagatcagattaatatggaagttggtgtccataagatccaggtccttaagttttgacctacattttgctcggtatttacttaattttttcacgaaagcaaaattccccttccctccaattcctccaccatgtggatggagtaatcacaagaaattttggggtccacgtgctttcagttcagttcagttcagttcagtcgctcagtcgtgtccaactctttgcgaccccatgaatcacagcacaccaggcctccctgtccatcaccaactcccggagttcacccaaactcatgtccattgagtcggtgatgccatccagccatctcatcctccgtcatccccttctcctcctgcccccaatccctcccagcatcagggtcttttccagtgagtcaactcttcacatgaggtggccaaagtattggagtttcagcctcagcatcagtccttccaatgaacaccttagcagggtataattattgttcaaatgaattggatttttaaaatggcttcagaaaaagaaaagtagaaaacgtgtctctcaacatcacaatccctatctaggatgcattttcacatctctaacatgaagagtttagactagatgaggactattcatctttccttccagttctaaaggtctatgcttccattgttcccaacagaccttgtgaacctgccagaacaaaacccagcaagctccaactgcagcctctgagagaaacaaagaggctcctcttcatttcttgggctcagaaactatttctcctcagaatctcatttcagtggctgcaaaattgagacctgccactttcattccaaccaggatcacatgaattaaagtcagagagaatccaggcattcttactcaggatacacacgtgaaaatatagttaaaaactaaagcttgaaaatatactgatagaaaaaaaaagttaccatgacaaaatgatttttaagaagggtagaggtacatttcttataaagagagcactgttggaaggtaacctttagaaaatggtataaaattaaaaattaaaaataaattaatgaagaactcatcaaatatccattggtcactaagtacattcatagaaaaagactaaacctccaaagacagcattcaaagaaggcttttgcagtttcaaaagatgtttatctctgccctgattcaactaataaaatacttcctgaagcttttttaaggaagaaagtctactagtggattagactctaatgtcccaagagaatctttggcatagaaataatttacaatgcccatattactagaagagcaagtgataaatgggagagaaaacagtttgaaaatatttagaaataaatattttgtgtctccgaaaatagcacacacaaaaggagaa

SEQ ID NO: 27027 - DNA, 1575 bp, Bovine  19866880414586
  misc_feature (1)..(1): n is a, c, g, or t
nccctaatgcccccaggcctctacgggaggacgatgccttttattgggacagttattcgagtgcttcgtagggacacagtcacacctgttttcacattgtctatgggcagcgtctacctgcaaaggtggccttgataggtgtggcagagaccacgcagcccgtgactctaaaacacctactcgctgctgctttataaaaatctgcctcacgtgccttttgatggccaagtcgaagatctctcttggtaaatgtcacactgcacttgaaaatacgtgttgttgttcggtcactgagtcgtctctgactctttgtgcccccatggactgcagcacagcaggcatccctgtccctcaccatctcctggaatttgctcaaactcatgcccattgagccactgaggccattcaaccacctcatcctctgtcgcccccttctcctcctgccctcagtttcccccagcaaatatgtgggttgtttccaaatatcttttgacgttggtttctaacgtaatccaagtggtaagagaacagactctgtgacgtcagcacctgcagaccacgagactttggcaccttgttttatgtgccaggatgtattccagtgtctcctggttcacagtctatggaacttgaatcgaattggtaccctgttgctgtgtgaaaattatgtaaatcttaattatgttgaattggttcacagtgctgttcggatctactctttctacttctttgtatatttattctactaatttttgatattgaaactccaaataaaaaatcttaatttatccacttagaaaataattgtaatatatagtggaactatatgtaaccttgttctgtattttctgagtctcctgtaaatgtgttatcatattttcataatttaaaaaatttttaaaaagggaaaaaaagaaagtcactcctgcttgatcctcaccagggatgggagaggctcagctgccgataaaggtctatcaatcttcagagggttacaggcaccacatttattcaagagcaaatatggatcgttaggcaaagctgaccataagttagaacaatagtctcttaattgtgctattgatattcatcactgtaataaaattgtctaattgaaaaagtccatattgacaaaccaaaaagaagtgcattgatttaatagtagttttgaattattaactctacaaatttttattccatggagctgtcacattttttatcaggcaggtcatctcttaaagggggccaaaggtttatcctggaaaattcctgagactggaagataaggaagttttgtggatcccaagaaaagctgttctgttttttgtatgcactggagtgtgtgtgtgtgtgtgtgtgtgtgtgtgtccacagactgatttccttagatgatctgagccaaagagatgggaatgtcaagtttgctcggtcagtcctgtggactgagatcacttatgggcaagaaaggatggggagtcagtgtattaatacaagctcacatacctggtggccctgacctctgtaaggacagcccagtttagggatgggcaagggcattgtggtgattatccatag

SEQ ID NO: 27028 - DNA, 1803 bp, Bovine  19866880535049
  misc_feature (1)..(1): n is a, c, g, or t
ngaacacaaaaataactacactaaaactcaaatacctatttcaatccaaggagtctataaacttctgtggatgtttacatgaagacgaccttctttgtcccatgctttttcaatgctgttaaaaaaacaaaatgtactcattaggttgtgcattatttattgatgctcagacggctcctccttgaatttcatagaagacttcggttggcccacttcctaaataaaaaggtcagagctagagacatacattttaatgcctcatactgagaactgttctaaccctgggtttctgcgagcttacctctcaacaacaacaacaaaatctattaattttagctttctggtacttcagagagcccaattttgaaaaagaatcacaggtgctccattattttctatccacagcctcagagatcccaacttagtggtcagtttgagatcttttctaattagcagtgtggagaagccgagagttccactggacattggaaccaccagacctgtctatggtctttcagctttagagtcaaggacaaaaattcagaaactttgtatgcttagatagaattctcattacaagataactaaatgggggcatccttgtcctcagacactcctcaacacaaaggtagtagaggggaaaaatggaagatcagatagggtagttccatctctcagcaacaatattaccacccatcttactgggttaagatgtgtaaataaaatcatgcttgtaaagcgcttaatagagtcgcagagacacttgattaactagaagtaatagtataatatattattattatcattaccactactactatattccatatcataatagctgaaaagaaaatttaaaaaattctttttcttacaaagaaaagcttagctatgataaggaagcatcttaaggtcagatgaaaaattttcctcatgtgtgtggtacagattcaattagaattgttcagattctgtttttattaaggtactaatacactggagaatgctgaaatcctgttcaggtagttgcataacgtaacttccattgagaagacagtcattggaagacaaatgtagtcaggctagttgatattgagccattctggatacaaagttaggtagaagcagacctccttaaatagtaacataagggacttccctggcagtccagtggttaagacttcctatttctactgcagggagtatggggaacctgcaagctacttgacaaaaaaattaaaataaattactttcacctcacttaggagaaatacagagctagtccagtgttggaatggataccacagagttactacgggcccattatccttccaggactccggtcctccaagcttatactgcaagccttattttcattgtacaagattgctgctggagccttcacaactcattctaaataatgagattttgaaaaggaaagagaaaggcactttcccctgtttagggaaatgagttttctactttcataatttttcccctaggttttactagccacacattcatccttaacggcaaggaagactgggaaacatagtctttactctgaaataaaagatcattttactatggaaaaaggggatattaatgagttaaagaagttaaaattcccagtcacactaaattcattcttctctgaatattttctctctctttcccttttcattcctggttttccttcttttatttctgaatgatcattctacttttctgtctatattctgtatttcaactttatccatttcaaaggcttgaattgtcgagtttgaggctagggaaggtgttaaa

SEQ ID NO: 27029 - DNA, 1642 bp, Bovine  19866880553292
  misc_feature (1)..(1): n is a, c, g, or t
nctaacagtgaatagcagcttagtgtgcgcgcgcgcgcgcgtgtgtgtgtgtttagtactaacagtgcttgaaggcctacatctctttgctactgttgggaatctcttatattcttctttctaaatgagaaaaaaatatatatataataaattgttggtatttctttatctgagacaatgatgaatagataagcaaccttctatgtattaatattatatattctttagtgttattatgtccaattagaaatactcatttaaacttagagtagcatcatgagatctctgaaagcaacttcttaattattttatgtgttaatactaataagattcttgaaataacttctttaaataagtaaccatctagattgcacatttattcctgagtatattcaagggtgcattgatctgggtaaggtctcaataatttaatttggttcctttctgtgttaacattccatagtagtagctgtattttagaaactcagactaaaagatctgtttttaatatcttaatttttagaggcatacatatttatgattataagattatctgttataatactttgtatagtatagtttaaattaaatatgtaggaactttgaactactagaaaagatagttcctcccagaggtatccttacaaaaagtggaaaaatagcatgagtctcaacttggcaaaacatgaaaaacagtatctctgagtcacaagatgagtcaaaagggtgaggtttgtttgcttttccttgttcatctgttttaaagggagtgtgattccaagtagctgaaaaaaatcttcgatgaaagatggtgccaaaagttggaattctttatatttagaagtacatatctgaaacattcagtggtgttgccaggatggatttgatctgtgcctaactgttaggagattggtaataactgtaaatgaaaagtaacctttaaaaatatttaacttttattaatttttttcttaaaatttaattaaaaatttaaaagtgctgggttttatttgttcatacttgcgaagaatgatctttagacgaatattcaagaagctggcagcattggagggagactttgaatattgaactgtattcaaaccttgttcagattttgaaccatgaactgttagaaataaactaaattaaaatttgaaaagagaaatgaaaatcagagtgcctagtgtacatagcagagattgatttagtccacctgatatgaaccacctgactttcatgatcagcttagcattgtcaatcctgtaatatcttggtactcagcatacagttggttgtatgttatggcgggtgcagacaagcaaagaggtaacgagaaaaatttcatgatatattttctttgttataagaagttagtccatagtatgttcatctctaaattaaattgaaaattaaactattggataactgctgaattttttctggtagttatactatcatttggtaaatcgtgctgctcctttttgtttgtttttagttgatgcagatgaaattaaaaggctaggaaagagatttaagaagctcgatttggacaattctggttctttgagtgtggaagagttcatgtctctacctgagttacaacagaatcccttagtacagcgagtaatagatatattcgaca

SEQ ID NO: 27030 - DNA, 1030 bp, Bovine  19866880562712
  misc_feature (1)..(1): n is a, c, g, or t
ngtttataccctactttgtaccccttatttcgtttaagtgtgtgtgtgtgtgtgtgtgtgtttcccttgaggctaggaggtaaggttgaatcaagggaggtgaggagaggatgaagatgaagtaaacaggaaatcttaacagctaatctgccacgttaagtgatctctcctggcatctcctgttctacttatgattggactcaagcccagtctctctggctacttctcggcatagctcgcctcctactcctaaattcaagtgctcagctatatcaagctgctgagttgtaactttgcccctcgaccatctggaagggctatttttatacaagttgtagccacgtctctctacttccaagcatcggatggctacccagaagcttgaggaactaggccacccttccaatcaccatgatgacggagacactttggaacaggtggaagagtagaaacgccttgaatttctcttttgtgacaccttgcttattgagaagtcacttatccagccatctaaaccatccagaatcccagttgaggacagaaaacatgcccaaaagtgaagatctccatcacaggtgtcacaaagtccaatcactaaaggcttaggtcttctctcaagacctcatgactcatattttaaagacagttctagcttaaagggtgacctggtctctggctcttagaaaattgggagcagaataactaaaggaaagacggcaatttgtaggtttatatactgaaaataattttttcacagagagaggacaaagagaaaaaatattgaaagaaggtaagtcaaaaagcataatagatagggacatagttctgaattaaacaatagtttctgtggatatcaataaaaattgatatacataatcatgactgatttatttaggacggtgatccattatcttcagaaatgttacatcgtgacccagtgttttttaagagttcagtctggagccaagatgccttgattcataacctgactcagcctcttattaactgtggatcttaggcaagtcactta

SEQ ID NO: 27031 - DNA, 2519 bp, Bovine  19866880586605
  misc_feature (1)..(1): n is a, c, g, or t
nttttaaaggcacagttgggataaggattacaaggggaatgacttaatcctgattggttgatagtgaggtaataggatgatatttggggaatcttattccaaccaacctggggtctatgtgcttgtggtcagcttggggtcaccaccctcctcctggatggggtatcttagttcttgcagaacatctcaaagatatgtgtcagactgttccatatatcccttgaggatgaactaagatgctgaaatattattttcttgactgcttttactttatttctgcgttctctcacttctgcatattcagcccccctccatggcccatgtaagccaaccaaaacccaagcctgcaaatgtctcaaggtaatgaaatcaaaatctaaggaccatccatcacaagctgtagccaatcaaaaggctcctttctttgcttctgcaccttctctatataaggtgaaatggaatatttcctgctgtatcagtaaacataggatgtcacagtcatccgccattgcagccttccaatgtgagccagtgagccctgagaaaactcggggctgaaaagaatacctgccatctagtagccaccagactgcggccactccctgcaaacccctaaggtaagtcctgaggaaactcaggaggtgaaaacacaggattctggccccagatagctgatgtgcatatcaacggaatgatttcagtaatcccagactcctgcatcttcccatatatagaaaagtgctaaattccttaacctgacatatctgatttcttaagttaatattttgacattcctgactacctgccctttgttgcaaaactcctttatatcctagctcctcgccttgcctaccctgagcagtttctcagtgctatctgaggtgctgtctccagggctgcagtcttcattttgccccaaataaaacaactcacaactctacaactctaacgttgtgcaattttttttttttttttaatcaacaaaggctttccctggctcctgctgttggagtgctcgtacccatttccagtttggtgctgcccaagccaaattgacttttgctcaaataaactaaaatttttcatatgactcagtttatctcttaactgcaaagacctgactgtgctgcacagagtaagttcacaatcaatcaaaaacaagtaacacagtatttcttctataccaggcattgttatcttcttggggaaaacaaaggtgaagagtatttttgtctttgtatcactttgagtgacctgggaagacaatagccatataagcaaggataatgctagctgtggtcagtggaagaagcaactctcagtgcacagagccctcttccctccttctgaatttgagaacaaggtggagggtgaccctctctggaataaaagccaagagggacagggcctgctatctgcagaagaaatccacttagctctgtctcatttggctgttacgtttgcctttgaaccataaccccttccagctactctttaccacacacacacacacacacacacacacacacacatccttttttctgcctccttctacttctttccacttgttttctcatttcttctccttcctgagcctctctccatcctttcctttccactgagcttttctatagaaataggcctctaatgtgacaccctggtgtcccgcagaaagtgtgcattgaggggtgagcagggggtgggaggcatcaagattgggttctttaaataacacttaatgaacgataaacacaatccagcccagccaaactggtacttagctcctaagtacctagtcaatggcccatctgtcatattgttaagacctttagaagctgtttaacaaaatgttaaatgagatgacattcagcaggcagcaaaatgcttgactgcctaatgcaaccccaaagagccagcctgatggcagtgtctgatataatgctctgtatacccctcccaagaactcaggagcagaaggtctccctgcctgtcacttcctatcttgctaaagtgagcctggggtgggaaggacatgattaccattgccaaggaggccccagccagctgatgagatgcttttctgaagaagcatgactgagagggggcacctggaaataaagccagtagagagaaaaaaaacaataattcatccgcagtttcattctctccccttcttcgtcgccagtggaccctacctctctctgttggccttgggggagaaggcaggggtgataatgagacacgactttttctaagagctgaaatatgaagccaattactaaggggaagatttccagcaaattggctcctgatagctcacatttatctgctttagatttgcatagtcgggaggaaagactaggctttggtccaggtaacaaagacggcatctcttccgcaggaggtgaatgactgattcaacttaaaaccttcaacccttgtatccagagttcaaccattaaaggcaataacaaacaaatcacaaatctcacaaagaatgtttaaagggaaaaggagga

SEQ ID NO: 27032 - DNA, 1407 bp, Bovine  19866880665510
  misc_feature (1)..(1): n is a, c, g, or t
nttggagaagactcttgagagtcccttggactgcaaggagatccaactagtcctcctaaaggaaatcagtcttgaatactcattggaaggactgatgctaaagctgaaactccaatactgtggccacctgatgtgaagaactgattcatttgaaaagaccctgacgctgggaaagattgagggcaggaggagaaggggatgatagaggatgagatggttagatggcatcaccaactcaatggacaggagtttgagtaagctccgggagttggtgatggacagggaagcctggcgtgctgcagtccatggggtcacaaagagctggacacgactgagagactgaactgaagtgcataactgtaggatccaaagaatgaagcagggagtccaagttgccagcagtggaagttcagatatagagtcaaattctggatatattctgaaagtagatccatcaagattttgctgagtgtaggataaagtgggaggtcaagaataatgtcaagttgtttagcctgatcaggagaggaagatttgcgggggaacaaaaaaggcaaatagaattcagtcccaaacatgtaaagttcgagatgtctatcattcaagtggagatgttgaatagacaattgcatatgtaaatctggaatttagagaagaggtcaaggcttgagttaaaattttagaattattgttaaaacaacaacaaaaaacagattacatgaagcaaatgaatgtaaatagtaaaataaagaccaaggactctgctttagggtactcagcattaagagctcatgaaaaaactaaacacccagcaatggacactgggagtaaggtagaaaaagccacaagatattctaatttcctagaagaaaaatgaagtgtctgaaggaggtaggagtgacttgtttcaaacaagcagaaagttcaagaagaatgagggttgagaattgatgacaggatttagaggagtgatcacagacgctcttgaccacagcagttgcaatggagaggtgataaggagagcctgacttgaaagactttcaaaggaggaaaagcattggtgacacaggtatagacaacacacggggaattttgctgtgacagggagaagagaaacggagtagtgaagctgcagggaaaagtggaattggtgggaagatttgtttttaggatggaagaaatatttatatggtgatgggaatggttcaatatataggaaaaaaaggatgaaatgggagcaaaagggaagaataaccagtgtgaaatccacgagaatgtataagaggtgcctgaaaatggggggttggctttaaataggaacacagacaattcatctgcaatatctggaaagacaacagagaatatgggaatagctgggggataggtagacacaggtgagagtctggg

SEQ ID NO: 27033 - DNA, 3815 bp, Bovine  19866880751847
  misc_feature (1)..(1): n is a, c, g, or t
ntagttctagtgttagaatggtcgaaagctatatttagttggttgtactgctgagatctctgcagggctttctcctttttttatatcagtattggtctaaaattgattcagatttggtttggtagtgtaggagctgaacaacccaggcaaatagccaagaagtttctcatacttggaaaagtgaaaggcagactactcagatttgtaaagaaaatctggggcatattatttgcagattctaggagtgaagagaattcttgaaaagggattatgatgattaattttttttaaagatatgactgcttttttggtttcaaatgttctttgagtgatattctcattttttaagtgaaacttgatgttaattcatattgaattggcagttttaaaatccatggctcatttgataaaaaagctattctgtctgtagcagctctatggttgagtagcagaaacccaaggttttctagggagtgacagtataatacattgttacttggagagaaggaaatagagttggaaaaagaacagtgtacccatgatgatgagctttctgcttgccagcagtgaaggaaaaaattgatgccagcaaccttaaactattgttattacagggaacaggatgcttctcctgcagttgcaaactagtgcttcagaaggctacactgatttgattggatagtatgtgctaaaaacagaaagatgtaaaatatcataaatgatcacaaaagcagctatggaaaatcctacagagttgagaggtgatgttaatatagcaatttatatcttttgaaattggtaagtaagaatcttctttctgtgaacaaaaaaattctatctgtaaaggtagaaatgtaggaaatataggcttttccttccttagcaatggaagagtttgtttcattaaactctccatgagggtcctcaaggaagctgaacagaagtaggcctctgatgtaggtgaagaatgaaggacactaataaatggaatattcctgaccctacacatctacttgaactaaaaggagatcaaaccagttaaccctaaaggaaatcaaaaaataaaatcaaccctgaatatccattggaaggactgatgctgaagctgaagctccaacactttggccacctgatgcaaagagccaactcattagaaaagaccctgatgctgggaaagactgaaggcaaaaggagaaaagggcggcagaggatgagatatttaagagagcatcaccaactcaatggacatgaatttgagcaaactctgggagacagtaaaggacagggaagcctgatgtgctgcagtccatggggtcacaaagagtcggacatgacttagtgactgaacaacaagagtatcattcattcacagtaactgcagagactctccctgtcagttaaactgaccccaccttcgaactccaaacacaacttattattttctgcctcaatgtccttgaccaacctattactcaatttgtctgggatgtcctatacccacctacccaaagctaagaaacaaagataattgaaatcctaccaccttaaagaccaactttatttaaaattcccttactaagttaccctgataaatccaaacaaaaagtactccatctcttttctccaagattgtagagcatctcaccacaagcattagtggtgagatgctagttttcatgtatctctgtagttctgttcacttggaagtcatataataaatgaataaatgcgtgcataagtaaatgaatcattacataaatgagcttaagatctgggtaatgttaaactttaaggatttgggaaataataaaaacacatatgttagaattttatgtcagatatcactaagaaatatagtgagacttataaaattttaaatacctcagagagtttaatttataggttctataataagaagagatatcctgactatacctgccacatgacaactcttgaaagtacattaaatatataaggctaaactgttatattaaaatatcctatttttttaaaaagtattttcaatgaaataaaaatttttcttaaaaacagttaaatgttctaaaaatatgttcttcattcagaagctgcttcaatgataattcaaagagatttttcgaagaaaattcagatacttttcaacatgccatatgatgtatattgacagttttcaggtaaaaggttcctagttctacaaagataaatctgtcaaatgctctttcatgggaaaatgctaaaatttgtcaataaaatagagttttaatcaaatgttattatattattgttcaaaataatatttttgaacttttgaaagttaacttaacaaccataaatgccatagcttcagatacagcctcagtaaggaaagtataacatataacctccataccatattaactgagataaagtaatcatatttgtgtctggagtattaaaacactaaagtgtgttttaataagaaaacagtaaatagaattcccttgtggtgaaattaattattttaatcacttggttttatcacttggttacaagttggctgtgtttatacatatacaaacgcatgtgggcataacctggatatacagttaattccctcactctgtgggcagaaatactgatgcatccagaaatttaggatgctgaattggccactgagttatataaatgatataaagaagccagagtttattaaagggaaaaaatattagagttcagaagcaaaggaaacagaaggcagaacaggttgatgtaagcaggactgatggtcattcgatagttgtttctttggtgtttgtcccctacttctcttcccctaaaacaatagtttctattgaggatctctgtggttttgaagaaagagactctactttggttccaagggtagaacaaactaattagtggtcacagtgattcattcaagaataacaatgtgatttaaaccagtttttttttaaaaagttagtttcatgacttttcctaatagcaagaatcaaagccgttttctctctctccttaggtgtaaacatggatgcttatcatcccagctgaataaggatgcatatagttccttgctggggagagcagccagtcttaggataaaaatcactcctctaaggacagtatgatggaaggaaagtgggttattggtgacattattgacattattaatgagctgaagcaacaaatcttgtctaatctagccctatttctggacttttcagtaaaagaagtcaatatgctctctttatcattcaggccagtttgagattttgttttaagatacctgcaaacaaaagaattgtttaacagatacaaagaaaaatatatatacactgttagacaatgattgcagaaaaaatctatataaaaatttatcatttttaaatttaagaaaatcattaaaatcaataattcaacaaattcacagaagcagagattttaaaatactattaaaataagtggcaactgtctctaggtttaacaagagaatccatcttaaggtttcattttgagtttcctgaagtaaaatcacttacctggaaatgtactatgtctatattctatcttgtgctggggattcttcctaaaaagaaagaaagaaacgaaagaaagcaaatataaggtcaggtttgacaatcactaaaaatgaataagactatttaaattaaactagagcactcactaaactacaaattagcaataagcctcttattgaaaaacatttgctttgttactgccgttaactacagtcaccatgctgtacaaagcatctgctttttaatcacatttactgaggccattccatgccaggtata

SEQ ID NO: 27034 - DNA, 2900 bp, Bovine  19866880755469
  misc_feature (1)..(1): n is a, c, g, or t
ncctcgtgaagccctcctcagtcctggcctccgcctcctcttgaacccagagtggcctttccaaagcacgggaaatgtcactcctctcttcagttcagtcagttcagttcagtcactcagttgtgtccgactctttgtgaccccatggactgcagcacgccaggcctccctgtccatcaccaactcctggaatttactcaaactcatgtccattgagtcagtgatgccatccaaccatctcatcctctgccatccccttctcctcctgccttcaatctttcccagaatcagggtcttttcaaatgagtcagttctttgcatcaggtggccaaaggtggtgtctcttcaggcccccactatggctgctataggaggacctctccagtgtttatccccaacccgagaaacacaagggtctgtatgcacaacaagggcttgaatggcagcgatgctcagctcaaggatttaccttcatctggatttggctctgcaggcagaccctccactgagactcactgggcaggacttccggatcctccactagcttcctggtctctgtcacaaatctatcttggtctccaaccaagtttgtctgaactttccccaaggaccctctcaaacctctgtgaccctgctcttcaccttaacacccttcttctgcttctgcctgatgaagctccatgcccccctcaccccaggggaaaggcttcccttcctttaataaccctgtttagaaggaacaatctgtctcttgagcctttaattcctctgccttgacctgtaatccatggttgacggcagtctccttactagattctaaaacccttgaagacaggcttcctagcatataagactttgcatcttaggcccttgcctaagacagagggcccataaccaatgaactgagtttctgaacctctggcccttaggggtgggagtaggactaataattggtaagttggcagggtctgtgctggaaccttcagctgggccagaaagtctcgaaagtgccccacaacaatggcttcttccaggtacacagcagcctgctgccaggagggattaaagaaaggtctgttgacaatgcccaggagtgccaggtctcctggcaccctctttagctgtcccatccctaaatagcttgacagtgttatcagagaagaaaggtgctttctgagaaaggcaggcccctaggtgctcgtggcattttgtaatgaggacagcactctgggatccctgtgaccagggggccaccttgggatctgggggacaggaattcacggaattcactcattttagagtgagtcctcgtgcttggaaagtgggtatggcaacccactccagtgttcttgcctggataatcccatggacagaggagcctggtgggctacaatccatagggtcaaaaagagtcagacacaactgaagcaacttagcatgcataccctgttccaagggtatgaccttgggcaagtcattaaacttccccgaatctttagttcattttggagaaattgagagcaagaataagagatatctgtggttccttggagatgtctgtgtttcctcggagttgtctcactctataatacatgagtaaatacaacagttgctcttctcaatgtgttcagatctttggttaaaattaggaacattcttattctctctctttcccccttctcctccctctcagcatgttagtgaccctcatagagagaagcattttatggcatacaatctaaatatcaatacataacccaacaactagctgcctggtcactagcatcgctcctactttcctctaaacataagacaaaattaaacttctcttgttccattttgacaataataacccctggctgacctgcaccatgagctctgtgttacaatcaaggctattttacctgcacactgaccagaattctccattatggggtcatagggcagagtgcagtggagagtcagacagctccacaatgcccacgtgacccggcccccaactggcatggccccactctgcaaaccttagttaatttcagagctgcctcctcccaggtttgacgggagctggggagaacaattacagaaatgattagcatgcaaatgggaccggcaggctatgggcaagaactctctcagtaaggactgcagaggccaactgctctctgagcaaatcatcctactctaaactgaagaaaagtcactggcttttttgtcaatgggaaatgagtttatctcactattttaaatgcattattcctaaatattttaatcaagcaataagaactggagactcaaaatataacaagatgaaagtttgaatactactttgtctaaaagacacagtggaacttctgtttaatttattcatttcgtctcaatcattttcttccttgcacttatgggtgtccttgcatgcctcagccatgaggccatggacaggtgctagttcgtaccaacatttttcccagttcagggcacattttaaaaaataaggacactgtaatcaattctttataaggctaaatttattcaagttaaaggagagtgctattatgtttgtcctacttttgatattaagaagttctttctttagtgaaatgactgtgattctaaattaaagttcattttttcagtttgctttttttttgtaaatatccttaccagaaaaattaactattaactgccaaatttgtgtgatgcctgttttgctcggtaataaaatcccagtgcctgagatcctctggtttaggtatcagcagagacattatccagctcttaccagggccaggaaggccatggtgcatataaaaggactcagcatggaggtgctttgatcctccgcttctctgtgctcccttagtggaaaaaatggttcacctaatcccaagtaagggctt

SEQ ID NO: 27035 - DNA, 2318 bp, Bovine  19866880825695
  misc_feature (1)..(1): n is a, c, g, or t
nacctgagagctcacttatatcagtacttgattataatttgtcttgaattattctttgattctttcttgttctttcatgtaagaaaatctaatcaaatgaaatatatcaaagtactatcaataaaagcagcaagctctagctgggaagtgtcacttgatcagctcttattttggtgtcgcatccttgctctttctcttcataagcttgaccttgtggagcactacctgaaaaccatttcatggactttagttctaaatggcagaattgttctctctttctcagacagcattaaattatgtaaagagttaaaaactaaaaatgtataaaaactaaaattaataagtgtgtaagtgagtagtgatggttcataaatctcaacaaatctctaaaaggcagaaaacattttgagacttggctagtaaaacagagtgaataaagtttagcatactaacgtgtacttggattttagtaaaaggaaaacatccattgccccccaaaattatagggaggctctgtccttgaaggtagcattcatgtcagtaggactgaaaatggaagacaaattggagctccatgcaactgttgatatcactcctgctatcttccctgtgcaactcagaatagccccttttctcaagatgaacattctctaaagaaactgaatacagtctttggaagaggattgatgttaggattactgccctaggtcaaagttctcttcattatggaattgaggagtctccagatgtaatggcaggttccccactggttcaagtaaagcaaaacctgctggttgataagccaaagcttattcacagatctggtcagctgttctactgtttccttcttaaacatgaaaagatacttgatgattatcaaagtcttgagcaaagccagtaacttgaaagggaatggctaagagaaacaacaagaaatagaaataactcaagagacagaggagaacttaaaaaattagcttcttcacagggatttgagaaactttggtattcataaaacaaaagagaatgttataaaaaggaaaaaagagataaaataagaaagagcttgtgaaacataagtgatgattgccaacaaaataaactatatatatataaagatatatatatatatagatgtaaagattgggagggggaatgaaggaaatctctaagaacttaagagtataaaaatgaaaaagagaaagaaagaaagggaggagagaaagaaataattagaaagagaatgaaaacttaggaggattaatacaggaatagtatcctctgaataatacactggctttaataggggcttctgaatttacagaggaaaccagagaagagaaaattattaagtaaataagaaaagaaaattacccagaacaggagaaagatacaagtcttcagattaaaatgaccttctaagcattgagtataataaattaaaaaagatcctcaccaagacaaataatcatacaattctgttttattggaaataaagacagggtcttaaaagtttcctgagacaaaagcaggcaatttagaaaggaacaagggtcagtgtcttagtttgttcatgctaagtcacttgagctgtgtctgactctttgcgaccctgtggactgtagcccaccaggttcctctgtccatgggattttccaggcaagaacactggagcacgttgatgtgccctcctccagggaatcttctcaacccagggattgaactcatgtctcttatgtctacctgcgttggcagggtggttctttaccactagtgccactggggaagcccattgttgatgctactataacaaaatgcaagaaactagggtggcttataaaaacaaacatttatttctcacagttatagaggctggaagcccaagatcaaggggctggtatggtcacatttggtgagactctcttccagggtcatagttggcccctactcattgtatttccaaagtggtggtagggggctaaatgcactaattctattcattagggctccaaccctcatgactgaagcaactcccaaagtctccacctccaaagaatatcacattgggcattctaatttcaatatatgaatttgagggagacacaaacatttcagttcagttcagttcagttcagtcgctcagtcgtgtccgactctttgcgaccccatgaatcgcagcacgccaggcctccctgtccatcatcaactcacggagttcactcaaatttacatccattgagtcagtgatgccatccagccatctcatcctctgtcgtccccttctcctcctgcccccaatccctcccagcatcagagtc

SEQ ID NO: 27036 - DNA, 1063 bp, Bovine  19866880959972
  misc_feature (1)..(1): n is a, c, g, or t
ntcaatgggattcagaacaattccttttaagccacagaatgggacaatttcacaaggacatagttcaggctgttgagacaaggaaaggagtttggagcaggttactttggttctcttcagcctccccacattccttactttggcccctgagaaaaagtgcaacattcagaatcttcagtggaatggaaataaactgagttggtgcctgtttgtctctatagcaatctaaccttacctaaatgagtgggtgtgtggtttggattcctttgttttcttcccctggttcctttatctctattccaacccagtgctcactctgggcaggtgcctaatgggccagcttaggttacacgatggttttaaatttggcctggtttgtgtgtaatgtctttcaaaggcttaggatgaagcttggattctggacgccatggatgtttgcagggacacactgactcatgaaggaaaagctgagtttcagcagaaaagggagacctcagcctagcaacatcaccccagaggaattcccaagagtgtggctcaaggcttcaaccagccagatggagatcaccatgggggtcatggatgagaatgccaccaatacgtcaaccaactatttccctctgcttgaccccctcggagcccaagctgcttctttccccttcaacttcagctacggtgactatgatatgcccttggatgaagatgaggatgtgaccaattcccggaccttctttgccgccaagattgtcattggcatggcgctggtgggtattatgctggtctgtggtatcggcaacttcatcttcatcgctgccctggcccgctacaagaagctacgcaacctcaccaatctgctcatcgccaacctggccatctctgatttcctagtggccattgtctgctgccccttcgagatggactactacgtggtgcgccagctctcctgggagcacggccacgtgctgtgcgcctctgtcaactacctgcgcacggtctctctctacgtctccaccaatgccctgctggccatcgccatcgacaggtgagtgggggtggggaccac

SEQ ID NO: 27037 - DNA, 2626 bp, Bovine  19866881516974
  misc_feature (1)..(1): n is a, c, g, or t
nctatttcactccatgttaataaacaattttgtgtttttttttcctctaacaatacatgcaaaatctcctttgaagttatggaagggactgtgtgtgtgtgtccttgccatttttatttttcttaaagttccgataggctggcctgggctgggattggatagagaacttcagagagaaagagtagaaaccactgtctcttgaagtttgcctgctggcctcctagcaattgccttcttgttggaggtgcagtcaagctgtgtggggacttggagcactgtgaagggacgcagatttgttgttatactgtgtaatgacgttgtttgtaattaacacaaacattccatttaagacgtcatgaaggaaagagggagagttttcagaatgagccttctctttctttctttaaattcttttctattatgggttattgcaagatagagttccttgtgctatacagtatgtccttattagtgatctattttacatacagcagtgtgtgtatgttatcctactttatccctcctcctttcctctttggtaaccaaaagtttgttttctatgtttatgtttctattttgtaaataagttcatttgtttcatattttagattccatatacaagtaatatcatgtggatatttgtctttgtctgacttttttttttcgaaaaagcatatttatttacaaagaaatatgagtatactaaggagcaaaggaaataaaaaggtgggtgtatatatttacacagcaaatggaggcaaaacttatcaagaagtttctttaaatacttctacaatataacatttaatggtgaaatcagcttctaaaaataattctttatcacttcaagaagctttattaggaggttcaatttatgattcacagtattactatcttagtgaaaaaattgtagttttatattctttggaaatctccaagttgctggaggccaagtaaaccagattagtaccagtttttaaaagattcaaaggttcttaaattcagaagtcataattgctttaagaaattgtttcttacaacccaaatgtactatcatcagctgagcagcataatacagacttagtatgataaggtccatccatgcccttcttctgaagtctttatagaactgaagagtccagggaggacacagactgcagaggaagggcatattgagggttttcactgggaggggggagcggggcagagtgagcagtggtttagcccagggcacaagcagacttgtaaagctgagttctgcttctgagtgggctagagtaggtcatggtacaccaactcacttactgacaaagagcagaaaaaactggataaataacaaaagttatacttttaatggcatcagagagttgaggaagctacaaggatcaatggactaaaattgcagaaaggggagaactgtctggaggtgagtggataactggctgccccatgtgttcctgggtcattttctgatcctgggctgagctccatgccagggagggagcaacgaaactcagtggccctgtgggctgccctgctcaaagcaggggttttaggagtctcgaactcacggctaccgaaagcttttctgaatctgaggcagtgggagtgataaataagtcaggtgacatgttctaaaagacagaatgaaatatcctatggtctggaggtcctgaagaaactaaaatggccaagtggaaatgaacggaaaacaaaaaagccacagatgaaagctatagggagaggaatatgctgacactccataggtccttttaacccagggtcacttattaattctggaagctactagagcctgcgagtcaagacttgtccctaagtctgctgctggagagcaatgagaaattggaggggggtgggtgatacaactgaagaccagaggaacctcacaaggacggctgggcgctctctgaggaaatgtactaaactttgaatttgtacactatgagatggtacaaagctaagcggcaaagctgtgaagggcagagttgaatctcctttggtctctgggcttgatagatgggctccaggttggggatttacagcaagcttcccgtttgcacttggaaatagaaataacaacacaaacagtaaatagccaatctttgtctcctaaggacactttaggataacagtcgtggcaaaaacagagaggggctaaaccttatttgagtaaaagatcaagaggtcatatatttcccatccttggggaaagggagacagtgcacatgtacataaaggctccttgaggtcaaaagtgggggacaccaccccagaatatgtgatgccaaggccaccccataagcctctggactggagtccatcttggaaaactttgcacacgtgtatccagaaggatcctagggtaggtcaggtgtggaaaaagacaccagataattggccacaggtaaataaaggcctggcagaactgccctacatgaattatttagccacctctttaccatgcttctcattagggaggatgcccacacccttcctctctgggtgtgcatctctgcctggcttcgggtcaacgagaagtttctctgtgtgcttgctcacttgttgttgtcttgtgtttctaataataaactttgtagctggtttt

SEQ ID NO: 27038 - DNA, 2861 bp, Bovine  19866881539194
  misc_feature (1)..(1): n is a, c, g, or t
ntttactttgtcaattaatgggaatacaccaggtaatagtcatgagctcttgggggatattctcgaggctgtttccaaatatcctttatggcagcatatggtcgtatcctccacttcatcaccaggtcaatctgcagttgctctatggtatgttcttcatgcaccaatgcaatttccaagctccatcacatttgttttttccccccatggtgcttgaaagttgcttaagccgctgattattgccttgccatgagcgctgatcactcttctggatagtaggcattcagatgtcatctttaatttgcgatattaatattgaactccatcaccgttcagtggttttagtgaagtatttacatatagactagcaaagcgtttgagcagtgcattgaaaactgtcctttcctaattggaaccgtaaagtttaccacagcatctgcatgacatggatatgatttctggttataaagcagccttggaggtttgccttcaaaaacaaatgagatgtgtttttctcagctctgtatttcctcacccattcagaccattaatgattggtggtgacagtgctcagggaactgttttttataacctcacacacttttaagaaggattaactgtctcaatgagtattttttttaaaactggaatcacatttaaaattaatgaactaattagttaagaaatgtattactttattatggaaagagaaaccctgcactataatgatggtgtgaaatgcatgaaaagtccttttattttaggacattagagcaaggaggattgttcaggaacatttggactgctattattaattatctgatttgaagatcacctcaccctgtgagaaacatggatatcaatcagtatctgagagaagtgaaagaatgaaagagaaaaaagggaacatcttcccttcttgtattgttagatgacctcgtgccctggtatgtttaaattgcttacttcctataactctataaacttctggtgtttcatttgccggattagattgaagtgtcaagtatatttgatgaatggcattggtaatatatgttcatgttcgtctttgctctttttctgcttttatttatatagagtcagtataatttatttctcctgaaaaagctttcagcaaaaaagattttttaaagtacaaatactttttaacagggttctggggtttgtgatgatcaaatcactcatctttccttcttctttctagcttttttttttccttccttacatttcttttgaaactagtgactaaaaaaggcttccctggtggctcagatggtaaagaatctgcctgcaatatagaagacctcagtttgatccctgggttaggaagagcccctggaagaagggatggctacccactccagtgttcttgcctgggaaatcccatggacagaggagcctagtgggctacagtccatggggtcacagagagtcggacacgactgagcatgcatgcactaccacaatctcagttgcaattacccaactctgctgtctcagttaagtgcagtcacagacaatacctaaacaagtgtgtacaggtgtgttccaggaaagcatattgatggacactaaaatctgaatcattttcttcttgtatgttattaagtataatgacattttaattttttcccaatcatttgaaaatgtaaaaccattcttacttcacgggccatgtgtagtccccgcccatatcacagtagcacatgggagaagtgatgctacataatgtctaagatgcagttttaaggaccatacgtttctgtcttggatgcatgctctctctcaggtctctgccatgttgtgtggtgaggcccacaaggcaaggagccaaagccactacccaatgttcacagatgaaccgaggcctcctgaaaacacacatgagggtaagtttggaggcagatcttcctcttccagtcgagcctttagatgactgcagccttggctaacagcttgcacacaacctcatgggagattctgcaataaagtcaccccactaactctcctagaattctaacatcacagaaactgtaaaactgtgtattgggcttccctggtggctcagtggtaaagaatccacctgccaaagcaggagacacgggtttgatctctggtctgggaagaccccatctgtcacagagcaactaagccagtgcactacaactactaagcctgtgttccagagcccggaagccctgaccactagagcccatgcactctagagcctgtggtctgcaacaagaggagccactgtaatgagaagcccctgtgccacaacataagtagcccccgcttgccgcaactagagaaaagcccgcacagcaatgaagatcccgcacagccgaaaaaacaaacaaacaaaaagtgtgtattctttgtagctgctaagcttgggggtaattttttatgattcataaattagtacagtacgtatattcgaccaaggtctgttgggctcctaacactaacccttcacatatcgctgctctcaagaacactctgctctgactcaaacccaacagcttgtgcgggtgcccagtctacgaaccttgctgtactaagacactcgctgaaaccaagccttaactccagtctttggaatgtctgtgtgttacatgtggaagtagtaaaagaagaggaggggaatgttcctacacattattttccataaaacactggtcagattttctgaatcttgtggtttaaagtatccttccctctcaagaaaaaacaagaaatttagtcactgcttcttaacctgctatataaatctccagctctcctcaatcaccctttttcagtatctttccacacaatacattttgtctttgagaatt

SEQ ID NO: 27039 - DNA, 1288 bp, Bovine  19866881873358
  misc_feature (1)..(1): n is a, c, g, or t
ncctagtgggtccccgcccctgtagcccatctctagacgcctgtgggctatgcagtgtgatgttaaagtgagctggtaccaggcccttttctggtaatatcaggaagcccgagactgtaattgactcccaggtacttgtaggtttttggctcccgggttgtacatcttcagtgaagaatgtggttccttcctgtttcctctagtcagccttgacttaactttataaaatcattatgtaataatggtaaaatgttaaattatggctttccaaatgtacctcagtgcctttgatgattttgggaccttactaaccgagaagaaaattttctagttacaagtatttggtatacagattgaaaagataaaatgattttttttttaagtgctttcacatgagccagtaatgttaaagttgttttacttggtttgaaagaaactcttggatataatcattggagcatcactcataaatattctctattttcaggtgtgtagcttggagtttgacagaaaagacataagtatgaataagttagtagctacatctctggaaggaaagtttcatgtttttgacatgagaacacagcatccaaccaaaggttttgcttctgtttcagaaaaggtaaagatgagggaaataaatacctttctatgaagaggagtgttcgtattaatagcttgctttagactaataaatagaatgagtcaccaagttccttccaggttttttgcatgaagggagctatttttaatatattcttgtaggatcttgataagttattctgtgtaaagaatactttcctaaagtttgtcagtttcgtatttcttgattatattaataattaaggcctttgttggtaatgactcttattttgtagtttaagagcaatcacaagaaaactagctggtttaagaaattagtcaacaataaatgggaaggaaatccaagaaagagagtatgtatgtatatgtgtggctgattcactttgtacagcagaaactaacacaacattgtaaagcaactatcagattttttttttttaattaagaagaaaaagaatttggttaacaaaacatagtcttgtgtttcctaataaatatacttgtgttaatacccaattatatatttttaggtatatgcgagtatcccaacccagggatcaaacccagtctcttgcattgcagacagattgtttaccatctgagccaccatggaagccctatatataccttaacataatactaattatatacttttcaaaaatgtacccatatatatgcatgtgtg

SEQ ID NO: 27040 - DNA, 819 bp, Bovine  19866880408395
  misc_feature (1)..(1): n is a, c, g, or t
ntgtttcctgatgactgatgtgatatattcttggctttctgagcaagaaaagtcatcagggtttcatttgttatgtttatgccaatagaaataaatctcagccgtggtggaggagatgttcacactacactcgctgtctggggaagcctgctggttgaatccctggcgggcgggcagaactgattcagggtaagatacactttggccttattgatcacaaagcttcttcattacttctgtggggctgcaaatcaatagacaggcccatagaaacataatagattttttttttttttttagaaaatcaattaaacagattattttttttttgcagagttgagtttgcatggccattgtctttggcacactgtctaacatgtttaatggggtttccttctaaggactgcctgatcatgaccaagtggcaaagccttgtttaaaaggtcaaatttgaaagaaaaagaggatggtctggaagaagcagaaggcaccctgttcagccctgcaaccttggatctgccgccttgctagaaagcccatgggtcacgtgagcagaatctgtcagcatgcctcctctccggctaaaaacaaggaaccgaaacttcttggaaagcccagattgatgtctgaatttccccattccgaaagcagaaggaagctcggtgggcataacagtgaaatacaatcgggctggggctaccaaggctagccagcgagctgtatactcatccttctctcccaaggacacagctggagactcagggacgctgagctcaggaggcagctgtggcctcagtcaactggtcacactcaattgaa

SEQ ID NO: 27041 - DNA, 1224 bp, Bovine  19866880469849
  misc_feature (1)..(1): n is a, c, g, or t
nctggtagcatttggatggatggaagggatattctacaaggagacagatgggcaagtcatgtttggggaccatttcggcaagcacctgaccatagcagctggagcccagtgtttttattgagtaagtgaaccctgagacctagctgtaagtggaggttgtatgttgactttgaagtttagaaggggctgtatgggtagcatctccattctttggctggttaggagcttttggtggttgttgatgggcatgccattgaaccaaatggtagatttgaaaattgcatcaagcaggtggttggaggggagattggaagcatgaaaaaccatggctgttgtggttgtctgtggaaggtgatgcgagcttagacaagcgtaatggtagggtcaaactgaaaaggtgttagaaagagtcagcaggacaaaacaataccaaatgattggtgtggggctgttggaaagaattctaagaggtcagacacagagggctcactgctcttcctgggatgtttgagagaggccttaaattaagtaaataaagaagctaatggtaaaactgtttgatttaatacataacagtgagtccttttaaaatgctgattggagaaagcacataatatagcagttttaggagagtttatcgtttgaggttctggtatagagatttgactcacaagcataaatcccagtatgtaatgagccatgtaataatagggttctgctgttaattatggtgagtactctcaacgaaatcgaattttcttagtaccacccccgaaaaaatatcctaactcagactttatataacagtcccagatacactgtaaactttgtagatatgggatattgaccgaaaaaagagagaaaacaaatcttcagtatttccagaaaatcttactcatcctcagtgcaccgtgttgtctgtgggagcctatagggatgggcagttaccttttcaggtctctgggcgccgccaaattctaaagattaatatgtgatatttcttatggacatttgaaccttaggtatagttcctggtttgcctttcacagataaggtgactatcattagatattagccattggaaaaatgagtgttataattaataggatcattttggccaatccacaacgtctggttagcatatattagatgtatttttctgttctcctctagggggactctggaagtcagatcgaattttagaaggatattgaaaattctttt

SEQ ID NO: 27042 - DNA, 4537 bp, Bovine  19866880562820
  misc_feature (1)..(1): n is a, c, g, or t
ncctgccttcactatgcacacatgtgcaccttggagatgtaactgtcctagaaaagatgccaaagaaatggaagatgccaaagagctggaagaatcacactctctgactttggacagtattattgatacaaagccacagtcatcagaacagtatggtactggcataaaaacagacacgcagatgaacggaacagatcataaagcccagatataaatccacacacttatggtcaattaatctacaacaaagaaggcaagaatatacaacagggtaaagacagtctgttcaataagtggtgctgggaacactggacagctacatatagaataatgaaattagaacattttcttatgccatatacaaaaacaactgaaaatagattaaagacctaaaagaccaggaaccataaaactcctagaggaaaacatgggcagaacactcttggatataaatcatagcaatattttttggatttggctcctaaaggaaataaagcaaaggcaaacaaatgagacctaattaaactttaaaactgtttcacagtaaaggaaatgatcaataaaatgaaaagataatgcactgtgtgggagaaaatatttgcaaatgatatgacatacaaggacagggagacctagcgtgccgcagtccatggggttgcaaagaatcaggcatgactgagcgaccgaacaacaagtgatgtataagggattaatatccaacatatataaacagctcataccgttcaacaatctgattacaaaatgggcagaagaactgaacagaaatgtttccaaagaggagatgcagatggccaacaggcagaggaatagatgctcaacatcactaattatcggggaaatgcaagtcaaaatcacaaggctatagcacctcacacgtgtcagaatggctatccgcaaaaggaataccacaaacgctggcgagggtgtgcagaaaagggaatccttacacactgttcatgggaacgtaaattggtgtagccagtgtagaaaacggtatggaggtttcttgaaaaattaaaaatagaactatcctatgacccagcaactctacttctggtatatatctgaaaaagccaaaaacactaacttgaaaagatgcatataccctaatgtccacagcagcattatttgcaattgttgagttgtggaagcaacctaagtatccatcaacagatgaatgaataaagaagatgtggtactcatacacacacacaagaatattactcaaccataaaaaaaaaaaaagagaaattttgccattggcagcaacacaggtgggcttggagggcatcacgctaagtgaaataagtcacataaagaaagacacacactgtacgagatcactaacatgcggaacctaaaaaatacagcaaactagtgaatacaacaaaaaagaagcagagtcacagatacagggaacaaaccagcagttaccagtgggtagagggaagcgtgcaggggcagtaaaggggtgggggattaacaggtacaaactgttatgtataaaataagccagaagaatatacggcacaatataggtaatatagccaatattttctaataactataaatggagtataatctttaaaaagtgtgaatcatatattatacacttacaacacataatactgtccatcacctatacttcagtgataaaacatggttataaacaatgaacagtagaaaaagatcctggggtcccagtggaccaagaccgtaacaatgatacattcaacgaacatttactgagcacgtattacatagtaacaaaaagaagacactgtataggcttgaggtcagtctgaatgaaaactatggtgccacacaggaagaagaagtttatttattcaaatgttcatcagccaaaacttccaggcagattcatggtaatcccttacaagtaaggaacccaatctggcacaggattctcgtgttgcgcatcacaaacctcttttaggagctgttaaaagataaggaatctctccctaaaataagcacacatgaagacaggcaataaattgtgaataaatttggacaatctgtggggttcatcaaagaaccccgtagctttcttcatgaaactaacttggtctaacgagaacttggaatttaatcattttatttctgaattgaacttctcaacatacaaagatattgtgggttccatggtcagaaaagggtgaggaagagtttttaaaaaaatgatcagggaatcctatggtggtccagtggttaggactcaagagcttccactgcagggaccctgggtttgatccctggttggggaactagatccccaaagctacgaggcacagccaaaaaatgagaaaaaaaaaaaagatgaaaaataacaataaaaaaaatcagggtagggggacttccctggtggtacagtggataagaattcacctgccaatgcaggggacacaagttcgatccctggtccgggaagatcccacatgctgcagagcaactaagcctgcacgcctgcagctactgagcctgtgctccgcaacaagagaaactgctgcaacgagaagcccttgcacccaccgcaactggagaacagcccccgcttgccacaactaaagaaagcctgagttcagcagccaaaactgcgaccccacgggctgcagcccgccaggctcctctgtccatggggattctccaggcaagaacaccggagtgggtagcctatcccttctccaggggatcttccccaacccaggggtcgaactggggtcttctgcattgcaggcggattctttaccagctgagctaccagggaagcccaaaagaaataaataaattaaaaaaaaaaattttttttttgatgatcaaaggcaggaaaagaggaaaagggcagaggctatgaagctggtctccatccctgagcccaaggagaaagctgtgagggatgggcagggacataagggctgtcattccctgcggggctttgaaacagaatcttttcccatttaccagattccgtttttcctcgtgtccccgtgaacctaccccagccactacaaactccccataaatgtcacaggggaacttcctgttcccttctaaagatggaaacactgaatacaaatgactgaattttgcaaatttgtgcaggcggggaatcaaggcatgcatttttaaagcgtacacggctcatctaattcaataagtagttccaaatcgaattacacttcacactttgtacagggcagaaagtgtctccccaaagcctgatgaggaaccaggaggccagaaatctgagagcctgccctctggcctgaaagccggcttagagatccagcacaaaggcgaaggcctctctgaagaaagacgggagtttacaaacgccaggagttgcatctctctccccattggatctttcccaagaggagactcaaaacaaggtcgcagctttagggtttctgtgcagggacagattgggtggaaagacttcccacgaccccgcgccctttgcaagacctgggaggggacagggtaggaacagcccctgctcccacccgactctattcattcaggggcccagggcgccccaaagtccggcggggggtgattccccgcttctactgcccgcccttgtctcttgccaaaccctttaaagcaaacgtcttcccttttgtccaggaaagaatctcaagaacctcttcgcttctgccaacacggtttcaattggcgtcggtcggtggagccagatttggacggcatccaaccgctcagcccgcaccccccacccccttctggaagaggccccctctgttctttcatttccagcctgcctcccgccccgctcctccagcagagttcctcacccgggttcagcagcctattgagacatcaatctttggtcagagcaggctccaacctgcaccacgtcctaggcgctttcctaaaacgcggtctgcagaactgagtgcctccgaatccgcatggcggaggaggccagggatgaggcctccgacttcctgtgtcaagggatttatctttcattctgtgttccgccgcccacactcgcctcgaagactcagggaatgtgcccccgagccgcctcccaccccagggaaccttccagcaggatagaccctgccccaaggcaaacccggaatccagcccgcccaccacgtccaagcggtcagccacagagagattccgttagttcttggcaagtgctcgcaaagttaaagagagaaagagaagaccttcccccacagatgggtggaaagtggccatttgtcacgggggtgggagtcccccggcccccctctcctatcagcaggactgtcagcagacgcacaccagagctccgtgctggggaggctgggggcgcccactccagcaactgatgagatcatgtaaaataacaaaaactagacagggtcctctggggtgcaagagagcggccccctgccaggagctaagtaggaaaagagctcccccgccccagagataccaagcaattctccagtcagatcatctgctcaggcttccgagg

SEQ ID NO: 27043 - DNA, 1169 bp, Bovine  19866880705218
  misc_feature (1)..(1): n is a, c, g, or t
naaaccgtttattaaaaattaacagctaagttaaggccccattagcaaagaggcttcccaatcgagaaaagctgacacgctttatcttgcttggaaatgttgttatttgttgttgtcattacctccaacttttaaaagggaacagtaatttattgtttgttgcctgcatgcagctggcagaacccaccactaaggaataaaaagatcttcagctaagctcacacttagggcagtttaatgaggtcttattcttcaaaattaaccttcaaacccattacattccaggaaactaaaaatttacactagttttccatttttaatgggcttacaataaaaggaaatatttacagctcgaaataaaatagatggcactttaagttcatttttcaagtcatcccaaatagacataaaaggcaaagaaagacacataaaccatgtaaagagaaacttaaaagacataacaataataaaaaaccaaaatgcccatctccatgtaacagacagtaagcaaggggacggtctggagccacactcaggcagggctctcagctctgcatgtggacaagtagtaggaagcagccatcgcttccaagccatgacacccagggactgagccactgggtccccaatatgcccagcatccctccatgagatgggttctctgagccaacaggaaatgccttcattgttctggagtgggaccaccaggaggccgagtggaaacagctggaaaaccagggaaggcagtggaatgggggacgattgaagagaaagaaacatctactcaagatgagtctagggacctacccagtggtctagtggttaagaatccaccttgcaatgcaggagataggggttcagtccccagtcagggaactaagattccacatgttgcagagtaactcagcccatgagccacgactactgagcctgcacactccagagcctctgtgccatgacaaaagatcccacgtgatgcaactgagacccgtgcagccaaataaaatacatactataagtaagacgtctgaaaacctgagccccaaaacgcaggcacagttaatgctaatagagacactcaagaaaaatcaaccatggagatgtgaaatcacagcatgatttccataagaaatgcaaataatagaagaatctgaaaatgatatgtagga

SEQ ID NO: 27044 - DNA, 2261 bp, Bovine  19866880763550
  misc_feature (1)..(1): n is a, c, g, or t
ntaagagggacacagacgctcctcaagctagggactcagtcaaggtgtttcagagactctcataatatgaccttagagagtctgtctgaggaagagagccggtgggcactggaaggcaggagcagcaggatggtctttgctggggcactgctgctgcgccaggcctgtcctttgctctgcttgtctcacacacacacacacacacacacacacatactactgcacacacacacactaatgcacgcacacaccctacttccaaggaagcatctttcaagaaaggatgtttggtcttcatcctctcctcctgctcaccttgggtagagaatacatcatcatgatggaaagcagcaagacagaaggaacctatgtccctaatgatgagaccagaggccacctgaatccacattcaggtggtcttgggggagtcggcagttgacagtgatcagggaagtgtcattcccaccctggactttcctggacttgattcatgtgcaagggacacagacttctatcttgtcaaggcacttttactttgggcttttggtcaatggcagccaaacctgatcccgatatacttttcctccgctcacctttatgcctcacccagcgtctgacacataataagaactcccgtgcacgtgtgttaaaatgactggatctctctgcttaactgcagcatggtgttcagtgctgtttcttatagattttggatatctgcccaatggaactgattttaaaacaatcaaacacacccataccttatgcatctagagtgttgctcccttcccgagtctattcaccttgggaatctgttcatgtatcttgctgatactgcttaaagatactgttcatgtatcttttttcttttttaaaccaccttctgtcactgtacatgcacaaggtttcactggagacttatccctggttttgctgttgggattgtgtgacccaaaactggacactgagccctctggatcaaaagactggttcagggatgggcatgtgatctaggtcaggcttgtgggatctagcccaaccagggattgaacctgtgtcccttgctttagcaggtggattcttaaccactgggccaccagggaagtccacgtgaggatttctacaatttggatttttcaagaaagtaattttatatgtgaaaaaaattttcatttaagtataaatatacatacaaagcacacaaattataagtgtatgacttagtaaattcctcagtctcttttgatctatagtgtggcctttatcctgtttttttttccattgtactttgataaacaatgtatttgtcatgcagcatttcccatgatgaatgcttggctgataatttcccccttggtgtcatttaacatgttgctctgttctctatttcctgtaaatttgtggttgcatgtagagccttatcagatgaggtcaattctggggtgagaccatttcataagtgctgttgtttactgggttgtctctttctcccagcatcttttaaggtggatgtgatttttacaaacaggcaagagccagttcctagatgaacctagtaagcagggtaggtgatcatgttggaaaatgatggtttgagttgaaaaacaaggtgtgatcaagcaatgaatgattttcttgtgtgactggtaaactggccttgaagggaactctaaaacagttccaaaaatgtgctctgccctggcagcgtcaaatgtacagccacccagggtgactaatgggaacggaacaacagtgacattgatggagaaactgtatgttggctataaaaccagccttgttgtgtgggtggacgtgcgtgctgtccctctctagtcattagctcttcttaagaacccccaaaggtctcagtgtgtatcacacttgtgcttcgaagttggagctctcgctgaaacgccagatccgcttggcttagttccattgcacagcctggacgtgttgacaagatgctgctgggtcccacccagcccctccccagtcctggcgtgtgtctcatctgcattactcggcgagaatgtggtcagggcactgcagatgtcaacaaaaaacgaggaagctcggagaggctcctgcgccgatcagaccaagggcagggggcctagcccagggccgtgggcgccggcaaagccggaaggccccagctgttctgatgcctcgcagacttcccagtttcaagtcagcggaactcccgcgggtctcggctcaccgccggtttttttttttttgtttgtttcggccacctc

SEQ ID NO: 27045 - DNA, 1832 bp, Bovine  19866880769219
  misc_feature (1)..(1): n is a, c, g, or t
ntaggcaccttataagtcactgctgccttccaggagtctggtgcctagcagaatgctgggcacacagtcgatcctctgtgatggagccgagggctcagcctggccaccctctcttccttctgtgccccctccttggtaccctgacccttcccctcatcaaagcagcatcatatgtgagttccgtgtcctggggggccggggtggcagagaagagaggcgtcaggagaaatgtgccctcagtggtgggggtgaaggggctcattagggatgtgactaggtctcagattgcccacctggttcaaggtcaggaggcactcgtgtggcccacccacccaatttaaccctttcatacttgtccaacaccccgggcttctcctcgggggcatcagagcccgtgcccccgtctgacactggggtggagtgaatcgcagtctgatgcaccttcataggacacaggatacagaggccaggctgtgccccaccaggctctgtcttcccccagacaaagcccagcctctaggctgtaccagccggcagatggcaagacaccccgagtcagtgtccaggggcatttgtcacattggagaatgatgaagaggaggcaggtgtctgacctgggatgacaaaaacgcagagcagtgaagcctcccccccaccccccgccaagtgggggaggggacagagacctagtgtcatttttcagcatgattttcctccatttaatgttcccatagattacagagcctgatcatccaatggcccatagagatgctttatggtgttagggtgtaaggttttaggagacgaaagaattaactgcgaactttctgtcctacaaagacccccgttgtctgtagaataccaagttgattttgttttgcttttttaaagatgtgtactcaaggtgagaaagataaataggatttacgaacctccttctgcatgtaaaaaagatggaaaggaacttcttctctagaaacttccttttggcttggaagaaagcagggatgcatcttctcacacccctcaggcagaggtttgtggcttccctggtcactcagacagtaaagaatctgcctgcagtgcaggagacctgggttcagttcctgggtcaggaagatcccctggagaagcaaacggctacccactccagttttctttttttttaactttacactttttattttgcactggggtggcgatgattaaccaggttgtggtagtttctggtgagcagcgcagggactcggccacacatacacatgtatccattctcctccaaatcccctctcatccaggctcccactccagggttcttgcctagagaattccacggacagaggagcctggtgggcgacactccatggcgtcacaaagagtggggcatgactgagcaactgtttcactttcacttttcactggaacaaccgagaaattgatgctacatattgtatttacaacctttggctcttctgctgcagttccctgtcctggctcagtgatcagtctgaggaaagagacagaaagtgctctctcttcgacagatcctgttctgggccacaagtgcccccagagtccagtttgtagttcttgacgctatgagtaaaaatcattgacaaaccactcttctttgggaacgagggtaaaaaagagaaaccaatatcacacctacggaggggccggggagcacatgaaaagatggtcaacaccattgatcagcagggaaatgcacgtcaaaaccacctcacacccgttaggatggccagagtcaagacagatgataacaagtgttgatcacaatgtgagaaactgaagcccttgcctgttgctgt

SEQ ID NO: 27046 - DNA, 858 bp, Bovine  19866880813887
  misc_feature (1)..(1): n is a, c, g, or t
ntgaaggaatgtggtctgtagaggcccaccctcaaaaaacctggcctcccaaggtgctgtccagctgcagaggtgctgaattgagagcaggccccccggaatgtcttggagagcagactctgacgtcactgacatcagttagttgctctccacccttgccccaaccactctctttttccttgccagtctttttacctgatctcagcccctcctcctcctctgtggaatatctgttgctcacccctgccacagtcctgatcagttacccaggaaaaaaaatgcgttcgtccagaaagtcaaatctccaaatcacccagataatcgatagtcgactactgtgttacagagcaggggatcgatttcctgccagccattgctaggcaacaggaagctttcacagcatcctcatgcaatgaagggaactgtgaatggtggaacagcactatggggttagttctcaagggtcagtggcatgtgaagccaaaaaatcaaatcacggggtgaagagggacctgctgcttttaagactttagtgatgcttcatctgccactgtgacttgcagcaaaccctagttgaaaaatccttttcactgtagaaagtttcaaatgattacacagagggatactataatgaatctccatggagtcatcacctagcttcaataattaacaacccttggtaaattcagttttcccctgggacttccctggcagtccagtggttagaactccattctataccactgcagggggcatgggttcaatccttggttggagaactaagatcctgcatgctgcctggcagggccaaaaaaaaagagagagagaagagaaaaagatcagcttcagtctatggtg

SEQ ID NO: 27047 - DNA, 2708 bp, Bovine  19866880830145
  misc_feature (1)..(1): n is a, c, g, or t
ntgactgggggagaggggaggaggggcctggtggcagggcgcggggtggggtggggtggtggggagatagacctggaaggatagacccaggccaggtgggagaagcacccagtgaccttgaccttcatcctggaggtcctggttctcaagactggctgcacagaagcaggcgcccagagcaactagaaccaagtgagagagaagccagacccaccaggggcctggtcactgatggtcctgcaaggctatcccaaggatggggccgtatgtctgaggttgcaaccagagtctgtctggtcccaacacctgtgcccttgggtggcagagggggaggccggaaggggatagagactggatgaagggggagacttcaccaggtggccggatggtcctgagagacaccaaagtttgctctcaaacctttgcagcgatgagaatcaggagaaaggccatggttctggggacacttgccgaatcagaaaatagatcatgcctgggcagtcagggtggaagatccacgtgattgctgtgaggctctggaaagccacgcacctgcctgctgcactgttaagagatgaagacccacctacaaagagccagcagggtccccacgaagcatcctagaggtcttggtgaccacctagccatcactggaggccaggagaagagagacagactcaagagcaaagactggggccggggatgaaggggagttttgttaaagctggggtttgggaagaagaccccagctcgggggagtggggagcccccagacccttatgaaggctgtcagggatataagcaggtctgggggtgttggggactggaatctcctgtccgttgtaatgttcgccataaagtagagactgcggtcctgtccctccaagaaacagaacttgacctctcagggttggggccccctcttcttaggggaataagacagtgaatgctgagcaggaacaaagggtgaggaggagactcacctcccaggctgtgggaatcccggctggagacaggagcatctctgtttaaacccttactggaatgtctcactctgcccatttccatttcatattttagctaaaaaataatgacaaagcctgcagagcagcctccctctcctcggtaattaccaaattaacacattctaacagacgagcccccagcagcaggctgtgattaatgcgcgaggacaattagcagcagagcctgccccttgcgctcacctccttaaacagcgagaccgcgtgcggggtctctggggtaagccttccgccacccgcccgccctcccgctccctttaatgggctctggggccgggcttcacgtgccaggctgtgtccgtcccacccttggggggtgggggctgaccccacgggtcagggaggcggcttccccacccaggcaggaagccgggaaagcgagccccaaattaatttattcagccaattcattaggcaggcgtgggttgtgtgctgagtacgtgcccagctcagggctcaggcggaggcaagataagtgtaggaaggggctgccgccctccaggagcttgctgttgggaagacgattaaggaaaaacgattaagtggtcagtgtggggcagagcccgaggtcctgaggaagcctagggaagagcatgccctggttttcatggatagtgatggggacacagatggtgggagatgtatccccactgccgtcagcatcagtgatgggaaaccgagctgaaagctagaggatgacccgtcttgaaacagggggagcgtatgttcattctgacataagagcaggaaagggcttcccaggtggcgctagtgataaagaatccgtctgtgatgcaggagcctcaagagatgcagcttccatccctggcttgggaagataccctggaagaggaaacggcaacccactccagtattcttgcctggaaagtcccatggaaagaggagcctggtgggctacagtccatagagtcgcaaagagtcgtaatgactaaagcaacttagcaggcatgcaagggcagtaaaagaaggagtctggcctgcatccagcactgtctccttagtgatggagcataactgataatggggagagtgagaaaggcatgccttggtgggagccagctccaacggagggacatatctgggatacttagcccaggttagagagcaggaaggaagttgatgctgaatctgggcaagaaagtgcctatgctggtctcagggccgggaagaaggaagggaggagctcaagggaaaactccaaggcagaatcacgaggctggacacctttttgaagtgaggctcagagaaaggccggtgttggggtgtgagctgaatcgccaggagaagattcaccagggagaaagactgggcaggggtttggggtcagagctgctccatggggggcactgatcacgggaaaggtaacacgctccagaagctgaggatgaggaaagacaggggtgggcccccggggaggtccagagattcaggacctgcccactctcagaccgagacatcctcaggaggaagctcccctcttgactctcgtggaaacacaccttgacggaggaggagtccaaattccaggcactcaggtgctcagtctcctaagtgactgagttttaatggcagactgaaataacaggacaccagctccatccttacttaacacagttacattcaggaagctttcctgacctccag

SEQ ID NO: 27048 - DNA, 689 bp, Bovine  19866880891862
  misc_feature (1)..(1): n is a, c, g, or t
ncttccttctccagacagaaaagccaggctgtgggcaggctcaggggaccctacctgcacgctctccccttctttgcagatcagaggcgactccacccatgctgtagtcccggcccagctgccagactctgtctatcagctgtacgttgttccctcctggggaagtgatgctgtgcgcccccagggagtccttcttgggtggctgtggtgaccgcttggagtgatagatgttaaagacaatgtcccctttgcacacgtcaaaatcccacgtgatcaccgatgaggcgtccacgatctgaatgagaatctggaaggagaggttggctgcatcagcctgccacagtgaacatgagcctgtgagccagcgtcgcggcagcacgtccccaccgccccccagctctcctctcagctgggggaggggggtcccagccgcaggcctcctcggccagactcggcattcgatcaagttccgggctccgttagctccccctgcagcctgtgtgtcctgaacatgcaatttagatgccattctaggctaccgggtcctggctgtaaaaaaggccttgatacaaaacagaaataacgctcaacagcacaaaagtggttccgagggttgctctgggctgaggggcacagggaaggtcccagagtaaacagcccgggagggacaagaggaggggaggcgagca

SEQ ID NO: 27049 - DNA, 1003 bp, Bovine  19866880934343
  misc_feature (1)..(1): n is a, c, g, or t
naagctgcagtggcaatatcagtcttcagggagatggggtgccgtgaggggcacgggtcccaggaaggcggtgggaggctgtgcactcttggggtctgtgactccttccggtaaagaggacccctcccccatccacacccctccttcccatggctgcccttcagtccttggctgggagcacgggggtttcctggtggctttctcttgtctgtagtgcagccttgccttcgagggtgaattccatccctgtctcttaagcatgcagacaagatttatgctgaatcaaggaggggccaccgcagaggcttgggggtctccaagcaataactcctaattcggagattcatccacgagagcagagacaagggcacctcccgttaggacttgtcagcgagcagaggatccagtctgcaggctccttcctcgtccacttggcgtactcctaattatgacttgggctgctacaaacagaaatggactaaacccgttaaatctattttttccccttggtgggagggagcagggattttgcaaagatagagattttaaattaagctttaaaaccgtgcctgagcaagatttaatactgacaattagcctggacaaacagctaatcgcactggtggggtaatttatataagctccacgcaaccatgaggcaggcagcacgttacactgcaaattaaggcaataaaagaggctgccgcccggtggggcggggccaccttgggcttcctgcgcccgccttgctggatggagctgcgctgagtctctggtcttggaaagggaaatctcgctgcttccctctgggggacatgacacagtaaacagaatccagcatttctggagggtttaagggctcctctgcctttggggagctgcgtgtgctaagctattgctcatttactctgtgcgtcagtgtcctcatctgtaaaatggggagacacttgcccagcacggttccttggggagaggcagggtagaagcatctctctcggttccc

SEQ ID NO: 27050 - DNA, 928 bp, Bovine  19866880934466
  misc_feature (1)..(1): n is a, c, g, or t
ncctgcaggctgccctgctcagggctctggaaactttcaaaacaaagctgactgcattcactcctggtcggtcatagtttagaagtgggcttgtgcagtaagtgatgaatgaatgaatgagtctctctggcggactgcaggggaggagctggcatgtctgactctagcaatctgggtgcgtgtcagacggtggaggctgcaggcaggtgtccgggtccagcctgggcccgtcctgggctgcaggttcttctccagcgtgtgttgttgtccgcggggaaggcttctgctgggcttgccctggtcgcccagacagcagaccccagggcaccatgaccttggcagcagtaggacagccacctgcctccccgtcttagagacctctcgagtttggtcggcttagcacctcagcaaatctgctcgagttgggacttgcctgccttgagcctccccagggatcaagcgctgggccgaggggcatgtgcagggaggcaggaggctgacttcacccggagctctgttctggctccctcctggggggcagggagggaggagaacagctcgccccccactctgcccagtccagcctggcttacctcgtgttgcagacccaggacagggaaaccccagttcccaacaaggtagacgcgggttgtaccggagccggcgtgtgcctgacccgtgccagcacctgttcatcctgcagacagtcctggcagccggcaccctggagcccagcccaggttttggagttcgatggacttcactttgttctgggctcaattcctcatagctgtgtagcctcagacaagtgacgcaaccccactgagacttggttatctcatctgcaaaatggggtaataagggtcgggtgggaaaatgtgcatcaagggtttgacccagtggctggtccgcatccagacggtggaag

SEQ ID NO: 27051 - DNA, 957 bp, Bovine  19866881092674
  misc_feature (1)..(1): n is a, c, g, or t
ntctcctgcattgcaggcagacgctttacctttgagctaccagggaagcccaatatttagctacctgatgcaaagagccgactcactggaaaggaccctgatcctgggaaagacggggggcaggaggaaaagggggcaacagtggatgagatggttggatggcatcactgactcaacagacatgagattgagcaagctccgggagatagtgaaggacagtgaagcctggcatgccgcggtccatggggtcacaaacatggggtcacagagagtcagacagaacttagtggctgaaaaatgaatgacgaatcagggagtttttttctctccccttgaagagctggttgttaaacatgaaccagtacacagtgcagggagcaccctggggaggtgcttttccagttagcatcatggccgctttgagaggctgccctgggctcttgttcctcttcttcggcatctgcacagggtctgccttcctcaggctgccacacccttcaaggtcagggctgatctgtgcacacagtctgcactgctttaacttggcttgagatgactcagctctgagccaacaccagaacttatttaaacaataaatacttgcaagctgaataaaacaagctccccacgcagagctatataacgtgacttctttatgcagtgagtggggcagagcctgctcagcatcacccgttacaaagagtggccccgaggagtgttcacttgttcctcttcttgtgcccaccttcctggaagtcggaggctccaggggttcctggaagcatgagtgtttggggccgggtgtcccatgcttagaacacttccaatgggagtcaattactcctgagttaggcccagcggtacagagcaatgctgcggactcttcattgacacagttgcagagaagattcaggatatacatttgaacaaggattaaccattcccagaacaagtagc

SEQ ID NO: 27052 - DNA, 753 bp, Bovine  19866881112070
  misc_feature (1)..(1): n is a, c, g, or t
natgaggaagcgagaagggaacgaaccttgcaggcaagtcccacgtgaatgagtgaggctgcaggacaggcctcaaatccagggctgcctcttctgcttctgagccaatgtttccaattattgctgtcctaaccctcactgcctcccctgcatggacgccatattttgaaaagtgttgccaacaaaattgaataaattaaggaagtggaaatgtgttccccaattcttattaatcaaagacatatgtacctgccaattacagccctcgctccctgtccagcccccaggcagaagccaagacttgagagttttgactttgcgggggaagtttgcctctggtcattcgacatccaaggagtctgtgcacctactaagtgccaggcactgtcagaggtgcttgggatacgtcaggaaacaaagccaagatccctcatttatgttacagtggatggaggggagacagcatggagaaatatgataaatatgcatatgtcggtggtgttagaaaatgataaagggtctagaggcatgttgagcgaagtaagggggggctcctgggagtggggagggagcacgtttaaaataagggttcaggacagatctgcaaagacccctggacctggaggcggggcagagatgggagagagctctgattggccagcagctagccggagatgtggcttgctaaggcagtgtggacagagcatgggttagtagaaagacccgggtctgaattccagctttgccactcat

SEQ ID NO: 27053 - DNA, 2113 bp, Bovine  19866881153739
  misc_feature (1)..(1): n is a, c, g, or t
nttcccccttagtaactgtatgtttattttctacatgtgtgactcaatttctcttttgtaaataggttcatttgtactattttaaaaacagacttttgaattgtaagttggaattaaaaaaaaattaacttgctttaatttgtttacattagaaaatatgaagcatgtgactgtgtttttccaataccttacaatatataatccctatcaatagatccaccaaaccctaggcagtttcaaaatctgcatatgagaaaacagactttactcacatgagtaatcattttgctaaaagaaagactgctagatttaaaaaaaaatcttgttcatcttgatccctgattttagcctggtttcaggagcaccaaagcagaaatttgctgtagttactataactttatcaaccattgatgaatattcttaatgctatgggatctgagccaatcagaagaatgttatacctgacagtgagatagataggatctttatgtaaagtgtgattaaggatatcattttgcagaattaattgtatgaaccctgggcaaccccatgttcccttagctgaaattattaattacaattatagagaattctcagtctaaaggggcttccctgatggctcagcaggtaaagaatatgcctgcaatcctggagccacaagagacttaaatttgatccttgagttggaaagatcccctggaggagggaaatggcaacccactctagtattcttgcctagagaatcctatggccagaggagcctggcaggctacagtccatggggtggcaaagagtcggacgtgattaagtgactgagcgcgtatgcacacactacgcaactaaagaaaccctgcttgcttgcagcaaggaagacccaacgaacaaacaagcttttttaaaaaaacaaagccactttgaggagcaccatgcagtcaggcccatgacaccccccagattccagggcagtgatgacacaacctgctagtcagatatccacgtgagaatttgttttctccgcccacagacgctacaagtgcaacagctgcctggagggacttgagcgtctttggtgttcagaggagccacggcttctaagatccccgccagcccgctgctcaaagatgccacgactaatcatcgccatgcccttagtattcactggcccctcgtgggggctgcatgaggacctgctggtccatgcgccgtatgtaaaacacttggaaggaacaaataatccccacgcaaacagcaaaaggagaggcaattttcatcagccgagacaccataaatcttcatatgttttatgaatctcacttacatttcttgtccgacttgtgcataaaacttctccagatttatacagccaactgcataagtcattcccttccccaacgggctctatatcttgatgaccttttagaaaccaatgactgcttttctgttgttatccataattggaaaagcactggagataagaaaatttatggcaatgaatgatctacctgagcaaagctataaagaatgctggatatctaaaagaggggcggaggggacagcccactctccctgtttatcaagtgttatctccaccagccagggtcctctgcaggcacagcacccacagcggaccctggaaactcggtggggctcttggaaggctggtcaagtcactgctgcttgacacagtggtccagttctgctttctgtaagaggaggtcaaaagacacagtccccctgccccccgccatccaatttcactcccatttccatgttgatatagaccgtgattcaatggcagtacaagacaggcaaaaacgggcagcagacctaatcagaccgttctccagagaagacctgcagactgtctacaggcacatgaaatgaaaagatgctcaatatcgctaattattagactattcaaaactacaatagggtatcatgtcccaacagtcagaacggccatcatcaaaaagcctgtaagtaacaaacgctggagaagatgtggagaacaggaaactcttgtgcgttgttggtgagaatgccacctggtgcagccactagggagaacggtatggagggtccttaagaaactaaaaacggaactaccagcaat

SEQ ID NO: 27054 - DNA, 1180 bp, Bovine  19866881229307
  misc_feature (1)..(1): n is a, c, g, or t
nagatgctgcctgacctcagggctgacgtgcccttggaaagcccactggatgctgccctggggaccagtatggagccctacaacccaacgctcctgacccccccaccagcttagccgagcaggagtgaacgactccccagaaccccatcaatgactagcccaggctcctctgtccagagacccgtgtcagaagaatcagcacacttcctttagccactgggcacagccgggcctttgtgtgttggggtcaatcctggctcctaattggcagtgtagacaatgggcctctgtgtctgttcccagaagacagcggcattctggggaaatgacacgcgtttcaatgtacaaaaaaaaaaaaaagaaaaaggagcagagctttatgtcccagcaaaaaaattctttggagactcctgtacttatcactaaaagaccttattatatgtcatccaaatggctgcaacagcaagctcttcggggatttcgggtgtggggccaaatgtgcagtgatgggcagccggcaagactgtattagacacagtggaagagtcttacctgccacagtacctgccatggagaacctctaccccaggtccaactcaagccaaagacggcagccatcagagaggggaggaagacagacagaagagaccaagagggagagggagcttctttcccacaaatggtccagaggacttgggaggcatgacgtgtgggctcccgccccacggggtccttgcaagaggagatatgaaggcacctgtggctaggccgttggcataggtagcagcagcttccccagctgtttgcagcagaaacttagaggcgggagtctccgggtgccgcctgggactcagcagccgttgtccctttgtgtccaactctggcagctggtgaggttgggagaggggaggatggcagatccagtagccatgccttgtgcgtcactgcatcagtcagtgttctgagaggcagagaatccgtgggagaagctgggggtgggggggcggggaagggaaaagagatttattttaaggatccgagtcttagttgtggcatgcaggatccttttttttttttttttactgaagcacgcaggatctcattccctgacccctgaccagggattgaacctggggtgcctgcattgggagcacagagtctcagccatggaagggaagtt

SEQ ID NO: 27055 - DNA, 789 bp, Bovine  19866881358068
  misc_feature (1)..(1): n is a, c, g, or t
ntggtgtggaacagaggggactgcgagagtcatcggcctggtgacaaatcttggcaggttctttgtgaacagtgtgtgtcaagagtcacacacgtgccaacagtgagagacccagctttcaagcctgcaggatccttacgaggctacagggcatccccggtcccccaacacacacacacacacacacacaatacacacaagctcgttggttcttcccacggggctatctaaggagcaggcccttgctggctttgtggccgaatgaaaaaatgttataaaggcaagcatcccgaccgtgtgcaatgtcaggctccggcctgagcagctgacacgtgttgccccactcgacccttctggtgactgtcatcatctctgttttgctgatgaggaagatggagctgagagaagaaggctgtccaaggccatccaggtggtaaagggcaaagactctatttcagttgctctaacccagaaccttagtccggaacccaccttcttgcccacaacagggtgctgcctggtaggaggacagatggatgagggcttgcaccgtgagtgggtgggcctcctctccttccagggccttgctcatggccacttgggctcgcataagaaggtactggtaaacagactctagctccaagcagagacagacttccatgaaaggcagtttgttggtccaaaataattgcctcctatcaggttgtgttaaaactggggagtaataagggctccgctacctcaagatttatggtacccgacacgctcgcctctccgccacaacacatt

SEQ ID NO: 27056 - DNA, 1364 bp, Bovine  19866881461538
  misc_feature (1)..(1): n is a, c, g, or t
ntgcgaagggaacccatcagcaaaaatgaaagccaggtaagagctttgccatgcacggtttccgaaagtgttgtaggtttcccaaatccaccagtgttgtgctctgattcctgggcagaccgtgagaagggatgggatgtactgagggttccgccccagcgggggaaccaacagcatgaccttggtaatggagagacctgtgtgctttgggactagttactgaacttctctgagcatcggtttactcatctgtgtgtttaccccaaagtgttgtgagcatcggaaattgccctgggcatttggctggaaggaatgaaaagcttgaaaggggtacctctaccaacaagaaccatgatataaaggttttcttttttttataacctgctttgaaggagcccaaaatcctgccatgcgtattgctgacatccgtgaccttccattgccacacagttcacagcctgccgggccatgttcaacaccaaagaccaaacatgccaggccctctcagggtgtgtccaggggtatgggaaggatgccccttgcttttctactgatttatttgcccagagtctgcactgggctcagaatgcccccccaccctttctctcatgctattccatcctccataaattaacattttctctccttttgtctgccccaaaactgaacaaacttcaaaaccagtatatatttcatctgcgcagtgaagtcttctttgctgcccaccatccagggaggtggatggcatttctaggcctccatgtcctccccacttgctgaaagtgtgcattataactgtgagagcaagaatgcaatttctgtgaagacaggggccgtggccaagccatcattctcaccccaacacccagcaccatcctgacacatgagccaagcttggtaaatatttgtgacatccacatatacatgcatggatggacggaggattggatgggtggatgggtggatgaaggatggatagaagatggatagatgggtatgcgactgcaccctccagagagagttagttcctagctttagcagcccagtgtcagcaaatgggagtaggtcatcccagctcaaggaggcccaagaacatttgggagcatctccctccccatgcactgttctccactcccctggagaccttggaaactaacttgacaacaacccagagggagcttgtgtcttcaggctgcagcttttacgatccttctcccatcatcagagcctgcaaataaaatagtagctatgccttgcaacctcagaggatcaaaggcacctagacaaaagaaaaatcaaattaccttgaaaggcaacaggccctggaagaaacaggctttcagaactaaagcaggaagacagga

SEQ ID NO: 27057 - DNA, 1502 bp, Bovine  19866881529095
  misc_feature (1)..(1): n is a, c, g, or t
ncgctcttggattcccccttgctctgcacagggagctgggggccttcaggaatacagcgccagctcccggctccagtcaggatgggatggatggctgagcgcgagggctgttagtggtggaatttggccccgtctgggccgtctctctcccttgtctagatttccttccacgctgacctggaagaactcccaaagcaacaggccagcccaggctgtttgcaccagtaaaccctgcagcagtccccagggcagagagtagctggatcgtatttatttaggaacggccgaaacttgaggcaccataaaaagtggagagaagattccggagaggaatgcggccggccccaggcccagaattcatcgtcttgctctgggaggctgcaggcggccagactggggccggccctggagggtctcggccggctgcccgctctgctggcaggtacagtagccatgactgcaggacggtcagtgggagggggtcggagggatggagcttctttatttttaactaaggaaagcgcacttcagtggttgagtcggaggatgagcaggaaatgaagggaaaagtctgtttttaaagtgagcggttggtatcccccactttgttggtgtttagtcgcttagtcgtgtccaacccttttgcgaccccatggattgcagcccaccaggattctctgtccctgggatctcccaggcaagaatactagagtgggttgccatttccttctctagggcacttcccgacccagggatcgaacccgcgtctcctgcactggcaggccgtttctttgccactgaggcagcagggaagccctgcgtctcccataggtaggaggcaattatggaggattctcgaagaaggtacctgcttgaggggtgggagaggtgagaggtggcaggaaatctgagcccagagcctcagagagtgtcctttcagctagaatcctctcctcccacctcctcacaggcccctccccagaatgggccccaggaacaagaatgtgcccgtcttgtggacccccttcctgaggcccctgctgcccgtgtcagagttacctggagcgcctgcccccttttcacggctgggtcagcccaggcctcctggactgtgttgggagttcagggctcattgggatcgcctcttactcctgtgtcccctccagctgggtgcgggggcttcgtggaaggggacttagtgctgtcttcacagataaaacaggcctcactcttcctctttacctgccctgggcccctctctaatgatggtgacatcaaaaagaaggtggcagggagtatgcaggtcacaggggcaggtctgtggaggtcaagggtagagatactgcctttagaactgtctggaaggggctgctgggcaaccccatccgggcaggcacaggtggctgggaacagggactcgttgactggcataggggaggtccccaaagttgtggcctggggttggggagggcgccctccctccccgggacagcaggcatcaa

SEQ ID NO: 27058 - DNA, 1710 bp, Bovine  19866881568455
  misc_feature (1)..(1): n is a, c, g, or t
nagcctatagagggtgttggggaatttccgttactattgctgtacaagaaactaccccaaaactcggcgacataaaacaataactgcaggacttccctgcagttgtggagttgtggagaatctgcctgccaatacaagagacaccagttcgatccctggttcaggaggattccacatgccttggggcaactgaaccctcgagccacaactcctgaagcccgagccctagaggctgtgctctgcaacaagagaagccctctcaccgcaacttgagggtaacgctgcttgctgcaactaaagaaagcctgtgcacagcaacgaagacccagtgcagccagaaaaaaaattaaattaaaaactgcattatgctctcaaacgctttgggtcaggattcagacaggaaccagcaggaatggcttttctctgttccacaacgcctgggaatcaatcggctgggaaggtttgctgggggctgagatccgcttgggggtgagtgcacacatacccccttgggtggatgcccggctgtcggctgggacttcccctctgtggcctccatgtgttgcccgcactctctcacaccatggcagcctcgaggaggtcggcctgtttccctggctgctcaggactgccaggacgagtgatccagtgaccaataaggaagacggaggccttttctgacccagcctcagaagccatgcagtgttgattctgcgtgttagttcaagtgagtcacaagcctgctccaaaatttaccattgttggaggggaagagttttttgattccacacgagactccaaggaatctggactggcttccttctccctccccgcctccacaaacctcaaagtagagaaggaagattgttcccatcactcagaagccagtcgactctcgctgattccttggacctgagtacttaccagctgaaaagatctttccttccttccttctttcattccttcaagacatgtttcctgagcccatgttaaataccaggtcctgttgtcagcagggagattcaacagggactagcaggtggatccctgctctcattgtgttaaaatcccagcaagaaaaagcaggcacagagactaacaaataaataaacaagaccatttcgaacagcaagaagggcatgagaaaaattaagtcagataaaatgaggggccaggtagagtccttgaagttgggtggtcagggcagattcaactctaagtaccagtgtcagtccaggaggacccctagaccctgaggaggaatttgtttttgtttttttttttttctaaaagggatgataagtcactgaggattttaagtcaggagcgaaacccctttgctgggtgctggagctgggggggggtggggtgggtacactcagccccagatccactgagagggtccacgcgtgtgtacacgtgggtgtttgcagagtgaacggtgtaattactgcagctctgtgccctggcttccattaataatgcagtgaatttcagcagcagattaaattctataaaggagtaaatggcccaggaaagtgaagcgaggcccatgctggaggacggtcagtacattatagagctttattagatagaagcccacagcagcgggcagctgagctcttaggaaggtacgcatatgagaaacgcagcgacagcgtcagtcagcttctcagagtcactcggaagagctgggcttgtgccgaagcg

SEQ ID NO: 27059 - DNA, 3846 bp, Bovine  19866880347826
  misc_feature (1)..(1): n is a, c, g, or t
ntctcggagcttgtgcagggctggatccctgggcggcaggaagccaaggtgcctccaagctggtgcgggccacggttgtcctgaggctggggtccgtctgctggtgggcaggctgtgtcccaccgcggaaggctggggtccctctgctggcgggagaggctgggtctgcagctacagccgctcactgggaggctgggcttggcctggggactccaggctaacaagctggagcggggattacagaatggtgcttgtggcaggacaggcccccagagggtctgatgccactgtctctgccccagggtgtgttccagctgacatctcctccagaagactgcaggatcggcggtaggtctgcacctttctcagcgttgctttgcccgagacctcaaagcacacacctcctgtaagagcggtgtgtctgtttcccacagcactctgggacgcctgaacgtgagctccactggcctgcaagcccaaaccttctgagggctcatcttcctcgtgcagacccctgctctgcaactgtgatttttctctgaaatgtgccctgcggctttgtctctcccacccatctcatcgtggttccttcttatatctttagttgtagaaactcttttctggtgaatgtgttaagtcactactcagtcatgtctgactctttgcaaccccacagactgtagcccgccaggctcctctgtccatgggattctccaggcaagagtactggagtaggttgccatgccctcccccaggggacttgtgtctcctgcatggcaggcagattctttaccatctgagccaccagggtaggttctggtcttggtcctcaattgctgttctgtaaatagccattatttcggcatgcccgcaaacccctactctgccatgtgggcaactctcatctcacagtgctaagtattttatgctttatgggccatacgacctttgttgtagtcactcacctctgcaccaaagcagccatggaccacacacacaaatgaggacggctgttgtctaatgaaagtttatccacaaaaacgggccgcagcaggcggggggtggggggggtagatttgccactggtaatcatttgcttatatctgatctaaataattctgcatgaatcaatttccaagtctgttaaatgagtaaaataatggtagaaaatttttaaagaaatccaatttcatggtgaggctggcagcacctctcaagccagagttgttttttctgaagagctatgtaacacctgttagctataacaatgcaagggccaaccaaaccatagctttggattcctgaggacacgttgttctctcagactcagcatcacaaaccagtcccagctcaaaagcatcaaaccaacccatctaaagtttcttccaagtcttctgaggaaaaggacacctgtaacatctgaatttagaagttgtgtgtccttggctgatcaactgcctaactctgagctttaccagcctcatccacaaaacagggacaataatacccacaaataagaccactttcccaatgtctcagctggtaaagaatccacctgcagtgcatgagatacaagacacgtgtgttccatccctgggtcaaaaagatcccctggaggaggaaatggcaaacacactcctgtattcttgcccgaaaaaccccttgaacagaggagcctggtgggctacagttcatggggtcacaaagcacaactgagagactaagctcacaacatcacctccaggatgaggggaggagatagacaggtgtacaggatgtaacacagtgcatagaaatggctggacaaatgctagccatcattgatactactcagaaacatgagaaccgagtcagtcaagactcatgagcagactaaaacacagaagactctagtggtggttttaatagcagcaacaactatgaacattagcagtaccttgggactaactgctttgtattacttattcattgaaacaaaacagaaaagaaaaaacctaactctgcacaatattatcatctcagttttatagatgtgaaaatggaggctcaccaacgctggaacctgcccagggactcaggtcgttcggacaggtccctaacagcagttgtaaacggaatcttgcttaactttaacccccctcagtctctgtgtgctcacctgttgccatggcgatgaataccacccagcggccagactgtacactggatgggctggacacgccccctggctgcaggtttcctccaagtccacgtttggtttcttaatattgcggcaccgtcgctcggggagagttatcagcttgccttggaaggccttctcgctgcatttcatctccctcttcctcactcccagaccacagctcacggaacactatggggcaagaaaggaggcgtcagggtgcgggctccaccatccacgtgtaatcagagcgatggggctagggcaggtcagccacagcccaccaggctcctgaaggcagggcctcaagtcccgcaggctacagaagccagaggactggagttactttcccaagggcacagcatggctcagcaccacaaaataaaggcaggcgctgccatgacacggcacacaaggtgagcgagacagagcccgagagaaagacgagaccagcagaggatgaggtcagggtcactgtgtcgtggccggatgtccagggcaggaggcagggcgcagggactgggcctacaggcagttcaggggaagaaccacaggtaacaagcaactgtccttcatctttacctgcctctctcttcagctgggatatacactgaggctgtgttatggcaggagaaaaacaaaaagaggatggaggctgatgaaataagtctgagaaaacctgttttttttttaatgtgactgactgctattttatttaaatatttccttacttccactatacaaattttctttttcaaaaactttaaattttgtattggggtacagctgataagcaacgttgtgatagtttcaggtgaatagcaaagggactcagccatataaacacatgtatccatatgtatacatgtatcccaaactcccctcccacccaggctgccacgaaacaccgagcagagttccctgtgctatacagtaggttcttgttggtcatcggttctcaatacagcagtgtgtacaggtcagtccccaaccccctaactatcacttctccctaggcacccataagctccttctctaagtctgtgagtctgtttcgtaagttcatttgtctttagattccacatagaagggatgtcacaggatattcttctctgacttactcaggactacagtctctaggttcatccatgtggctgcaaatgcattagagaaaacccgtttttaagtattttaaacagtataatgggatactgtacagggccttgatgaactgcataaagcagtaagaaatgacatcagcataaccatcatcaatcatgaaggctggggatcagatcaagacggcagagaggcaggacgtggtgctccccttctcccccgagacgtcaaaactagagttatgtagagaacgagtctcacggagcatctagcaaacgctggcaaaagacctcagacctccgaaagggtaagaaaatctgcacaaaaccaggtgggacaaaagggggggaaaaaaagaggaattgggccaggacctgctcctggggagggcgctgtgaaaggggaaagctttctgtaccccggttcgccccccaccggcagggaggtcaaccaggacccaggggagctctgaagggggcccagcaagcagggtgtagagggcagagcgtagagagacttccgggtgctgccggcctcagacgctcccc

SEQ ID NO: 27060 - DNA, 1472 bp, Bovine  19866880349638
  misc_feature (1)..(1): n is a, c, g, or t
naaacgaagatctggcatctggtcccatcacttctgggaaatagatggggaaacagtgtaaacagtgacagactattttttggggctccaaaatcactgcagatggtgattgcagccatgaaattaaaagatgcttacttcttggaaggaaagtcatgaccaacctagacagcatattaaaaagcagagatattactttgccaacaaaagttcgtctagtcaagggtatggtttttcctgtggtcatgtattggatgtgagagttggactataaagaaaggtgaacactgaagaattgatgtctttgaactgtggtgttgggagaagactcttgagagtcccttggactgcaaggagatccaaccagtccatcctaaaggagaccagtccttgggtgttcattggaaggactgatgctgaggctgaaactccaaaactttggccacctcatgtgaagagttgactgattgggaaaaaccctgatgctaagagggattggggcaggaggagaaggggacgacagaggatgagatggctggatggcatcaccgactcgatgcacatgagttttggtgaactctgggagttgatgatggacagggaggcctggcatactgcgattcatggggtcacaaagagtcggacacgactgagcgactgaactgaactgaaggtataccgtgtgaaaatttgtatatgtgaaatcaccatgcactgaagttgaggaacatatccatcaccttacatagtttactattttgtgtgtggtagaacacataaggtctactgtcttagtaaatttcaagtacaccattattattaatgataatcaacatgctgtacatctctagaattgatcttatatctggaagtttgtatccttcaaccaacatctctttatttttcccactccttagcccctgcaaacacctacatactctgtttttctgtgtgtttgacttatagagagcagaggttatagctgagtcggcaacaaacatagccatggttgacaggagaacatccttttggacatttagttaagagtaagagccattcgttgtatatcatcgcacttcatagttctttagtagaatgcctgtcaggtggtaactgccctttagctgtaggttgaatacccaaatgaatgaagaatatgcttgatctctgataactgtaatttgcactgaaaaatgactcgatctactgatagaaaatcaggaagcagagtgtgaacttcctgaaattctgtgctcagagaaaattttcagttattactgaagagaatccaaaatcccttattaactaattttctaccttttacataggctttcatgcctatggaagtatcaaagctttagtatcgctttagcagtgcttgagcctcaagcagacacgaatggctcttccacttaaccaggaaaatgaagaaggacatgttccagacttctgtccgagaaatgctcctttgg

SEQ ID NO: 27061 - DNA, 1482 bp, Bovine  19866880369384
  misc_feature (1)..(1): n is a, c, g, or t
natattccctggagtaggaaatagcaaacccactccagtattcttgcctggagaatcccatggacggaggagcctggggggctacagtccacggggtcgcaaagagttggacatgactgagcgccttcacttactcacacatcagtatattacttagatattaaatgccaatataaaactctcatagtcctatagttaagactcttgctgttaacattttggtgaatttccttactagagctaatttaatgtattataaaattaatctatattcttggtaagaaacaaaaatgatacaacatgtagaaatcagttgtttcctcaaaccccaggacttaccctccagaattaactactgttgatggtttttagcttaattttccaaatgttttagcatgcttatatttaaagttcagaaagcattccccccacccaccttctagttccccagaaaaaggaagagttgggttctatttaatgcaaagaggctgtgctgagggtcctaatagagaccatgttcagctcagttgaagacctatttctgcagtttgcttatgttcttggtgccattccttctcaatatataggggctccctcatggttcagacagtgaagaatctgcctgtaatgcaggagactaaggttcaatctctgagtggggaatactcagccattcctggagaagggattggctacccactccagtattcttgcctggagaatctcatggacagaggaacacagcatgcgtggcattatgctggtacttagagggctgtgaagaaggtgctgagcaaagtgcatgtgttctgtacaaaaaaagggtgaaagtaacactgtggttgcttcccaggagtgggcattccaagtgatagagtggcagccagtagctgcttttttggaccagaaactggacagcatcactcttagcatattccattggtcaggcaggcgcagaaccagatccgtatctggggaacttagatccacttcttaacaggaagcatgctaatggaatttgaaggtgtgtgtgtgtgagagagagagtcagtcatgtatctctctcagccttccagtggtaagatcgctcacctttctatggggagcttcaccccaccattcattgcgtagaatgctggagggacttcattcagttttagtcattgaccacagggtgggtatatgatctcagtctgaccagcagtcataccatatgcatgtggctgaaatgactgattggacctggagtgagcacgtgcctcgttaggccaattgtattccttcaccaagactataacaacacaaacaaaaacagtgttctccccacttcttctgatgttgctataacagtagtaaaggcctgtgacctttacttcactccttgccacagaaaaagaatttgtctgcagtaggtttggatcccatatgccatacaagtacttgggtgtagcttcccctgggtgtcagtttcctgccttagta

SEQ ID NO: 27062 - DNA, 980 bp, Bovine  19866880514975
  misc_feature (1)..(1): n is a, c, g, or t
nctgcagtcaccatctgcagtgattttggagcccagaaaaatgaagtctgacactgtttccactgtttccccatctatttcccatgaagtgatgggactggatgccatgatcttcgttttctgaatgttgagctttaagctaactttttcactctcctctttcactttcatcaagaggcttcttagttcctcttcactttctgccataagggtggtgtcatctgcatatctgaggtcatcgatattttccccagcaatcttgattacagcttgtgcttcttccagcccagcgtttctcatgatgtactctacatagaagttaaataagcaggatgacaatatacagccttgatgtactccttttcctatttggaaccagtctgttgttccatagtacagtactgtactaaggctgaatatgagtatttcaaaaagtgcatgatgattcccttgacaatgtctaaaaacacgtttgtgtgatgaagagagatttttttcccagcaccacaaaggaaactttcagacaccagctcattaaatttacactgcaaagcttcaaaaaattaatatagccacaataatgtcaatacctattccatccctcagtggctttccatggtccttccaaataaaataaaacaaacatggataagcagagtctatttgttattgatctctctgctccacacttacttagaaatacttttcagaggctctagaagtcagtcaaatgttgctcgagttatgttttaaaatatactagaggtccattttctgttatttctttttgtgtgtgtgtgtgtgtgtgtgtaataaagttttactgaagtataaaggagatagagaaagcttctgacataggcatcataagggggcagaaagagtacctgcctgctagtcttcagctggatgttatatagtcactagcagtctgttaatgaaagaaaggaatgttatttcttttgtcaattttctcagtt

SEQ ID NO: 27063 - DNA, 1137 bp, Bovine  19866880563173
  misc_feature (1)..(1): n is a, c, g, or t
naaaaagccctttaagttatagtgtccaagtttgtccttttgcatatgggaaaagttgaggccagatttttcatggcaggaactagagaagagggttaacctcgataaaaagagaattagatcacttgagtagatttttattccttcattcttttcatatccaaaaatctctaatttcatccccataagttatacttaaagaagagaaacatagagtgaattaaactgagtgagtcaaaagggacaggtaaaacagatatgaactccaaagcattaagagaagactcaagggtttggtactcaccttaggtagagaaaagctcttaaaaaaaaagagaggaaaaaaagcttggagttgtcctcatttgcctctcctttgagccccagtgttctctgttctcaatgcaaaatcctaacttccagagtggggtggtttttctctggagaaagaaaaataaatgcaatggcagaggcttgctaactaagtactgaagatccatattcaacagtaaaactgactttttgaagtagggcatcaagggaattggaaagaggacagagagagaacactaacttttcaaattcaatcctaaatttaagctgtattttcccccctcatttatgtccctgtctcattcctctgcgattttcactatccaagagtggtttcaatagttctcattgtcaaaagagttttgccaatatcgatgtgagttttcagatgttcctgaatgagaagggaagtaggtgtttgtggagctagcgaactccagtactcttgcctggcaaattccatggatggaggagcctggtgggttgcagtccatggggtcgctaggagtcggacacgactgagtgacttcactttcacttttcactttcctgcactggagaaggaaatggcaacccacttcagtgttcttgcctggagaatcccagggacgggggagcctggtgggctgccgtctatggggttgcacagagttggacatgactgaagcgacttggcagcagcagcagcagcagcagcagcagcagcagcagcaaactctagtgccctgtgatatcaaatgtacaaatggtgtgcaggcaggggtgtttgctgctggcttcctagcaacagtgacatacctctga

SEQ ID NO: 27064 - DNA, 1784 bp, Bovine  19866880623874
  misc_feature (1)..(1): n is a, c, g, or t
ncaccacccttatggcagaaagtgaagaggagctgaagagcctcttgacgaaagtgaaagagaagagtgaaaaagttggcttaaagctcaacatttataaaactaagatcatggcatctggtgccatcacttcatggcaaatagatggggaaacaatggaaatagtgacagattttattttcttgggctccaaaatcactgcagatggtgactgcagccatgaaattaaaagatgcttgctccttggaagaaaagctatgaccaacctagacagtatgttaaaaagcagagacattactttaccaacaaaggtctatctagtcaaagctatggtttttccagtagtcatgtatggatgtgagagttggactataaagaaagctgagagctgaagaattgatgcttttgaactatggtgttggagaagactcttgagaatcccttggactgcaaggagatccaaccagtcaaaggaaatcagtcctgtttcctaaaggaaattagtcctgaatatcattggaaggactgatgttgaagctgaaactccaatactttggccacctgatgcgaagagctgactcatttgaaaagaccctgacgctgggaaagattgagggcaggaggagaaggggatgatagaggatgagctggttgtatggcatcaccaactcgatggacatgagtttgagcaagctccaggaactggtgatggacaggcagcctggcaagctgcagtctaatgggatcagacacgactgagcgactgaactgattgactgaccccaatatggccccttgtgtcaggcaaagaagcaatgctcttcttttctacttcaccaaaaaccgtctccaagattcagtttggtacagaggctagatctcagttataggaaggggcccaaagtgatgtatgtttattggatctttacctgaatgacaacagagtactaaacacacatgtaagcattttttaatggtcggtgaaatttgtaatccagaagtatttcagatgctaagtagatcatgttgtcacataatgctcgatatttccaatgaagaaatagctgccagataggaagaaaatactctcttaagtgtgtatacacatgcatacataataacatacacacacacactatagtgtgtaacccccaaattttgaaaatgtactgattacttacagttaagatgtagtaatttcacacttttacactttctttataaaaccctacattttaaagaaatgtgtctagataaaggatgcacgtgtcataggaagccaaagataggagacttctcactgaaaaaggaaatttcagagatcattttcatctgtttagtgtctgtaaggtattttaaaacattttaaaattcatgggaataatcaacattcagaagaattacatctttggcaatgcgaactatgttgggaggatttagagcctttgcaaactgccacttgagcacattacttatgaactctttgctctttaaaattgagaacaaagcaattaaatacaaatttcacacattcagaaagagcaagaacatgcctgccgtctattgtaaattccagagtgtattctatcacttaaatttatagttcctttgtggggcgattttccttttattcaaaagactgttcaaaaatgaatcttcttattttgttcattgaaaaggagcaatgcataccaattttgttcttaagaaaataagtttaaataggtgcctttgtaaaaataactgtgagcctaatatttaaagaatgtgatatacattgggca

SEQ ID NO: 27065 - DNA, 2008 bp, Bovine  19866880804872
  misc_feature (1)..(1): n is a, c, g, or t
nttggaatgacgttaccaaggagttggccaccatgatttctctcgatctttaggactcagtaaagtatggctagtcctgaaggatgcgtggcttatagtgcttttgctctatccaacacacctcgtaactcagcactaaaaaggccctgctccagaatttaacagacagaccagcacagaagcacacacgcaagcaccaagcttttaggtgtccggggaacaagatcacgtactcatttccctatccaaactgctgctttgagaagttttccaaatgcacagcctgacaaagattattaaagtggttctttttaagatgcctttttaattgcaaaatgataatatcccatcatctctgcctcgttgagattagggaaatatttagaatgtgtttgcgtgtcctaagagaatgactggtacataattgcaaattattaccacttctgcaggtcatgctgacaagattatctcccagcaggctgacaatcagaaatctgcttctaatctggcggtttttcacagctggtaacctttttctttattcttggatagaatggaaatgagtgttgtatgccttctcctctcgctttcatggaccatttatcatatcaaaggcccattcgtctgcacaccagcctaaccaaattaggtaaacagagttcgagaaggaactgacagctgttagcgagacgagtaatcacaaaacacaaagctcatggcagcagctgccacataaacacagttttcaaaattatggcagctcggaggcagtttcaggagagaatcttcagaggactgttagtgcactcaaaatgcttcatttgcaatggaggcttgaattccccattccttaatagggtagaaaaagccctgtaagatctggtctggctcatctctctgagcgtaccaactctctgccctccccctccacgcctgcagcaccctggtcttcctttgggtcctccaacgctccgagctccttccaccccaggacctgggtgcgtgcatccctcctttgacagaagcgtagcacgagcacacagacgaagcagacacctgcaagttcattcgttcaggcagcacttgctgagcagctaagtctaaaaggccttgagccaaaggatatcaagatacagagcggaatgagacactgattcctaagttcagccctcagcacacagacactgcgcttctgtataagaaatcatgaaacgggacttgcctcgtggtccagtggttaagactccacgatcccaacacaaggggtctgggttggatccgtgatcagggaaataggatcctgcatggcacgaacatcttgccaccttgccctcgacttctggtacaatctcctccctgtcccatttgtaaaattcgtgttctccaactgtccttagttttagtatcaagcaaatcatcttagaccactctgtaataggcagagtatacatcaccaataaaggacatctaacggaatgtatacactcatatatatgcacacgtatgtgtatgttatggagaagggtatggcaaccccctccagtattcttgcctggagaatcccacagacagaggagcctggcgggctacagtgcatgtggctgcaaaagagctggacatgactgagtgaccaagcacatgtatgtattaagtagcaatcaaatggacacaaaaatagacctaaaaagtctaaaaactgtgttcaataaggagcaaaatgccatagagtggatatggacatcagaatgaaatggtttatattcacatcctagcccatctctacctgccctgagatgctccgttgcttatctgctctctgtctccgtacactcataccaaaaagaaaaagaaaagcgtctgtacatcagaaggtggttacagaattaatcaagcccatcaatgtaaagcactgaatgcactttcctacaatgcctcacacacaggccttcaaacataagtggttgctggtgacgcccatgtgttgctactggcctcatccttcagttgg

SEQ ID NO: 27066 - DNA, 1104 bp, Bovine  19866880818818
  misc_feature (1)..(1): n is a, c, g, or t
ntctgcagtgattttggagcccaagaaaataaagtctctcactgtttccattgtttccccatctatttgccatgaagtgatgggacaagatgtcatgatcttggtttcctgaatgttgagttttaagccaactttttcactctcctctttcactttcatgaagaggctctttagttcttcttcactttctgccctaagggtggtgtcatcggcatatctgacattattgatatttctcccagcactcttgattccaaaatgttgtataaatagctttaaaatgttcagtgaggtttctggaattccaggatctgacctgcgtcttgatctctgatttgtatcttatactgtccagattctcatgcaaggcaaaaacccaggaatagcttggaagtatgcacttcccaaggtcacgaatggaactctgccagcctcaaaaagacacagctacgcctggagcacagtgcagacagattgctccgtctcctgtgggggaggtaggtttcccaattctgtcttccatgtcttttcttaaaacaggttctcccactccagacctctttcaattgtctggttgaaatacgcaacaaaagaactatctttatgagaactgtcactatttagagggaaaaaatcaaatattatttgtactctttggggattttcctatgtattaatagaaaggaaccagctcaagcaaatctcaagtcaactacaaccaggacttgaaagtgatgcatctgaaacttccaggggggaaaaatataaacacgtgtccctttattataaatatgaggattgatgggttgatatgtctgccgagagttttctttctttctgtcctggcttttctgttgttaactttccagggggagttagagaaggtaagcgatagacagtgaaaacacacgccagacgggcttaaggctgcgagctaacacgtgaaggaggggtagtctatcccccgaggggtgatgtcagcagaatctctgcaggcaagtggattcaatctgagaaataaccctcgtaaggaaggaagagtcacagccatcccctcagtgagtagaatggaggcattttatttagacctaagaatatcacata

SEQ ID NO: 27067 - DNA, 1025 bp, Bovine  19866880900345
  misc_feature (1)..(1): n is a, c, g, or t
nggctggctgggagggaagatgctacacctccccacagacttctaccaaaagggtcttaccagatttaatccctccataacctgtcaacaataattccttccttggaaggctgtagtgaggatcttttgggaaaaaaaaaagaaaaaaactatgccaaatgtctgggtcgtggtcagcactcagccaccagtcttttcttcagcttttctccactgtatttcttgtaaggaatgtctagtcaacagtcttgcccactggggttttagtcctccttcaaattgatttccacacaaaatgtaggacgttggtaactcgctctgcagcctgtcctttcaaccttccatttgcatgaaaattactacatcaaataatgtcatcctgcagaaaaaccacaactgtgaaatcaagcaaaccctgcaaaagtggccaaatcagaggatctgccaaacgccaccactaccaattagaagccggggtgatttgggacaacatctttaaaaaagaacaagaagtctttcttccaaagagtaccacgaaagttctcctttcatacagagaacagagggtatcaaggttgaacgtattcttccccacttttcagtacagctgagtgctgagggctgatctggcgagtactaactttcagtgggtgcttcacggttttctttagggctctacatttcctgacttctccaatctaatgtaaagtaccccttctctcttatctttatcaagtacaatatttggaactatcaagctcaccgctgcaaggagactttggttgataaggacagttagatcttgcagctccaaccctgtcctaagatttatattttgtataggagtcccagtgccaccacccccagtggccttgggtagtgttgaaccagaagaaatgactcccattttagcttaaatgtgggcaaaagaccctttctttttacgctataacttaactaagactttgtcaacatggtcacatccaacttgctaaaagggaaaccaaccccaaagtcaagactgc

SEQ ID NO: 27068 - DNA, 2286 bp, Bovine  19866880917398
  misc_feature (1)..(1): n is a, c, g, or t
nacatgactgtgcgacttttcacttttttgtcctttataagtgctaccatatacttctctttctgacttacttcacttagtatgataatttctaggtccatccatataaactgcaaatggcattatttcactcttttttatggctgaatagtattccactgtgtatatacatcacatcttctttgtcaattcatctgtcgatggacatttagatcgcttccatgtcttggctattgtaaggagtgctgctgtgaacatggaaggtgcaagtatctttttgaattaaagtttttccctgatatatggccagaggtgggattgctggatcatatagcaaatctatttttaatgttttaagggcctccacactcttcttcatagtggctgccccagtttacattcccactagaattgcaggcaggttcccttttcaaaggagaatgcattttgatcgctcagccccgtgtgccccaggcatctttccttgtcagatctaaacacatattttgtgtccatgatccattttcattagccctgctggtggccacagcaaatttgctaagttccttgttaacctagggttgataacggctttgcctgtcccccatctccctagacagttgccatccatgttttcatccagagaaaggaatggtgggcgttttggtcccctggcatgctcctaagggagtcacctttggtcaaaagggaccttttccatcactgtctcaaagcattccttggaggagaactcctgtttaatctgcggagggtggtttgcactgcagggtgatgagctgtatggagtaggtagaatgtttgtggagggaggctttgtgggaggagtcatggtccgaaatgtgcagatgggcccggtgttgtccattggcaggagctccacagtgtgaggtcgaggtgacacagagcaaccttttcagatggactctccatccttcaaaatgaaatctgtcttcagagctaggctagtagagaatcagatggtctggtcatttgtctgggattaaagtcagaccccaggaaggtgggaagtttctggccatgggggtgacgagagctgcggatggagaaagcaattagaaaggagcgacacagtcacaccctcatggggcacaaaagggggacctctgggaatggatttctgggcaaccgtgacttttcatgaagagcagtcagatggtagttgtgctttgaaacacacaactgttgaccaagccagttgtgaaaggactcggagctgagcagatggattctaacaacttattcatccacttgtcacggctgtgctgactgttgtccagctggcctccgacagcatgagtctcctccaaagtgacaggcaagggctgcattttctctgcctcagtagatgtttccctcctcccaggtctaaaagggcaggtcttctgaagcccctgtagactctctccctctcgccctctctcggtctttctctgtccccctcctcccctccctgtgaaagtgtaagcttctctcatgaagagttcaaccataaatgcccaccctgaacagagggtgcaaaatttaaatatggagaaaagtagcattcaccaaaatcaagtattaatttcttgaaaatccttccattaaagcaaaaaccagaaaatgcttatctgctgacttgatatcaactactgtttaaaaagcacacatcaaagttcccttgtaatttcagggtttggaaatgaaaggggaaaagaagttgctgggggaaatgtgttagagtttactgagccccatatatctggaaaacagtttgagatccttggccaaacttagagttctggctgggtgttcatacccctgctattgacagctaatttcttgagcaaatttattcactgtttttgaaaaaaaaaaacaaaatctggctgcctggagccacctcagatgtgcagcctgttcagaaattcccgagtccaactttcttaagcatttctgttttcttcttagctctcaaagaacattctagcaacatgactgattatttgtctgtgacctttcactaatggggcactcacatggaggagccctgctactttctgaagataaggcaaaatgctttatctctaatacagccttatattttaaaaaaaatttttttagtgtaagaaggaaaaaaaaaagtgtaacgtcttgattttgacagaatttaactgcttgtctcaggagagaatgtctatgtgcgctgaaaacttagaatcttgagcttgaatctaatatcatttgtaaaaacccagtcattat

SEQ ID NO: 27069 - DNA, 2057 bp, Bovine  19866881044649
  misc_feature (1)..(1): n is a, c, g, or t
nccccggcagtgttcacagagaccagatggctggtacatggtccagaccgcttgctctcacattcttggcctcgtgcgcaacccaagggctccctccacacctcctccctctttatttcacgtcatttactgctttttccccttagtttcagatatgagccacaagttaaagactttgcaaaagactagaatctctgacatttgggggatctggtgtttattaaattgggagatttaaactgactgtgatttgttcttaatttagagctgctgctgctaaattgcttcagtcatgtccaactctgtgtgaccccatagatggcagcccaccatgctcccccgtccctgggattctccaggcaagaacactggagtgggttgccattttcttctccaaggcatgaaagtgaaaagtgaaagtgaagtcactcagtcgtgtccaactcttcacgactccatggactgcagcctaccaggctcctccgtccatgggattttccaggcaagagtactggagtggggtgccatcgtaatttagagcagtgacagacaaatgcctgaagtgtgtgtgtgtgtttgtagagcatccaggatccaggcacacttgggggagtaaacagcttaaaaatccagggagccatgcggctgattcatgtcaatgtatggcaaaaccactataatattataaagtaattagccttcaattaaaataaataaattaaaaaaaaaaatccagggagccataagttggaggagaagaaacctcaacacacatttgaactctatgggtggctggccacagcacaggggcccccatggtcctgatgcggccacagctgtgggctcacgtctggagactcctgctggactaaaatgcctttcaagagtgagtgagtggattgtttcaatctgctgatctctggaaagaccctgagtctgcctcaggggagacagacggctgggccacaccccctccccctgggccctgggcctctcccgaccatgctggtaataatcacctggccttctcaaggtgcttcagatcacttacacccactgtgtgccaggcactgctaaatactttataaaaatctcttaatcttcacaacctctgagctgggtaatatcctagagtaaaacgaatttcacagatggaaggaatcacagctcagaaatgttaattgcctgagaccctggcaggtggtgtaaggtgggcttttaacattaggcttatctgactcccaaatctgtattctcctcctaccccagtcatcacgtttactcggtctttaccctcaggctaaacgctgtgggtaagctatgaatatagacgtaaagtctgcccaccaggatatctgtctgtctcaaaacagtacactatttacttatcttttgagtcagctagtattcaaggaagaacatccaaggattcaaacgtgcatgggatcaaggagctgcctgtctgcgtgtggagctttacatagactgggaggaggggcccacggagtcaacgaagcaacaaggaaatacagtaaacagctgcagatgctaataagtgctgctgctgctgctgctaagtcgcttcagtcatgtccgactctgtgcgaccccatagatggcagcccaccagacttccccgcccctgggattctccaggcaagaacactggaatgcgttgccattgccttctccaatgcatgaaagtgaaaggtgaaagtgaagtcgctcagtcgtgtccgactcttagcgaccccatggactgcagcctaccaggctcctctgtccatggattttccaggcaagagtactggagtggggtgccaataagtgttaggaaggacctaatcaggctgccacagtggagaccagccgctgacaccgtcccacaaggaaacacatcactttataaggtaacaagcttcacacctccggaagtatttaatcagaggctgggggacccacaaatgatccttccactgagggaagccacagaaggttgggggaaagagagagacgtcaactcgattcctggtgatgctcttttcaaccaggggcaa

SEQ ID NO: 27070 - DNA, 1193 bp, Bovine  19866881123490
  misc_feature (1)..(1): n is a, c, g, or t
nactcattgatcaccgagttgacggtgtggggcatcatggtcagtccccttctcataaagctccttcctcatgaccctgctgtctgcaccccttcccccacggggcaggggccgagatgagcaaagatgtgcctcaggatagaatcagtgtcggggagagagattagccaaggagtggggacagagtgaagacacggctcacgaaagaggccaagaagcagtggaggactaattgagaccagatgacggggaaccccaggctctggaggacgagtcagacgtgctcccgagatgccgcatcacttctccccaggttgccattcgctgtttgaagtgtgggcctccagttaatttgcggcaaatacttctgtgacaggttggagcgcgctctttctctcccctaaactcctaggaatgtggatgagttgaattagaattgtagtctcggttcaatgtgtcagcccacacctttgaagccgcctcgtagatggacttccaaggccccagttggggtctttgtggtgctgcgtcctgtcaaatccgactcactcacacctaatcccagagatgatacctgctcatgttcttcgggctttgaagcaaacaagaagctggggacaactggctgatttttcacatcacgaggcttcccagaaaatcacaggatcatacagaatcattgaactcacaacacaaaaacgattcctcctctgacttagtcaacgtgtaatgtactgtaaaatccatcctttatcagaaggggtccatctgtaaagtgggttgaatttcagctgttaaaatggtatttaaaacaaacatttctgtaaatgaagggggaaatggattgaggatattaaaaatcacaaatccttaaatcaagaggagcctggtaggctgcagtccatggggtcgctaagagtcagacacgacagagcgacttcactttcacttttcactttcatgcattggagaaggaaatggcaacccactccaatattcttgcctggagaatcccagggatgggctgccatcatggggtcgtacagagtcagacacgactgaagtgacttagcagcagcagcagcagcatgttcaagaagggacattttcaggttggaacccgatagcgaaatgtatatgttagagcatgttattggatcccagtgacaatatcttttcagtgttccttcagt

SEQ ID NO: 27071 - DNA, 599 bp, Bovine  19866881214345
  misc_feature (1)..(1): n is a, c, g, or t
ntctgaagagaaccgagttaattacaatgcgcattatgtttaacttctcaaaaggtttcttataatataaacaaaatatgatcatagataaacattcttccttgtctctcaggcacatctaattatggcattgcaaaaatgaaaggtaaaaaaacagcacagggttatttaatatgcaacttgaatcagggcttgcattgtttggaaataaaattgaaagcaacaaagaaattgaatatagattatattagagaatgaaggcttttctgtagcatttgcttctgactaatatccatatatgtaaaagcaaaactagtggacaagtaagcatatttttaagcaaactctagttcagtattctagcattgtatttaatttggctttaagggttgtttttcttttgttttccctcctgggataagattagctgggaacttggcacagtttttgtggtttgaagtcttatccttgtggtggtggtgtttttttttttttttttttttacatattactgcagtgggctttccattttattttatttttttttttttccatcaggaggaaattaaaaacaagcaaacaaaacaatctgggaaata

SEQ ID NO: 27072 - DNA, 875 bp, Bovine  19866881215050
  misc_feature (1)..(1): n is a, c, g, or t
ncgcgcgttatcgttttaacattaatcatgatgattcctcgttaatagtagctgtgtggaaaatccagttccctgaaaatctcccataatgaaaaagaatatttctggtaggttaaggtcataatgtagaattatgtgtctgatattatatcaataattcaaatacttttaaagaaaagataaaagtgataaatagacctaaaaagcagtatacaagttaaactcatttcaagagatcccctcatctcaagatgacagggtacaccagttgacatttataaaatactggccaacatgattttttaaaatatgtgaaccagtcactcatgtaacaagagtttattaattaaattcactgttttcggcattggtaaacacgggactgcaaacaatgtccaggacagtgattgccctcaaggagatagcaattaatcatggagacagtgtttttacccagaaaaaaggttgagaacagtttagggcactaattaattatagtcaacttttcatagtaaccagggaagtcagtcaagtcaagtgatgggatttggctagaagtgaaaatgtattttttttccaacatcatttcttgaaaagactgtcttttccccattgaatatttttttttcctgatctgaaagtgttctcttttttaatttttatttttaattagagaataattactttacagtgttgtgatggtttctgccaaacgtcaacatgaattggccataggtacataagtgtcccttcctcttaaatctcctgctccatcccacccctctagattgtcacaaagcattgactttgggttccccacatcatatagcaaattcccactggctctctgttttacatgtggtaatgtatatgtt

SEQ ID NO: 27073 - DNA, 895 bp, Bovine  19866881264232
  misc_feature (1)..(1): n is a, c, g, or t
ntggctaacctatgagaaagttgctaatactttcatatttcagaaaaataactttcagtactttgtgtaagttacatcttacgtctctgaacagaactgtggtcccagttctgttcagagatgaccaacaaacccttggactcaagcctgagttaatcaaagggaaggactatccttggtctacgagaaaagattcattcccatctcttcatttgttaaatattgaatttattgtctggacagcctatgataaaaccttggctaatcgcctcggagttgattaatttttcgtgtactttgggtgttattcacttggcacttaatatacagagatatgcttttgccaagaacatatgtggaagattcaggcaacacctgattcctttctcagctatggtttggcagatcctgatgtgtgaaattgttgtatttcaaggaatacacactagttttctagaggtgtcttcaattcagttcagttcagttcagttgctcagttgggagataaaaaatgcaacaccgaaatctgttttcccctgtcccctcttcatgggtcctagaagttcattttggactttgctgctgaattatattctgccagtccctctctctagcaatgaactatctgtgcaagtttcaggtcagcgtgcagaggtaataagtcatttttcctactgcttttcttggattcccccagcaggctaagcgacaggaatttcccctgaatgcataatttacagtcttctcactgatgatggatttacagtttcgtggtgaaaatgaagccctcatcccagctaccaactgcttggcaattacacttttggaaaaagacatgtatttaaaattacattaagcttatttttcaacctagcttgagtttcacaaattacaa

SEQ ID NO: 27074 - DNA, 665 bp, Bovine  19866881299367
  misc_feature (1)..(1): n is a, c, g, or t
ntaaggtaattcttaactagtacagataagactttttcatagtcatacaaaaattgaatttaaacattataattgctagtctttcagtgttttaagagctgcattatgatccaggtagctgatgtagccaactttgcttaactctaccactagggcatgaaacagcacaaacagggatatattctgatactagtttaaaaatgcaaaatgtaaaagtgtatcagtgattacaaaacatgctggtctgaaatgaagcttcatggatctgtcttctcacagcaaagaaaagatcaaacatatttttgaaaagtggaaactttccttgatagggaagaagataatgatcacatagagaaaagcaggtatcttccttcagggcttgtgaaaacaatgctgagatctgaaaattcattagtgtacttttctacaacctttgaattttcgtagaaactaggaaagatgccactagactagaaatatccatgtgttctaaaggggagactatctattgaagtcatgtcccaaaagtgaagaagtggctcaatctttttaaagggaagtaatctctaaagaaccaggtgcctccctttagaccgatgagtatttacaaatatatgttgattctatagcagcctgtttttgtaccaaaataactctacatacat

SEQ ID NO: 27075 - DNA, 3284 bp, Bovine  19866881314474
  misc_feature (1)..(1): n is a, c, g, or t
nacccagggatcaaacccggcatctcttgtgtctatagcttgccaggcagacttttaccaccgtgccacctgggcagcacctctgtgaatgttaccagagcacaattcagtgtctgtctgggttggatctaagtggcacccacaatactgctttcttgagggacaatgacacactatatcatagccattaaatatgaatgttccgtaacagtgttttttaaaccattttgactaaaagccatattaaaaaattagcatacacaacccatgcattttataacctgcctcagtgtatgcacacatacatatccacactgcaaaattttatgaaccatagttcctagatatcagtagtctggtattgtctctttatgctagttttatgctactctgtaatatttcctttctcactagtgtttgttataataattaaattgattcatgacccactaattgatcacaactcggaagtctgaaaaaggtattttctctaggaaaccagaattttttttctcaaattggtgagccaggcaatgtttttctaaactagcatacataactgacatataacattatgttagtttcaggtatacaacataatgatgtgatatatgtatatattgcaaaatgctcagcaccatacatctggttaatgtccatcgccacatgcagctacgttttctctcttgtgatgacatcttttaagatttactctgggatttccctggtggtccggtggctaagacactgcgctcccaatgcatggggcctgggtttgatccctggtcagggaactagatcccacgtacagcaactaagatacaaacactgcaagtaaagatcctgcagctgtaaccaaatgatcctacatgctgcaactaagacctggcacagccaaataaatgatttgtttttaaaaaaagatttactctgttagcaacattcaaagacatgatatatattattaactacagtcaaccatgctgtacaatcctatcccaggcttttttttttttttttccatttcactgattctgcaaatgtggtgagcacgagaattttgaaactgtcgatgtcaaggattccagtctcagaggttctaattcagtagatctaaagtggggaatatggaattttagccaaccaatcaataaaaaaggaatccttttggtttgctttcattgtgaggaagcttcaagataggagacgaatagacctgtcttgttcaatacaatagctgttaccggcacttgtaaagtagccggtctgaactgaacatgcagtaactgtaaaatgcaaacttgattttgaagacctgtgtgtaaaataaaaataaagtatctcattaatcattttggtattggttatattttgcaataacatttttgatatactggattaaataaaatagactaccaacacaaatctcacccatttcttttgctttctttttaacatgagtactagaaaatttgaaatgacacatgttgacttgcattatattctaccaaacagcactgtgccagagcagagatggaattccacgcatcaaaaaaagaaagaaatagaagatttcatgggggagaaaaacccacttctgctgtcatcaactcaaaataaaaaatccactgcagactaaaattagattcatcaaaataaatatcttcaaagacacaaatgaacggcatatgaatgtggaaccatataatccatcaataagcagtcctggtttacaacatcgtcccacatgtcatcgtcccaacaaatcactgagaagtggtttcacagtgtgaagtcatcctctaagccagctgtggaggctctgtctccctcccactgctcactgacaggcatttaatgcgctcacttgtactggctgcttgaaagccatgtgcagtcacggttggcagacacggaaaggtgtgtagcaacaagacagctgaagataaagtagtgaatcaacaagctagatgatgcacccaacacgcactgtaaagaacacatactggcagctctagagacaatcagactctgtgcatcgggcattgcacacaatgaacgctgaccacgaagggtgtagggcaagctgcccagtgccctggcctgtcagctactgcacgctgaatgcctggttgccttacacttgttttctccaggagtctatgagctcttcatagaaagtgtccagaatttgttcatccctatcgtagttaagactttcagttcaaagtgagaagttaaattagattaactgaaaaaaagaaaaaaaagggggtggggagttatggctcatggaaaggccaagatactttcatttcaggcataactggacgtcaaaggctgtgatgaccttattctaggtgtcaagacggctgccactccagagttagagggcatcctcttcgctttccccaggtgtcccagaattaattttattggctctgatgctgttagatgcccctgagccaatcattgcagtcaaggacagctgatgttctgattggaaaacagagtcacctccatccagttccaaggtgcaggtaaggaaggttcatccccagggaaaacttcagcgttcttaccaaaagactggggaaagggatgctgggcagataaaaaagtacaggtggccagtgctgttatctgtatctctaatctgatatataaaggataaaaagatatataagttatgagtgttatcaatgaatgcacacatgcataatatctaattcatgatgtatgtcaaacatggaaatgatgtatgtatttctaaatcaccaggatattaagtacacacattcatgtaatgagtggtcatcaagtgtctactattagccagagactattctagccactggagacacagctgtgcagcagcagagatgaagctacaggcttatggaacccagatttaagaggggaaggcagaaatgcacagtaataaacaagtcagtcaggtagtgataaagaggaggaatgaaaataaagcaaggtcaggggatgtcgcgtgatggagtgtcagggaggagctttctgcaataatggcctctgcacagagaaccgatgtgccaggaagtggtaaaagcaactgggtgactgtctgggtgaagaacatacaaagtgcaggcacaggagagggggcctctgggaatgctgaaagggcctggacatcagaagggctggggaacagacgatgggaggagagactggacctcagcccaaggttgccagactacacagggccttgcagaccatggtaagacacttgattacaccccatgggt

SEQ ID NO: 27076 - DNA, 1546 bp, Bovine  19866881316743
  misc_feature (1)..(1): n is a, c, g, or t
nctccagtgtttttgcctggagaatcccagggacggggaagcctggcgggctgctgtctatggggtcacacagagtcggacacgactgaagtgacttagccatgcatagcatagcatacatataaccttgttctgtattttccaagtctcctgtaaatgtgttaccatattttcataatttaaaaaattaaaaaaaaaaagagagatcaagggttaaggattgagagggtgagaaagaagtcaatggaggaagatcaagagggccaccactttctgcttggcctcctgggtctttcacaagctactgacattacacccaggtcttgaagactgagtaaggacgatgcatatggaaatgagaaggacggccagagctgaagagaacggtccctcaacaagttccatgtaatgggagaaaagctcttttcagatgacttagacatgtagctagattctgaagtcatcataaaccttgtaattcagttactctggacaatacacttaaaaactgtgatactcagaatactctgctgagaaaggaagagttgacaagatgccccctcaggccccagctagaactcactctgtgggctgcctggtcctaggtcctgtctcaatcagaaagaactggcagctcatcaagacagctacaaggaatctcatcaaactcaactgagaagaactatgaaactggatgtggggggctgttacaaaacaagggaaaacagcagcacttgaacaaagagaaaatacatgacttctaaaaactacagagatagaaacttttgaagatgaacacaatcccctgtgaagttctctgacaattagtcgtgttaagttgccaaggcacattgtaagtgtgagtccacagctgccccatctcagtgccagggagtgttatttttactcttacagtttcggcaagactcctaattattgaaactgccaatgtcaccttaattacagttttatttaatggtcacattgggcactgctacatggtggaacttttttaaaccaaaatacagcagaggagtggagacagagaattcagctcccaacagattattattcaggtcattgcaggggagtaagcttaagagaagatggcaaaagcttcaatgcaaaggtaatattgaaatttaaatctggcgtgggttgtttcaaaggttagaaagaaatggcacattttcaaaatgtaagtttatattgaacgcttttctagccaggcattactggaaatcataatcgttgatacattatttctcagaacagagaactctattagagatacaaccaaactgtgtgggaaacttcttacatgagctgatgatttgcacatttcctgaaagcccacagtatgacagcactaggcaaactccaggagcctgtaatttcacagtggcagcgagtgacaaagacgtacattaactgcacataaacagctgggtgctgaacagtctgaaaaagtgcaagtgactcagagtaatagctaggtgtcatcagatcaaaagcaaggtttcctgttgcaatgcaaatcgtccaa

SEQ ID NO: 27077 - DNA, 694 bp, Bovine  19866881343238
  misc_feature (1)..(1): n is a, c, g, or t
naaaaattaccataagacgtgctttataaaatcaaaacttattttgttgagaaatcttgcttctgcatgtaggacagattaaagctggagaagccagagtagcaacaaaggcagaaacagggccatcgctgttagctgggaatcagctagatgtacgactgggacacaggagggaaacagtagtcacagaagaactggatgaagggatcaatgagtaaagctgatgataccgtacaggaccctcgggggcttctgggaacaaggcctctgtccctcatttctgattataggaaacggccttcattcagctccaggaccttctctaagttccaataggcagattcaagcagttgttaattagggaaggaaggaacagacggacgaaagagaaacaaacagtcaagggcagccttggggcaaggtcctatttccccatcagtggatacacacaacaataatttttagctattttacagatgctgaaatcccctccaggtgggagaagttctggtatgctggccacaagcatgtagaccccagaccacttaaacttcaaggctggcaacactgactccattttgaccaccaacccatgagaagaatgtccacaagttgatcacgccctcttttactataaaacttgtcactatcttccccaagtggggacacttggttttgagggcattaatctgct

SEQ ID NO: 27078 - DNA, 2399 bp, Bovine  19866881358856
  misc_feature (1)..(1): n is a, c, g, or t
nccgactctttgtgacctcgtgaactgcggcacgccaggcatccctgtccttcaccatctcctggagtttgctcaaactcatgtccattgagttggtgatgccatctaaccatctcatcctctgtcgtccccttttcctcctgctttcagtctttcctaccatcagggtctttcctggtgagttagctctttgcatcaggtggccaaagtactggagcttcagcttcagcatcagtccttctaatgaatattcaggatttacttcccttaggattgactgggttgatttccttgcagtccaagggactctcaagagtcttctccaacaccacagttcaaaagcatcaattcttcagcactcagctttctttatagtccaactctcacatccatacatgactactggaaaaaccatagatttgactaggcagacctttgttggcaaagtaatgtctctgctttttaatatgctggtctgggtttgtcatagcttttcttccaaggagcaagcatcttttaatttcatggctgcagtcaccatctgcagtgatttggggacccaagaaaataaaatttgtcactgtttccattgtttccccatctacttgccatgaagtggtatataccatgaagttatacccccagtaaaaattattttaaaaagaatttgacattgggaggaataaacagaaactttctagtatctaaatcacagctactttgtaatctgctaaatttactacatcacatttcaacttctagcaactctcgcagggacttagagtccagctgtgttgatgagcttgtaagtttttcaggcatttcctggttccgtgtccacaggtctttgtgtgctttccatcctgaaatgctgcgtggccatgaggacaagtatttctcttttttattattactgttgttaaagattcagctcaaatattacctccgttttccccccaaggaaacttaaacttcgctttccctgagctctgttttcaccctttatgccaccttcacagacttgtgatactaatattttaactgtctgtgtatgtctcttgcctcagtagatagagtatctgcaatgcctggcatatacctgacgtattaacagatactcagtaactgcttattggatttacaatgataatcaaaggccacatatttcttgtggctgttccacatagcatgtgggatcttcgttccctgaacagggatcgaacctgtgtcctctttattgggagcacgaagtcttaacccctgggccaccaaggacatctgatcaaagcccacatactgttagcactcccgttttcagaacatggacaattttgcctctatctctttctcatcattcctcaaggaagcaggagtagcttctcttgaggagccaaagatgactctggggcttggggcttgtgcagctgataggatgggggtgtcataagtgagctgtggaacatggaacagatttggggggacagctggggaattgtgttttggttgtattaaatttgagatgcttgataaagttggattggcagagacctttaacctttgtgcatctcatacttcccttaaaggggcatccaatcattagaaacagtaggagaaggtgggcacccagggaccagatggaacaatggacagcgctgagactccttaaaaatcacatccaggcaacacaaggcctttggggtctccatgcttattttctttttcccttaaattatgacttaagactaaggaattatagataaggaaaagttagaagaataggctgaaaaaataaaaagaggtaagaacaagaaagaaaaaagtgcaaactctgatttctgtttcttttgaaagaaagcttgctctgaaggctctggggtcgtcagaacacgtcgttggctataattacacttgacttctgtgctccaccacaaaagaaataacatgtttgcacagccagtcgtatttcactctggaatccctgtgtttctgtgttttgcttgattttcctggtctcctccagctgccccttttccttggccctgtggcttggcgttggccacggattggggcctccgttgctttggtccactctggggccattttggtggctgccacattggctctgtgtgtgtgttatggcttgacctgggctgtaagagagaaagcagtttaattctgaaagcctttctcgctgcagctttgtttccatggtgacctcccatccctctgtttcgttttgatagagacgggttttttccaccttaactggtccctcttggattcagggtgacccagatgggaatgcacggagatggtaaacttcattcgtctagttggaaggctgcctcacgctttctactaatgtcagtgacagggtccatttccatgggaaacgtttc

SEQ ID NO: 27079 - DNA, 1750 bp, Bovine  19866881388117
  misc_feature (1)..(1): n is a, c, g, or t
nctttggcgttgtcggggcctgtccttccaagtgacccggcagggtctccaagtgtgaatcggacaggtctgaagggacgtgtgagaacgctgtggtctggaacggctgcagcggtgctgcccagggacagcataatctatgcgagtaggttttcaatctgcggagaatatgctttatacttcttctctatcttccaaagttcagagaaaggaagcaagtgttgctcaagaaacagtaattgattattcttgtgggtattcatctcattttttaattggacatttattgaaccgtatctttttcaaggacatgttagagtgtgtcacagataaaaccccaaaatatagcacatgcgtgggaattgtgaacctggtcagtagttctgatgttttgttacttgctggttagaggaactttttcaaatgggaattatatgtgtctgttgtctcagaagatataaaaagacaatggaaatacacattgtttgtttcaacacgatgaaactagaaaagaattctcaacaagaaaacattgcccaaaggcaagaagctgaaagaacaatagtgactaatacactaataaaataaatctaaacctaaatggtttctcttatgtttaaacaaaaggacaataataattctgctctgaaagaatatccctggggagttacacatgaaaatatttttttcctaggcagtatttggcctttcctattctgtcatcttatttttgaaacagtttaatatctggtaacatctgctctgtctgcatggtctgtacttcatactcagaacttgtggcagcatataagaacactttgccactgttgtgaaggattctattatttattgactgcatttataactttctatttttcacaacatcagggtcttccctgatgccgagaaaggagaagagggcggcagaggatgagatggttagagagcatcaccaattcaatggacatgaacttgagcaaactccaggaggtagtggaggaaagggaagactggaatgctgcagtccatagggttgcagagtcagacatgacttagcaattgaacagcaacaaaattcttcccaaagaaacaaaatccattaaaataaacataagaaattggggcaaggaaaagaaaggaaactgaggaatgaatccatatgataactctgtggattaatatatttatcatggctgatcttccagtttgactgagtttcctagcagcaaaagcaaaacaaacccaagcaaaaattttaaatatgcaaggttcccagtaacagaaagttagaatgaatacaattttataaggggtttctaccatcacttcatatttttctcttattctcatattttgtcactccatatttttataaaggattctactatcacttcatattttttctcttactccataataaatgctttttaatcgcaatgaaatccaacagcagagaactattactaaggttctaaggtggtagttctcaaactcgagcaagcattggaaattcctagaaggtctatgaaaacagattttggggccccattctcagagtttctgagccaagggggcctgagaatctgtgttactaacaagttacacaaattttactaaccctgaagtcaaaggtacaactctgaagtttccagtgtgctcagttcatgcggtcagaaaatgtcctagagtctgatgtacgacttcaattcacagattagagtttagagctcctaagggaatcaatacataa

SEQ ID NO: 27080 - DNA, 1902 bp, Bovine  19866881400117
  misc_feature (1)..(1): n is a, c, g, or t
nagctgtgagcagcgtgtgactacgtagttgggcagggcggctgggtggtacccaggagcagaggaagtgggtgatcactagcagtcgtgaaagacagtgtctagcacttgaattggtttcggggatttggtattactgaaatatcctttttaaggaacatctatttggcgtgaatttgtaatactagtggtattaaggatagtgatgatatttgtagtggccatgacacatacttgatatgaaatataaaagctaatctttaaagcagctttatgattagatatgatcctcatttcatggataaggaaactgaaactcagagtcatttatcaaaatggccaattgaggttttaaattgagctctaaatgatttgatcatttcatttttctctgtggagtgctgacttcactataatgactgtaccagttgttatagtattaaatggatctgtagtacatacagtcctgagctttccaaatgcatttttccttcccagcaacccttgaatctgtcactgtccattaactaaagggatggtgcctaatctaacaggtactttgaggtctctgctcagacactggccaatatccatgccagcaccttatctattacaaagcatttaatagaattttaaatatgacttctgactattctgtttccacagcaactaaattaatattgggtcaaagagtcctattgaccacttattttgtactatattaaagttggtgttgatgaaacaggaacgtgggcagcattctacaggatacatatttgtaaactttagttaaaaaataatatacaacctgtatatagaaaaaaaggagaagggggcagcagaggatgagatggttggatagcatcaccaactcaatgggcatgacattgagcaaattctgggagatagtgaaggacagggaagcctggcctgctgtaacctatggagttgccaagagtcagacatgacttagcgactgaacaagaacagcagcaatacaaagtgtgataatgaattcagaagcaaaggaaaatgtctgtgtctgcagtttctaagcaataaaataaaatgagcattttatgtttttaaagattcttcccacaatactgatttttcttgacccactcttccagctagaattgtagcttcttttctttgactctttggagagcacttttgagttactcaatccatttgtctgtccatccattgcaccttctactgagagtctctcttgaccacagattagatccaaagtctcagaacaggtgcagtggcatcatctgtcaggagatgagtaaagtgcttgttgcgtggtctccctcctccccttgttgagatgtctgtctgtctccccgctgagctctgctgacggcccttccaaatgctcttctgttccctgtagacgcccctaagcctcccacagaggacacctatctcaggtttgatgaatatgggagctcgggacggcccagaaggtcagctggcaagtcacagaagggcctcaacgtggaaacccttgtggtagcagacaagaagatggtggagaagcatggcaaggccaatgtcaccacgtacattctcacggtcatgaacatggtacggagacagtcaggaccccagccctctgcctccctgagacagctcagagtcatggagttcccgtgcgtgagttaaacagcagatgcagccacgtgattgtattgaaagaaattaagttggaaggaaattgccttcctacataaatatatttggtcaaatcaatgcatacttgctcatattcccttgcagttttggaaattaaaaaatttttttttttttttttttgcttttctctgatttcaatttgtttcaacaggtttccagcctctttaaagatgggaccattggaagtgatataaa

SEQ ID NO: 27081 - DNA, 680 bp, Bovine  19866881455524
  misc_feature (1)..(1): n is a, c, g, or t
ncttcttggcatcacatttaacaagccagaggcctggaatctaagctcacaccaatagagagacaaaatcttagatcatcttctctaaccgttgccaactcctactataaaaaactaaatcagcatttcttagagtagctagttttgaaagacataggatgaattgttctctagggcctgtttaagaatttggaaaaaatataaggcaatttaaaaagcaataagccattttactcagcagtctggccatctaaaaatgcattcagctccagctctcaattttgtctcctgcatctttgatcttcatctctaagaaataacattgtgatgcttctctccaaatgaatatgttactggaagtgtccatagtgggaaagaataaattggaaaatgcatataagcttctttgtagacttcctggtggctggttagtttaacttgcacacttgaaaaaccatttacctgtatccaaaaccttagtgcaagaaaatatgcagtaagtttctgctcttagtaaggcgtaaaattacaaaatgtactaatacttataatccaagaataactgttagcattaaaaatttaatttgatatttaatttggtgttaatttcattttatgactacaaacactgtttctcagtcataatactctccatttccaattaaacattgatttataat

SEQ ID NO: 27082 - DNA, 1223 bp, Bovine  19866881474784
  misc_feature (1)..(1): n is a, c, g, or t
ntaggaggaaagaggagaggaaactgagttcaggaatagtgatgggggttgctgtgaagtgagtgaagccccaggtggtttttggaatggggattatgttatccagttttttgtttttaaaacatcttttgagatggcttatctggggaaaaactgcaagtgatgagtccggttgatagctatggtagtaattgaggccaggtgtgttggtggcttgaaataggctatttcccatgaaggtagtggtaaattatactcagtggtaggttttatttaggcgacatcacagacaggacctgcagacagaccgaatatgagaagtgatgagagatgactgatttccagagactgcccaagtatgtgatagttaaatgatatgactaggttatgaatgattaaatattggccatctagatagaaagtgttgtgatcctgtgatgattctgagcttgtgatgagctctgggcaagtgaaggcaggaccaccatgctccgtctcccccaggtcgctcaggaaactgaagtatagcagagagtcaggaggccagcgctcttgaacacgtagttgaagagcttcagcaccttacaacagatgtgcaaatgtcagatactgtttttgacttactggaagatttttctatcccctttctatgatttcttttcccaaagttgtaggcagatgtgagtttggcagttgctatagaaatggaaatatcataagacatgctgaactactcaatgactagatttatctttgaaatgtatttttttctacattctttcctcctaattaattacagctttgaacatttgggtaacagataaattgacaggaggttttgcccccctctgactgaaatgatcataatatagtgagtagttctgcaaattgggtgaccccagactgtgataaatagttctttgtgaaacagatagaagtatttcaagataccttgacagcatttgaggccatgtcagtggcatgatgccagtgaagagagctaataacaaaggtttttgttggacagaaaatataagaaagtaactttaaaaagtgagagatccatgttcaaggtaatataaaatactgtcaatttgcctggtggtatttacagttaagtctttgtgaccagaaaattcaggtatgggtgagacatacttttatggtgtcttttttatttacgtatttttagtttgtacaaagtcaaagtgttcaatcttttt

SEQ ID NO: 27083 - DNA, 803 bp, Bovine  19866881638649
  misc_feature (1)..(1): n is a, c, g, or t
nctgttcttgttacttaaatatttgataggaaaacacttggaaataaatggcttccacaggggaaaaggttgcaccatttgcccaagaaggaagggggtcatgaatggttaactttgctgctccatctttttaaaacatatcaaatcataaggtactgatttcacatatgtaggaaatcttttataaaagtctgactctttaataggaatgctatactcagttttattgtttctgttttaattcaatatgaatgctatggttgacttctttaaaaaaatctcaccctcagatctaaaactatatgtagcaaatgagttaaatctgcagtacttaatatgtactgtcaaaaaattcattttggagaactgtaaactcttctgctctgaactttcgctgaatcccctgctccctgacactaaagatcctaacctgttctctttatattccttcttggagtcaacaatcccaagaacagaacatgaagtgtgaagacagaccaaacaacaaaggaaaagaaccccatgacacgtggtccaagtgtgataagtagcatcttaaataggtgtccaacaggaagcagtaacctggtgatttcactttcgtaaacacaaatgcacacacagacacacaaacacacagattatataacctggaaactgtcaggaagtacacatagcagattggtaatagtcattttttctgggggttggaactagaagcagggaagaaatcgattttgttcctttgcatttttcaataatttctacatttaaacaataacaaagaaaacaaaaggaagata

SEQ ID NO: 27084 - DNA, 720 bp, Bovine  19866881764635
  misc_feature (1)..(1): n is a, c, g, or t
nggggcccccttcgccttcgattccttccgcattattgaactaacaagtatggatacccaggcagctgtagctcctggtgaagcttatgtaatcagagctggctttcccagtgagggcctcaaactattaaaggtttgtaacagattaactgaatctgatgagcagaggtgaaagtgtttgcttcatatgtcctttttgtttgaatacacatttaggagtgttagcgtttctaatagcagggggcttcctataaacatcccatttatattcaagctccaaatatagctctggccaaatttattgaccagtatttggaatgaatatgtcatcgaactctggttcggctgctcacagttgaaaagccaataattccagaggcatgtgtcagtgggaaggaaagttgctttcatcagaaaagccggccatctggggagaagatggactcctgtcctgagtgagaccaactgcccagctcagccatgaaagtttttaaagggaaaaatccaaggagtaggtggagaatctcaggcaatgatcaggagaggaagtgggattctgcattctcgtgcatggtgtgcagactggctgagtctctcctcaggcgttaatctcgccctagtgatctgcctgcaggattgctaaggggtctgaagcaagtcattttttaattacgtgattctttggttttactgctttttgtcttgggaaaggagccacag

SEQ ID NO: 27085 - DNA, 829 bp, Bovine  19866881997020
  misc_feature (1)..(1): n is a, c, g, or t
nttgaattaactttcatccccatacttctgtccataataccctaagatatttgacattgattatcaacatcaattttggtttgatgccacctgttatgcaccatgggacttaagcatgccttttctcttctctctttcccttttttcctaagctcatgtgaattcccataccttctgacatgtaggaacactatgatacaacaaaatatttccaaaaagaaaaaatcagtctttgagtttccccattcttctgttcatgggaagcaatctcccttgcttgtaacgactcaccagtggtcagaaaactaaacctggggccccttcaatcaccatcggctctctttatggcagaagcatgagatatggcagaaaagcttcagcccttctgccaagagatcactttcatttttggacagttatgatttcttaggaaatgcttccctgtataggtatgaacttgcatctctgtgatttttaatcattgttctttggtcttttatgtccacctgagttaaaactattctcttccagctgactgctcttctactgtgtgaagacatccgtctccctcccagtccccagctcctctcttttccaaagagttctcataaggcttacctgtgagacctcacacctggtcatcctcatgtgatgagcatcactctgagagggcagcctgcacgacccctcttggcatgtctaatggacatattacactagtgaaagtgggaagtgaagccactcagtcgtgtcccactctttgcgaccccatggactgtagcctatcaggttcctccgtccatggaattttccaggcaagagtgctgga

SEQ ID NO: 27086 - DNA, 3226 bp, Bovine  19866880097095
  misc_feature (1)..(1): n is a, c, g, or t
ncatccggtcccatgacttctgggaaatagatggggaaacagtggaaacagtatcagactttatttttctgggctccaaaatcactacagatggtgactgcagccatgaaattaaaagacgcttactccttggaaggaaagttatgaccaacctagataacatattcaaaagcagagacatcactttgccaacaaagattcgtctagtcaaggctgtggtttttcctgtggtcatgtatggatgtgagagttggactgtgaagaaggctgagtgctgaagaattgatgcttttgagctgtggtgatgcttgagagtcccttggactgcaaggagatccagccagtccattctgaaggagatcagccctggaatttctttggagggaatgatgctaaagctgaatctccggtactttggccacctcatgcgaagagttgactcgctggaaaagactctgatgctcggagggttggggagcaggaggagaaggggacgacagaggatgagatggctggattggcatcgctgactcgatggacgtgagtctgagtgaactccagaagttggtgatggacagggagcctggagtgctgtgattcatggggtcgcaaagagttggacgcgactgagcgactgatctgatctgaatatgtaatgtatcagtggaaaaacaaaatgtcgaagttaactgaataagaaatgcagaggaagaaatcctcatatagtttgatgtgacttgaaatttactgacaaacttttaaaacgtcaaaaccacaggcaccagtgacagccaactttaaccaacctccagatgactgaaagtgacttattagagaggaacgccagatcctctagattctcacatgcaaatattgtgaagaaagtttaggtagaattctggtttaggtattaaaaagagaaagcttagattgatagatgaatggtattttttagttagttttaaaataaattagtacatgtactgtagtgcttacatttttaacttgaaacgtcttgatgtgaaagtgaaagtcactcagttgtgttagactcttttcgaccccgtggagtgtatagtccattgaattctgcaggccggaatactggagagggtagcctttcccttctccaggggatcttcccaacccagggatcgaacccaggtctcccgcattgcgggtggattctttaccagctgagccataagggaagcccaagactactggcgtgggtagcctatcccttctccaggggatcttcccaacccaggagtcgaaccggggtctcctgcattgcaggtagattctttaccaactgaactatgagggaagcctgaaatgtcttagagtgtgtcttataatcagtggtttcttagactcaagaaatttagttatagtgctccccctctttcatgctcttgtctctgccatccagttgatctctggaaactcactacctgtcattttacaatccagttcccctaaacagtttcctgccctataaatgtaacatgctctctcaactctttatacctgtggcacatcctctgcttggcgttgttgtttgttcagtcactcagttgtgtctgactctttgcgaccccgtggatgctacacagcaggtttccctgtccatcactatctcccagaggttgctcagattcgtgcccattgagtcgatggtaccattcaaccgtctcatctcctgtcacccccttctcctcctgccttcaatctttcccagcatcagggtcctttccaatgagttggtactgtgcatcaggtaacgacagcattggagcttcagcttcagcatcagtccttccgatgactattcagggttgatttccttcaggattgacctgctctgttctttagccattgaatgcaattttcctggcataattctcagtagtttaagactcagctctggcgtcacttctctaaaaaattttccctgactgtgtaccgcctccatattgtaccctgtgcttatctctggcactgcacttagagtgcaaatcttatatttttactcatatcaattcaacaacacacaaacaaaagcaaacatatttttcatgcagcatggcccctaaatggaagccaaattcttcatctggtgcttcactgaagaatctctgatctgtttccgtactgggggtgtgtgattgcactgtgtgatgggtttactgagttattgcagtttgttgtatagagttgctgggctcaatttgcaaaaagcagaactcattctacatattttaagcaggataaactataattcacggaatccagctcatacatattcatcagagtgctggagaccattgctaaatttttcagaaaaaattccagaatactgctacctggcctgtcaggagtgctgctgcctctctcagagcaggcatgtggaattaggagtgacccgtacctgctgctgttcgggggtcagggagccagcactaacccaatcgcacctacctctggacccccacagagcatgatatgggcactgggacatggctgcggaaaacccagataccccaggactgtgcctctgagtaggaggaagactggatggtgttcacttgcggattcaatctcatgcaaagaattgaaggacttatccagtttgcactggaaacctggtggcaaggggttctggaccaagtagttttatctgttctactggtgcaggtcggggggtgctctagaaagctgaactgaatgcttatatctaattccctacatccgccataacccggtgtgctgtgtatctcgagcaaggtagagacctttcttgggtaactttgtttatacattaaaaccaacatctcacatgattgtaaatccacgatctgttctaagacaatggcctctttgtcttagaagtagacttccagctctgaacagtgaccgcgctctactcatctttggaacacagtggccagtactgtgacttgtcaaatgaatgaggaatgtatgcatcaattaactggtgaataaaaaaaaaaaaaaaaaacaaaccctgtgtccctttgtcctttttttgatttagccagtagttcctctgacttttctttactgtctgagccacaagggaagcccctttgactttttctaatccaatggttctcaatcaggggcaattttgcctttcccgggggacatttaaagatgtctagagacatttttgagtataactattttttagggaggagtg

SEQ ID NO: 27087 - DNA, 1167 bp, Bovine  19866880220650
  misc_feature (1)..(1): n is a, c, g, or t
nactctgccttcagatgggtatatcttttcttttctcctttgcctttcacttctcttcttttctcagctatttgtaaatccctctcagacaaccattttgcctttttgcatttcttcttcttggggatggtcttgatcaatgcctcctgtaaaatgtcaacaaacctctgtccatagttcttcaggcactctgtctatcagatctaatcccttgaatctatttgtcacttccgctgtatagtcataaaggatttgatttaggtcatacctgaatggtacagtcatggaaaactaatcaaactgatcacatgcaccacagccttgtctgactcaatgaaactatgagccatgtgtgtagggccacccaagatggacaggtcatggtggagagttctatttaacctttctttagtggatcagaaaaattaggaaacataaaatttatttttaagtataatattattacatttttaaataatatgctcagtatatttaaagcaataggtctatttgttatctagagaatgtcaaaaaaaaactctggaagtggaggaaaacatactgtacatattatacttttttcggattaccatcattttaaaatttagaaatatttagtataaaaagatgtctggaagttgaagaaaaaatattgagcatattgtctgaaactgtaactaaaatactgtttaaatataagtacaccctgtttcctgaatttcagacccctggtgggcgcagcacctaacactatgcctagtgcctgatatacaatatgtctaatgtattctaaactgaacagagcaaccagctgaaatatccattggtccagcgacttccagttctagctcattatagctcctgcttctgtctctccttttagtgagctcttatcagcttcagtcactttgtcagtcacactcctccatttgttctccctttcagctagcatcagtgctttgggctgaattgtaattatttacatgctttggacatctgttatggagaggagttcccaaactcttccccattgatgacagtacatgttattaaggggtagagacaattgatgggagcagtagagcaaataaagccctccacatcagctagtggaccattcattcatttattcaacaaatattcttccaacatgtgcgatctgctagg

SEQ ID NO: 27088 - DNA, 1594 bp, Bovine  19866880345871
  misc_feature (1)..(1): n is a, c, g, or t
ntttttaaaggttctcatagaaccctcccaagtccttgcattctacaggtctctccctccctttatccccaataatcaacattcttcactcttagcagttcacacattctaaattctggaacaaaattacctaaaagctaccagaccccttagaagcaaaacacccacaagcagaaattggagcaagaataatccttctcttacagtcaggaattttaacttgaggtacctcttatggtgcccataaatgcctgtggaggcaagggagaggatgcaggtctgtgaattacctaaaactatatgcaaaattgtatgtatatgctgtttcctaagaaagcatgccaagctttcataggattagtaaacaaatactggagtcaaaaaaaagttaagatctttgttttattaggttttaagcagttatgtggggcttacctggtggctcagtcagtaaagaatctccctgcaatacaggagacctgggttcgatctctgggttgggaagatctcctggaggagggcttggcaacccactccagtattcttgcctggagaatccccatggacagaagagcctggcaggctgcagttcatggggttgcaaagagtcagacacaactgagcaactaagcacagaacaacacaagcagctatgtcactttctcaatcataaaagttagcctgggtgtccatttttatttcagctctactttttaacaataaagaatgtgattttcagaaatatcttattttttctttttaagtgccattgaaaattttaaatgtgaagtccagtggaggtcatgataaagatttctacctattttaatatgtaaattgcccaagggcttaaactagcttgctatcactttgtgctacattgtggaggagcaacttgggcacataaatagaatgagtggtaattaattctcacaagttatagtgagaatcatagccattagtgtcaaaagctaaagctgaaaattattgaaatatgtgtctaatagaactgccttatcactctctgtttctgtcatttgatacttacattacattcagaccaccaaaaacagacctcaattttcaagaaagaaatggctagaaaaaccaaaaaaatcccataaattctcagtcttatagttgaaactgttagttgttcagccgtgtccagctatttgtgacacaatggactgtagcctccaagttcctctgtccatggcattctccaagcgagaacactggagtgggtagacatgcctttctccagggatcttcctgacccagggatcaaacctgggtctcctgcattgcaggcagattacttaccatctgagctaccagggaaacattgccaaatacctttcccactctagctggcatgcagaaacagctgcagaagcaatacacatttcttggttggggtggggggagccttcaataaatatctaaaacaatggctaagtactttcccctttagatcacagttgcaaatacctagatagagaaggaagagaaaacaaccttcagttctataatcgccttctggcattttctattctgtgtgcaatcagagtgtgtaaggagaaataataca

SEQ ID NO: 27089 - DNA, 1875 bp, Bovine  19866880363703
  misc_feature (1)..(1): n is a, c, g, or t
ncccaactttctgctttcctgtggcatttatgttcttcaccataaaatcacccaaattcctagtcttcaacaggtctagcataacacatttgccctttttagtttctaaatgaacatgggtgttttttttaatccatttattacatggtcagggcataattatcacattgacaagaatctgatgtacaaaacaaagccgatgggagcctcttcctcatttattctccacacagctaaacatgtatttattgatcacatgctgagctatgcactgtggcagttaggtgcccagccttacctctcatttcatcaccatctctgctgcctccattccgctggcaggcaggtgtcgtcctgtctccccacacctgccctgtgcttcctcagctctcccaggcctgcacactgtaccccacacacccattctcacttcctatgcaagtccctctgaactctcatttctaaggagctattgttatttgctcagctcctgtctctctccttcctgagcaccatttttgaccgctcacatttaatgtctgtgccatattttttgaaacgtgactgtaaaacaaccatcgttttcccatataatacatgtataatgactccatatgaattcctcccagcgaccctggagggtaaaaaacatgccagatgccttttttcaggatctgtcagagcaaacgtccctgtgctagacaggagtacctgaggaagtgaacacagaaacaatacccttctgctttcacattatgctttttctttgcattgttttgctaagaggcataagagacacaaggcttgaaaggaaaacatgcagagaaggaaaaataagaacccagagggttgctcgggaggagagggaagagagaagagaaacagaaaactgacaaggagatgtaataaaatgaaatccaagtcacttccaaacagctgtcaacactgaagacatttttttcgtagctttatcccattctctggtcaatgactatcattatgctctcaaaacaatatcatagcaccttcccctcactagtactcttttcctttcatacctggtctgctaattaacctcaattctgaactgatccaatcatttttctttcccagtctatccccaggttgctggctattcccagggtctgacactactacaaaaagtttccagtctcaggttgatcctcagtgctcattcataatctttacttgtcttagtcttatccaatcccacagggcccacagattaataaattattggttccttcccaaactacattgataatgaggagaatagttatttatatatatatatacacgcataaaacatttacatatatataaaatgcttgtatatattttgcttcctatgtgccagaacatcatgtgaaatgccaggctggatgaaccacaagtaggaatcaagattgctgggagaaacatcaacaacctcagatacgcagatgatagcactctaatggcataaagtaaagaggaactaaaagaccttcttgataacagtgaaagcttaaaactcaacattcagaaaactaagatcatggcatccagtcccaccactttatggcaaacagaaggggaaaaagtggaaacagtgacagacttttattttcttgggctccaaaataactgtggatggtgactacagccatgaaatttaaagatgcctgctccttggaaggaaagctatgacaaacctagatagtgtattgaaaagcagagatagcattttgctgaaaaaggcccacacaatcaaagctacggtttctccagtggtcatgtttggatgtgagagttggaccataaagaaagctgagtgctgaagaattgatgcttttgaactacagtgttgggaga

SEQ ID NO: 27090 - DNA, 1109 bp, Bovine  19866880410117
  misc_feature (1)..(1): n is a, c, g, or t
ntcacttcagtcgtgtccgactctgtgtgaccccatagacggcagcccaccaggctcccccgtccctgggattctcaaggcaagaacactggagtgggttaccatttccttctccaatgcatgacagtgaaaagtgaaagtgaagtcattcagttgtgtccgaccctcagcgaccccacggactgcagccttccaggctcctccttccatgggattttccaggcaagagtcctggagtggggtgccattgcctgctcagttgtgtccaactctttgtgaccccatggactgcagcacaccaggccttcctgtccatcaccaactcccagagcttgttcaaattcatgtccattgagttggtacagtcaaatagaacctctagggaatagctgcacccttgactgcatattacaagcacctggaaagagagcatctcggtagtcagatggtatcagacaccacattccaagcacgtagttaactagtgatttgatgttcaaagttaagaccaacacttagcaatgtgttacaagtaaaaatacacacaagggtatagtccagaccattaaatcagacacactggtggcgggagcaggtcatcagtaattttttaaactcccctagtgattccaatgtatacccaagttgaagacccactgatgtaggcagtagagcttgagtatccgtgttttcagtaggtgacccaagttattcttcctagccaacccatgaaaaacatttgatcctcagcactgaggcatctatcttctattccttggtcagcttcctccaatcccctaagaaaaacaaatgtcaactcttttctctcctctctctctctttttttttttatgtcaagaatctcattctcatttagctaaacttacctcacaatttgcaagataaaaaggtgttacccatagaacatacaacacagggatggacttacacttttgacctgatgattaaggcccttcagtagttctgtgatgaagctgtgagccaaagaaatagttttgaaaaataagacagatatggattagactgaagaggaaccatttttttcagttacaaagccaatggccttgtaaattattgggaaaaaaaat

SEQ ID NO: 27091 - DNA, 1486 bp, Bovine  19866880430156
  misc_feature (1)..(1): n is a, c, g, or t
naacctaaggagaatacttaataagaccttttcactttcatattcccacatttcttctcccccgcccccaacaccccaccccttatcacttcccagctgtctccagattttagctataaggtcagagttaagcctttaggaatgtgtctctctataggcagaaacctgattccatctgaaaaaaactcttggtagaccttgggaaaactgcagttgctatcccatgtacagagagagcttttgcagtcattggactttaaatgcctgtttgttggcctgccaaaaggttacagctccctggagaactgagccagttccctctaaacccctcccactgactcatatgtttgtctggctgcagctgctaaaaaagatgagaatttaaaagctgctacacaagtgcaaaagcaataaccagaacagtggcaatatcctcaggtcttgaaaagaaaatatttactgagaaaggcaaaaggtgagggaagggacattagcaagaaaacagtggaatatagaacagataaagatgagaagaacaggaaggaaatcacgggttctcagggctggaatttattctgctctgtgaccttgctaaaggcagtctcatggatttattttctttcccctgtggttaaattttctttgacccagatttacatggaagttgatatttgataacttgtccactatcacaacattataatcattttcttcagcaatgctcagagaactttaaaagttgtttgttatttctatcctagcaatattgcagtgagataggacagaaggtcatttcctacataaagtaaagattccttaactctcaagtcattgtaacaaatccatgtttcattcagtagagtccagggaaatattggtaaaccagcactactgtcttctaggactctgactccattctgcagtctcggctctccctacccccttccatattcacctcctttcattctcaagttttcccatctctctgatcaaacaggaaagtgatctaacaagcattgatctaaagagtggagaaacgaaagtgctgccattctcagcaattcttccaccttcaaaaagagacaaaaggaaaggatgatgttcatcactgagtaattgctaataatggaactttttagtcctaagtgtgagagttaattggagataggaagactttgctgaaagcccttaaatcacactgttgagacatattaaagatatagtccttttaaaaaaatctaaacctttttcccgatgcctattatgtcacaaatcctgcacaacacatttgatccaatagtagtaacactgcaaataaaccccatgcccataggttagaaatgtcatctttactgtgcttggtacagaaatctcttccttaccagaatgtgtctcctccatagtctttcttcatctgttatcaaaagtggggtttttctttctcaaggcagaatcagcctaagagagtacttgagaatttcactaa

SEQ ID NO: 27092 - DNA, 1417 bp, Bovine  19866880481861
  misc_feature (1)..(1): n is a, c, g, or t
ntcactcattacaaaatataatcccaaacatcttattcaccaggagagtgataaaatcaaggaaaccctggaaaaccaaactgttcaggaatactggcaacagaataagagaatgccaaataaatctgaattgatattaaatatttttaaaatttagtatagtgcataatttggtacacaactaaatagtctatgtctttataaagtggtggggggaggaagagggagggcaactgagggtgttaatattttttattcgttgtttatttagacaactataagaggagagaaaattctttacaagaaacttttatcaaattcactgagacaaaaatgtttttaggcctagattatacagctaatggtcctggtttttccactggagtttacaaggatagaaactgtatgtctaactgccagcatctctgtggatttatgtaaatctttggttataatacacttttcatttatccttctctatttttacgtctgagataattctaatagtggtcagatacttgggatgttaaaacctatttggatatatgaaccacagcaactattacagcacctctctaaccagaagtccacttgagttggtttacactgccctctacagccttgagtcattctttctgaaaaataactgtatttttgaaatacagaaggacaacagaacaaggggccaagagatattcttttttttttttttttaattagggtatagttgctttacaatgttctgcagagatattcttaagcactcagttttcatctctgaatcacattaataatgttgacttgataactgaatttttaaacactgtcaaccatctttttacccatttttactcattaagctcccaatgaggaattttctttatttcaacaaataattactgcgggcttattatcatgtatgatattgtgctaagtgttagaataaccaaaatatttatggtgtgatcctttattcttcaaaatttccaaagagcagcctaagttttaacagatgattattaaagatacatatgtatttgaaatgacatttcttaaaagatcaatctaaagatgctatattacaaagaagagtgaaataacctatactcaattacaatttaatataatgttatcttgggagtaaaagaatggtgggtttgaatctggagtcctctattaggactatgtgatcatggataagttacttaactctccagatctcaattttctcatttataaaacagagatgtttgtaattcctaccaccagtttttggcaagattaagtgacatatccttgaaaccatactgccttatcataatgagtgttcaatcaatgatacctattaagttctttttattacccacatgtattttccaaaccaaaagtggggatagataagctgaaaaactgctag

SEQ ID NO: 27093 - DNA, 1449 bp, Bovine  19866880538115
  misc_feature (1)..(1): n is a, c, g, or t
ntccacatagcacatccataagaatactggaagtttttgttacatcaaagctgctagacctgcaggagaacttcttgacccacctggtgtagcacactgggacggtctacatttgatacaactatgacaagattctgttcccctcaacgtggccaggcaaggacctgctgccaccagcagagagcagcttcttccgttcactccagagtgctgctcaaatagccactgttccatgtgtgcacagaagtttgggaaattatgaatttggggaactgcagaagttacctggtacttgtatcattgcatgtctcaaagactaattcccaaagaaaaggaaagaaaatattgactgcaactagagcatcttatgtaaaagaatgaagattcctggggctatttgaacccttccttcatcttttaccttaaagtcactttgaaatgctaagtgaaagaagtcagacacaaaagatcatataatatatgattccatttgtgtgaaatgtccagaaaagacaaatctatacaaacagaaagtagattagtggttgcctagggccgggggtaggaacagaccaactgcaaatgggcatcaggaatctttgggggatgatgaaatgttctaaaattggactgtgctgatggctgagggctgaacaactctgcaaataattgaatggtacacttaaaatgactgaagttcacaatatttaaaccatatatcaataaagctcttaagaaacactctgaagtaatattaaacaatttataattttatccatattacttagatttctcaacagaaatatatatgttataaaaaagaggttgcaacattgatatcctttttttcattaaaaaaagaagttgtattttaaaggagaaaaaaagtatttaatcttgaatatgcacagaaaatgactcagaggaaatacaaggaatgtgggttttagtggatgagattaaagtttcttcgcagggaaatttttacttctaacttcatgtatttttgtatcattgtatatttttataggaaaatattccctttgtttaaaaaaatacaaattacccttaatgtctatgtctttctttgagtctaaaacacatttgtcaccaaggttctcagaacatgagttatctataattaaatgcatcagttccagaataaaatggtaaagtatttgctggttctggaaaaaatgtgattaaagatttaatgcatattttttcagcaaaactgccctgtaataatgtttacagagtgtgctatgtgttgtattgatgatatgcagacaattttaggtcagagtttggcaagtttttctaaaagagtcaaataatgaatatgctagtcattttgggccagtctgtcttggtctcaactgctctgctgttacaggtaaaagcagccatagacaattcataaatgaatagacttgactatgtctgttg

SEQ ID NO: 27094 - DNA, 2691 bp, Bovine  19866880564169
  misc_feature (1)..(1): n is a, c, g, or t
naatattacttctgccatcccacagtaataaattaataactctgggaatttcagcctaagtgggagaagccagtcttagcggttttatgttttaaggcagaactcaaattatgcgtgaaatagtttaatttctgctgattttgaaggttggattatgaaacaccttccaatgtggtggaaatgatccttgaatatattctcaaatctttgatgttttagtttctacattatattctacccccaaattcatcagctgtagcttcacaactttcagcttttttgccttttagctgaaggtgtgaattcacaggggaataactttattgaaacataacagtgaaatgtatcttgactaataaatgtttaaaaggcagaaaaatataaaaattctaatcagagatgcttgaccaaaggctagcacacaacatagaagtttttttgaattattttaaaaagtattcagcttaaaacagtttttcctttttatacagatatctgttaactgtatgacagagaaggtaaaatgaaatgtgtgcatctatgtgggaaggcttaagggtatattaagtctgtaatccagaaaaactattttcaagattgcaatggatgggaacagagaagggacaaactttaaatacaggcaggattacttgtctttttgtatttcatttagctgcactttaattttcttcttcctcttttttttttctcacctttttttttcttaagctaaactggcagtgaaatgctgtctgaataagtcacaactcacaaaaaactgaacagtgcattgtaaaataggacacaaaacaaaagacttcatctaagagctgagatcatcgggctgggaaacacagacccagtgcagcaattcaacagtgtttctcagagcctgagacagtttcacaatttttgatatgctattgccccctgctgttcacagtgaagtactgacaacagaaataggttttcctaacactccagggttttagtgcaatatcatgctatcagagaaagttagacaaagcatttcaaacatttcaaatagaataatttaaggagttgttttctaaaaagctattaaagaaatcccaaagcaccttccctacttcccaatatatcgaaaagaaatgtatgattcagttaattgaatgaatcatgcagtttcctctttaagtttctgaagagagcagagcacaaggcaattgagatagcttggaaaaaagctgatgaagtgagcagagaaaatggagtgcaaaatgtgccaaaggagagggtcatgaataatttacatacaacaggggtgaagcagttcagtcctgaacagatcattcacatttttccaaggatgttggataaaactgttttgtctccacagaagagcatggatgggctatttgtgagccttcaggtcttctgccccttgttcttgggtttggtcatggaaacttaaaaccattagggtatgaatttgggtccctgaagcagagcagaaggacagaatccttggagccgatttcctgatttactctgtcatttctaaaggggtcaggtctatctcctggatggaagtcggtccatgtgcagatgtgtgtgtttgagcatgggagatcatgttatttgtttcagaactgtagcaactgtgggctgctagaataatctgtattccagctcttccatgggattaggtaataaggtgctgccaggatcccctcacattcagtaaaagcactttaaaaagtaagggccttgtttcagcatttgatttttgctcagactctttctccatgaggaacatgactagagaagaatcttttaatatttagaaaatcacatgcatatttatatacaaaattacatcctgttaggataaacctagaaatccagcctgaactactcctcaaagatttagctttggctctagatattgctaagaatgctgtttctaacttctgaagtccctacctcaaatcacaaatggtggattttgagaaaacatttaaatcatttatttcaggtaacaataagctgtttccttaatacttgaggtagttgcattcacagtgttgattttagtgcttatagtattttgtttctctctcttatgtgacattttagtgtttatttactctcttaaatttatattcttcattatgtgctgtgcttagtcgctcagttgtgtccaactctgtgaccccatgggctgtagccctgccaggctcctctgtccacagggattcttcaggcaagaatactggagtgggttgctatgccctcctccaggggatcttccaacctggggattgaacccaggtcttctgcattgcaggtgaattctttactgcctgagccatgaggaaagcctcttcttcattagggcagatgttaaagatagggtgaaaaatatgatagactctgcatttaagctttttatagtaatttagcaaaatgtagaacaacaatatgataatcatataagaaggagcccaagaggtagaaaaataatctccccatcctttttcattttatcattttatttcatttcttctctttactattttattttatttgtattcattttattttttaaaattacaaatcaggaaagctgactatcctttttatgtatctttacacgatccctagtactctagtactttatacaagtgctttatataagtttgcacacat

SEQ ID NO: 27095 - DNA, 1935 bp, Bovine  19866880569736
  misc_feature (1)..(1): n is a, c, g, or t
natgtgtgatcctgtatattgactgtccattaattaattatgattattagtttaagtgacaagtagaagtttccagaaatgtcctagtcaaaaatgcagacatatatttttacatttgtacaatgtatacataaagatgttaaaagaacaataatatggtgtgagactactaacaggcagctgcagaagctagaggctatgaatgcccacaatgcaccataaggcatgctgctgaatttaagaaaggaatccaggttatatccttaggacggtttaaaaccctcggaaaacaggaaaccctcattaaacttttttttttcaacaatataaatcagccctgggaaacaatttaaaaaactgaaaaatttccaaacaggtacttcgcctcaccagatgcactaacagaaaataatcagacagcaagtaatgagtaagggaaaaagtgacatttcaactaaggctgtaatatgcacacaaaaaaacaccagcacaattacctgcactcttttgtaatttcaaaaccatttggtaagtaggtagaaacaagtatcacttacgactagaaaccaattatataaggattttgaaagtagctgaaccttccacgcatggcactggaagtgagacatttcataagagcaactataaacaagacaagttgttgggtggaagagccagttactgtcgccattggagtagcttgggggttggggggggggggcggggcggcacaccttatgagatttagatttcattacttaccacaatggcaaatattgtgaagctaattaagtaactagtaaaggaattcctatatgaaaataagacttccttcctcttaaaagtggccacctgttgggtttatcaattagcagtatttgagaaagtaaacaattatgggacaggctgtatgttacccaaaaacagtaatccaaaaataaactcaagagtttaattataggaggcttatgcaactctctatgaggtttcagattaattgttttatcttagaagcatgactatgaaaggatctaaagctacttaatgggaatcttttactattaattactgttatgagaatgaaaatctccagtagcatttaaaatcatgtagattactggaattgattttaaatttgcaagataagatgctctacatagctaaaattctgtctttaacaatacagttaattcctgaagccttatgtgaccattaattacacaataactatgctaatcatttattctggattcaaatttccctgaagactaagaaatttttatgttccatgttagcttgttaagcaactcaataaaaccacagcaattgaaagaattatttttctacatactgagatgtctaataaaatatctcacttgaaactctgtatttgtcacctgctggtccatcttctcatagaacttaaccaaatgtttgggtggctggggtttttcatgaatcaatattatttgcaagctgtaactctaaagaaatatagttagaattattcctttcaagttaaccacaatgatattgctttgctttccccttacttgctaaatccattatacaatacattttaaatgtacaatgaactcacactaatttaaggttactttagaaacagatcagtatacaatttttgaataaattaagtcacattttggaacatacactccagtcctctggaaagtattcctgtatggaaatacttctcaccaactgctgctcacagtgtttacacgcacgcacacatcacagtacatcctgttccactgccattcgttcctctactggctttgaatactcatgccgtacttactacctacagaaagaagtcaaagcatatcttttgataacctgtgtatattacaaaatttttttaaaaattagtgctggaagggatgcaaatttttgttccaactttctctttct

SEQ ID NO: 27096 - DNA, 1512 bp, Bovine  19866880623066
  misc_feature (1)..(1): n is a, c, g, or t
nctcctcctcacaatctctctccagactccctggataccttaatcgcctcatgttacttgctctgccaataggaccatacttacctggcttgctgccaattcaggttgtctggctccagctaagtcttcatggttaatcttgttattcttttctggttttgtttcttagtatgtaagtttcacaatttctttagtagggggaaagaaaaaaaccctgcctttatttttccaaataaagccttacttgtgccaataaatgaaaccaatcaaagtttctctggttggagtagaaatggggtttgggcccacaggcccataggctcagctcagcgtttctctcccatcccttttaaagtggtccctgagggagctccactgtactcttagggcatctcttagcgaaacaatttaaagctacttcctaacacctacacttaacaatgattattcctgggaactctcaaatgtcaaaagaggctcaggccacttccatatttaaaaaatacagacatgctaaacaggattgcacaaactacgatatagtttaaagatttaaacttaacaggttaacacttttaactcagatacaatattgatggcattttcagtcccagccccaattttccactggctctgacttttcttaacctggcctgtttctcaattctgcagttccacttctactctctcattcaacggtcagttaatgaatgtccactcagtgttaagttcatgcaaggtactgggatcacaaagatgaaaaagacaatctttgcccctcaggcaaatggcaaactaatggggaagagagcccagaagatagtccccagggaaccatgccttctggtattcatgcctttgatagtcctgagccctgtggcttgtaacacaaggcaagtaaatagcacgggaagtgacaaagttagggagtaacatttaagatgacctgcagtttttgatttcttccttttggaatgttcttctttgggagctctgactgcaggatgggctaccttggtggaaagaccttgtggaacaattcatggaaagaaagaagcccaggtgtcccagcatcccagcttgagcccagtcttccagccatctcatccaaggcaccagacagatgagtgaatcatcttggaagttccagcttcgttgagcccaacagttggctgttgtgtgctatgctcagtcttatccaactctttgtgacccctgggtcctgtagcccaccaggcctcctgtccatgggatttttcaggcaagaatcctgcagtgggttgccatttcctccttgaggggatattcctgacccagggatcgaacccacgtctcctgtgtctcctgcattgtaggcatattctctacctgctaagccactggggaagccccgatgcatttgactgtagcccccagctgatatcacatggagctgaagactcacacagctgatccttggcaatccatagaactcatagagatgacaaattagttgtcatttaaaccactatg

SEQ ID NO: 27097 - DNA, 1460 bp, Bovine  19866880628668
  misc_feature (1)..(1): n is a, c, g, or t
ntatcatgttcattaatatcccaccaatctcaccagaaaagtctttgagtattggcaagaggccaagctcgtggtggcagataaaattttccaaaattttaattttagcttgcaaaacttgaaatttattaagcttgttagttgtttttcttgaagtgacaggcgtctctacatccatttttttttttttttgcaaaaatgcttgccaaatacccaagtatgaataccatagttggctgccagtttttctttcaaaactatgttccatgaaaaaaacagcttatttgtaactcaaataagtacttttcctggagacagttatatttctgtaagcagcagaagtgctttatgggtacttcacattacatcatgcttaatattaaaaagacatacagaaggttaagatttaataaaatgtaaaattttatgcttcatcaaggatgttctagagctaagctggctttttcttgtatgccttctttttcttcttctctgattgaatggaggtgaaaaatacaatcactattggtagtttagtacttttgccttggcgtgtgctaaggtatcagttttacccaccattggttttgcaatgccatttggaaaattaaaatgacatgataactatgtatgtcaagatatagtcccagcttattaaagaagatattccttcttggatcagtgccggttccaaccctctactaaatcattctttctcctgtttatgtttaaatgcagggccagcttcagcctaggttttggtataaactctgaatttaagcaaaagtagttttagaattttggcttgtcagtgatacctgggatttttactttactgtcctgtctttgaatcccagtttagtaacctttccaaaacttctagaaactttaccaaactcttgctgagaagaaatgttctccaagaggcagactatcaccgaaagtaatttggagtcagaaaaggtagccttcaaagctgtcccatttactttggccaagaccatcttatccatcaagcactacaaatacttagtactatgacatttcaagggccaataagaataagtattcaagaggtagggaaaaaaaaaaaaacaaacctgtgctcagaatatcaaaagatgcaagattgaaaccataaatgtttaattaaatatctccagagtgtactattatatcatcttcattaattgttaagttagtattaaaatttcattacatttggaggcaatttgtacattaggtattcttgctttacagaaattcccaattaaattgcagggactgcttggagcaattactccctccaggttaataacagctaagacttattggatacataccagacattgttctaaatattagcttaattaactgaaatcagagaagtcaaataactttcctttctgctaaaaaatgggcagaggaaatttcaaatccttacagggccactgtttctc

SEQ ID NO: 27098 - DNA, 1439 bp, Bovine  19866880655416
  misc_feature (1)..(1): n is a, c, g, or t
ntcctgacctgtgggttcagtctatctgagttgtgcagttgcatgtatattagttatttttatgcctattatataaaagtgttaacctggcagagttctatcatattacttatacaagttttaagttgaaagcgtccaaatgaatgggatttattgtatataaaattacttaattttgaaatcaaaattagtctgaatatcctaattttgtgggttttacccatcagtttctctttttaccatcagtctaatgcagcatttattcacattagctctctctgttcactccaaagaggcagtataaagatcttgtaacttttcctgcagccagaaaatctaattcaccataacagtcacagctgtgtgtgttccctaggctgctgtagacataaccctttaaaacttagtttagttaaagaaaatagcacaaaacaatagggagaaattcagtgttgtagggcctggacccagtcatttctttcttataaagtgactttgttttgggtattttagctttatttgaatcataagcatgtcttactgctgctgctgctgctgagtctcttcagtcgtgtctgactctgtgcgaccccatagatggcagcccaccaggctcccccgtccctgggagtctccaggcaagaacactggaatgggttgccatttccttctccaatgcatgaaagtgaaaagtgaaagtgaagtcgctcagttgtgtccgactcttcgcaaccccatggactgcaagtctaccaggctcctccatccatgggattttccaggcaagagtactggagtggggtgccatcgccttctccggaagcatatcttaggaggtcttgattttactaggcgctgtctcttaggaaatagtgttaggcatttttctgccagtggcatttgcagccaagaagggacaaattaaagatcagtcagtactcacttcacttccttggaccatccacaaatctgcatgattttacatgtggagataaaagtcaaacacttttgaatagatcattctggtggatgtgggctgaagacttgtggatgtagctgtggttcagaagcaattactctgtgaaaatgaatgcagatacaatgcagatgtatataagggaaaaacattctgcatgaaactgcaatcataagttctggcattcttttttaatgtaaaataaattttagattaaataaattcgcactctgtaagatttcaaaattcttgttaagaaacgatggaacacatagtttgtcagggtgtatttagcagttgctttgaatgactgtctcttttgaaaaatattgcaagtaggagtagggtacacaggcagaagagatatgccaacagggagggaactgcaatccacatattacattgttacattcaagactgcctacaaaatctgaagcttgaggcaaacagaaaatgaagaacc

SEQ ID NO: 27099 - DNA, 1313 bp, Bovine  19866880682234
  misc_feature (1)..(1): n is a, c, g, or t
ntgacttaggctttgccaacactagggttcctccagttcaggcagcatcttcagtgaaggccttcagcagcaaggagcagccagcagctgtccccaggacccagtcaggctgtttcctagcaggatcccttcagtgagacacttccttgggaacaacttcctgcatcccagagacttctgtcacagcaacttctctgccatttctggctcagacctggagtacaggcgcaaaggagaccttccttgggtatattgtggggttgggtagtgattggtccttacattggctatattcttcagagttctctttacttctttcaagccaatccctccttaatcataagccctgcttctttatataacactttccctgtttacttcactggtttttatctcctggttcaatcctggttgatgaatataccttcatccagtaatttcctctctcctcctcaagattcagttcaggcatcatcattatactcgttcaggtatattgcaatgaatcatacaaaatttctattttttgtaggtcaaaaatagttgaatattggcagtttcagtggttcaaactaatattttctctgtagttctcatcacatacctctgtcagcacttaccccactaattgaaaataacagttttttaaaatatgtcacctactataagacacactcttgggaataatttttagtcttttattcctaatgcctaaatgcctaatccaattcacagtaattactatatgttcagaaaaaatactgttgaactaactgaatactcgcaaatcatttagcctctcaaatcttcaatttcttcctcttctaactggtatcattaacacctgctccatttaactcaaaagttcttaagacagactaaatgagtatttctttctacttccttaacacaactaaaagcagatcatgctactaaatgagtgatttcatgtgggaaaaaaatggaagaattactcttttagtatgattttatttttcaaatattataattaattgtagaattaaagaacacaaaaagcataaaaaaatattcaaaatattactaaccagagatagaactgttaatattttcatgtagttatttctagtacttttccatgaatattttaaaaacaaaaattatgaaaaaactatatgtatatagctttttaccctgttttttccattcaatgtaatgtaagaatatttctagatcattaaacacccttttaaaaacatgtttttattggctattattccatcacatgaataaaccagtaaacatttatcaagttatttggacacattatgttt

SEQ ID NO: 27100 - DNA, 1693 bp, Bovine  19866880721948
  misc_feature (1)..(1): n is a, c, g, or t
natgcctaaaaatttcttaaacctacaatagttttaattaaaacacgaagaactcaatccagatataatttacaatggtatatactcatatagaatataatgagaacggaaatttgttgtataagaatccgtaccagctatctgttcattcatactacccttcatccaaaacaaaagttttaatgattgaaggtttgacccacttgtggatctgcttcagtaaacgcactcactctgtgcaaagcagactaactattttgactttgttgtaagtaataacatccataacagtaagcctttgttctgctgggtaatttgtttcctgatgggtgttaaaaaatatagagatatcagaatgttaaacatatatagctagtaaaacattaaaaggttaacaacattatcttgtgtgcctgtggtgtatatgtggcatgctttgggaaacagtgccttaccctatgggggcttctcaagtggctatagtggtaaagaacccgcctgccagtgcaggagacgcaggagattcgggttcagtccctgggttggtaagattcccctggaggagagcatggcaaccctttccagtattcttgcctggagaattccatggacagagaagcctggcgggctacagttaatagggtcgcagagtcagacacgactgaagtgacttaactcacatacatgcatgccttattctacaacatcaggatcttgagtcacataaaggaacctactatctttaagtcatctgaccatccacactgtgctattcaaagatataaactcttatgaaacatatgtcagtatttttgattctttcttctgaaaatctaactttttaatgaacagttgagattgtagtagatggaagaggcaaagaaaaattaggctaataaaaacatcttccactctcttctctacatccttctaattgtgaagcagtcagggtgttaaaaaaggtaactacagaaatttgaattccaatccaggagtttaacttagaactcttaggagtttaaaccatgctacatacggtttcttccgtgaatattaaaaataatttcatctgtctgaaggattcttgtttaaatgaggtttaaatgagatccaaatgtagcatgcttgacacagggcttagtgcattagtatatgttcaaaatattagaaatacttttaatcagttgtgctttctctgtgtgggctaagaataagttttatactgttgatgctactgtagaaactaaattgtttgtaaattttttttgagctcctctctatcaagggttaacaagcctttctttgaaaattccaaaagtaccaacccatctaacaaatcagacaaataatggaaaaattttaccatttctaaaataaggtacctttgtcagagagtcagcggggcttaataacatactctaaatgttggatgtttttagttttcagatgaaaggcactgtggaaataaggtgtcattactgttaattttactgtgccttgacaaacaaactttctaaaatcatggagtcaagacatgtagcacagcctcctatcacattatcttttagaatatgtataaaatcaagatgtatgtatcacaatataaaaaactgtgatccccagttatgcaaatacagaattgtcatccctaattggggaacccagaattaaataattttaagaaagttatttg

SEQ ID NO: 27101 - DNA, 2669 bp, Bovine  19866880779866
  misc_feature (1)..(1): n is a, c, g, or t
ntttgagatttgttcgatgatttgtgaccgtctatggttagttttggtaagtgtcctgggtataccttccctggtggctcagatggtaaagcgtctgcctgcaatgtgggagacctgagctcaatctctgggttgggaagataccctggaggaggaaatggcaacccactccagtattcttgcctggagaatcccaaagacagagtagcctggcaggctccagtccatggggtcgcaaagagtcagatgagactgagcaactaacactttcataccttaaaagagcatgcattctgaaatgtgtggatgtaacgtttcatgtctaacatgtgtgcactgtgctaacaatcagcaaacagtaggactcaagccattctaagtaactcagaagtttattcctattgatggtgattccagaccagataagaggatgattatgctatcacatggatgtaggcagaaagaaaattatttctggtaaaatggaacttcaaagaggaaccccaaatcaaaatgtgcagttatcccccatcccctgccccgattccaacctatattaataccaaccctttatgtgatggaaattattccaacatttttcattcctgtgttcctaccagtgttcccttcattggttgtaatttctatatcgctagtgctatgtaacaatagaagacaatatcttaggaaaaactaatgacatttataaagctcaaggaaatataagaaatggttgattttatttctccaatttatgattacttctcagattacatgaatttagaggatatctaatcctgctatccaatagagtaacttaagttttttcaagttctaatgtcactttctatttcttatgagcattactcaaggttaaaactgttattaacatacagcttctaggaaatacatttagccttcctatttagccctctgccaagctctgttctggacaatgaaattgcaatgatagaaaggagagagaatatagatttagacaaggctaatggcacattctctaggcttcagaaatgcctcctgtgcactgcctcccatgtcttccacctccaattccagctgtggctttggtgaacagctctgggcaggtttcaccctgctctgtgctgacagtgcctcatctcaggcgtgtatcaagaatctagcttcttgtcctgaagcttctctgctgcagcacgtgtgatgctgtagcccagtgaggctctcccatgggggggtgttgctgccccatgggagcagccctcagcacacaggtgagatcagctgacagataaatgcttcttcttttcatccctcaggcagacaattctgagacacagtttaattaggatactgggagggttctgcactaagtagccaagaacactagtgggtactaacactaccttttttgcctggacattctttccttttccacctgttttctcccctgtctcatccttgttccctgggaccacatttccaaatagaatatgtctctacctttgtctcgggctctgctttcaagagtagtctagatgaagacagtatgcagataggttgttggtagactaaataacacaggaatataatttcccttgactctacacatgctacaaagaaacacttatttagttgggagcacagattatgataatttcgatgattttccatctttttcctttttgaaagttcatcattgatcctgatgcctgaagaaaaaaaaagttggtacaaattagcttataattgaataggcaaatttctttgtgatgacagctctaagtattttttctttgtgaggcagccctcagctatttgattggatttttcaatctaataaggagaagccctcagtctacttaatgaggtaaagctttttgttgctttggaaacaaccatatcacatttcttattctctttggtaaaaagctggagctgttagcactgtaatccttttttctaagacactcaaacatactttaaaaatgtaaaaattactggagtactgtcagaactttcttattcatgaaacactgaaagaatatcttgaaagatttaggggttattaggaatacactaaggttgcccacatgccatctctgagaagaatgttattgttaaaattttttactcatttaaggtactgaagacactacagagaacaaaattggtaaattcctctccctcctcactgaaacttatattttatgagtggggaaggtgagacagtaaggaaattaaataattaaaatatatagcacttcaaataaaggctacagataaaaataaactggggatgcgggaatgaacatgcaagttttctgttttgttttgtttaatttctaggtcgtactgagaaaatgatgtttgaacaaagacctgaggaggagaaaagcgtcagtcatatggatgtttgggaggggaccattcaggaagcaagaaaaggcatccccaaagccctcagatggaaagatgccagagtggtttgagagaggtgaagattagaagatgaggtaggaaagacagcagtggcagatcacatgagagaggggctctcgatggatgtagggccatacgatgcactgggggatattctgaaaacctgggaggacattttggtattactatgattgggtggtactctgggctttagtgggtaagcaaaattt

SEQ ID NO: 27102 - DNA, 962 bp, Bovine  19866880804918
  misc_feature (1)..(1): n is a, c, g, or t
ncagaagtctaaagctgagtctggggattcagtgttctaagtcagtcactcagccaggtccatctatacaatctgtggtcacagtgctgaattcagtatcacacagtggctacagaacacttgctggcaaacccatctctctcaaataacactgaaaactgagctaaggaaaagcaagaaatcaggccctctgttcttcaaggaagattggaaacagaagagagttaagaatgaactggagccatggagatactatgagggtttccaactcatcctttccctttcttgtgatacttaaggctaattgtcctcataaaacccacaagttggcatagagtattcagaaactccttttgttatctgtgatactctgatgtagacatagacctatcttttattctgtctacttaaaaacagtttcatttaccaagttaataaggaaaaatataatcataaaactgaaggatcactaacaattttagtgttttctagtaattttgaacattagcctctgggggatctctttaacatgcttacacacatattcatatcataaccccctggacacttttgcagccctgaatctgaacattactcagttctcggccttccctgggaaaatctccagagaacctcagttctcatctgcatagatgggagttgccaatcacttctctccccactgcagagacattgagaatcatctcaaatctggtttctttatatgttagaaaggagctcaattcagaaagtcactcaggatggttataaccttataggatttaacaattgtaaggaacttcattctacatacaatttttatgtaatttatgaaaggcagtggtgctcattttccctttccttctctaaaataaacaaaaaatgtttggagttaggctttttttgtattttcattttgcagtaaattttcttgttgttgttgttttttttttttctagtat

SEQ ID NO: 27103 - DNA, 1021 bp, Bovine  19866880827269
  misc_feature (1)..(1): n is a, c, g, or t
nattccttcattcatgatctttaaacaagtattaattaattgcctaatatcaaccaaggcttcttccagccacatgacttgtgggatcttagttccgcaatcagagattgaacccaaggcccccagcagtgagagtcctaagtcctaaccactggaccactagggaactccaggatctgctttttctttcagaacctttattttacagttgcagcaggattttgtttgagttgagccatgttgttttcacggtgagcagttatagttagaatggacttcacttgttgctaagaaaatgggttctgatgccaggaggggcatcagtcggggtctagtggtcacagctgtggttagttaactgcagaacccttccttttggatcttccttgtggttggtgttcagctgacaccagatttgatcagttcctcaggctgtgctcacttggacttgatgctccacctgattgttcacagtttcattgcaatgtgagatgcctgctttcctcctaagcccgcaatcttagtttctgagaacaaatctccaaaattatcattgacttctagttatgtatgatagcaacttttgaaacctgatgcagacttctgaattatttgttttccttaggcagattaccatttcacaataatatgcatcatctagaaagtacatcataattagatgtaaagtatatgttgacgtatatactgaagcttccagatgactcatgtagtatgttttgttgacgcttacagattagtccctgctgcttgtcagggctgtagaagcctgggaccgacacgtagcacttcactcctttggtaataagggaattcattaatcaagaaaccattctctctgaacagagatatttttaatatgttaaaacattctgccaattctctaatgctgtcttttcagtattctattgcagaaaatggcaagccacctagcttcaactctgcttgtcctttatttgctctggctgaccactgtgttcttcttattcctttgagagggaaa

SEQ ID NO: 27104 - DNA, 1592 bp, Bovine  19866880863767
  misc_feature (1)..(1): n is a, c, g, or t
ntcctcatctgtctttttccttttggcaggggtttccccctgtcgcctctctttccatgttaatcattctgtccccacatgtattaataatggacctcagggacacagactggcctttaagctcttacaatagaatgtttctagagggaaattttggagtgtctttcttcaacttcttaattttatagctctagattttgaattaaaatttcattcaacttacaaaatatctttaaaaaatgggagattttattctaaaatatttagaacctcgatggtcaatgtatcaattttactgaattagttgattttttacattactctttcctcttttgacaattatctgtccagtagtcttcaagagcaatgaaatcttgctcccaaaatgaacttcctagaaaaattcagtacttcttttagtttatagaaatatatcccttttcatagttaagtacttctggaagtgtaaatatatcacaattagataattaatgtaattaaatgcttataattaaaacataagtacttagtcataattaaagtcatatatgtctatgatcagaacagggagtcaataaacctcttaaagcctgaactaaatgtaactcagcttaagcatccaactcttactgagcagctactattcccctctgcttgccattgagaatacattagtgagcatattatatccagtccttaccctcatggagctttcattagttagttagggtctctctctactagataatcacacaagtaggatttaattactatggtgaaaatcttataactaaaaatcacaagatggtatgaaagtaaatagggaatctgacagtatttagaagttaatcaggagagtttcttaagaaaatagtgattgaattcatacctgaaagatgaaagagttggctatgcacaatctggaggaaacaacattcctagcagatgcatctataatatcttgaggcaaaaaaagagtttgttcagaaaacacagagaaggattttggatgtaatatgtagaactgggaagccatgaaatggttttagtagaggaatgatttaatcagatttacattttaaatgggcttcccttgtggctcagctggtaaagaatccacctgcaatgcgggagacctgggttcgatccctgggttgggaagatcccctggggaagggaaaggctacccactccagtattctggcctggagaattccatgtactgtgtagtccatggggtcgcaaagaattggacatgactgtacgactttcgcttttcacattttaaatgattgctgtcattgttatgtgaaaaatggagttgggacaaggaaaagtatgttagaggaaactggagagagggtgatctgggtagccaggtgagagatgatggtgacttcaatcggaaagcagatcaatgtgggggcaaagtcaactgaatttgtgattgttttttggggggcagaagtggagtggagtgtggttaggggagaatcactgaaggagaggaagtgttaagaatggttcacagacttctggctagagagtctgggaggatgctgatatcatttaccatgataggtaacgctaga

SEQ ID NO: 27105 - DNA, 1533 bp, Bovine  19866880884691
  misc_feature (1)..(1): n is a, c, g, or t
naaaaaagcttgtactccttattactggcctctgactcacctgaatgttagtgcctgtagatcagtggtctctaggctttttggcaccagggaccagtttcttggaacaccgtttttccacggactggggtgggggatgacttcaggatgattcaagcacattatatgtattgtgcacttcattgctgttattattataacagctccacctcagatccagtactcttgcctggaaaatcccatggacggaggagcctggtaggctacagtccatggggtcccaaagaatcggacatgactgagcgacttccctttcactcttcactttcttgcattggagaaggaaatggcaacccactccagtgttcttgcctggagaatcccagggacgggggagcctggtgggctgccatctatggggtcgcacagagtcggacactactgatgtgacttagcagcagcagcagtggcttcttgatgtcccatttccccttgttctactgcttaccccagcccctaccatcccttctcagtctcctgtaccatcttcatacccctgcctgccagagccttgtggctttaagttagaaataagcctgaagcgacttagcaacagcagcagccacctcagatcatcaagtgttagatgctagaggttggggatccctactctagatgatgccagattgactgtttttcgacaagaacatcccaagattagccacgaactagggtaatctggccatggtgctcccacttctctgatctcgctcctgtccgttgtcacctagttaggacagtctcagttccagttcttgttcttcagacacaatgatgaaagaaatttgagattatgtgtcaaacaggtagccttctgtctctttaccgatgaagcggacttgtctcaataaagacttgctgaaaagctgtctgcatggctgtgttataaacgagttagttgctaagggataaagacatgattagccacacaagaacacagatgcacttccacacacagctcacactcatttccacccgttcaaattcacagacccttcaaaacagaagtctgagcttaaaaagaacatgaccagtgaaactcttcctcctaaatttcaggacttcttaatataccctacaacctcaaaagaaagaacaatttgttcaacaaggaacaaagtttttagaagttcaggttttgtttctataaagaaaaatctcttgcatttcaagtatctgcagtgaaagaatttgagtattaacttttgcagtaagaagtcaactttttcataggcataaatccttaattgtttcattagtgaagaactaagtaatttatatttgaagttcaggcataccgtgtattgatttgcttaatgcagaaggtggcaagctatggcatgcagactcaatctagctttcacctatttttggaaatatttgttggaacatagccacactcattcatttagatattgtagacagctgctttcactcagagactgtgttcagaggtaaaggaatttcacagaa

SEQ ID NO: 27106 - DNA, 1876 bp, Bovine  19866880897420
  misc_feature (1)..(1): n is a, c, g, or t
natcaaaagagcagtagctttggaaagaaactgtgttgggttctgctttaggtacttatcatccatctggctgtgggcagactacctcttcctatgcatgtccttctgtaaagtggagttttaataactacttttaggctattataagacttaccaataaatcaaaaaatcaggatcatattatagtattccagttcctctcactgtgcccagagtcctataatagcctattcaactgggaccacggacctcagcccagacccccctttaggaccaaaggaatcatttcccctgctgatgacactgtcagccctctctgggaatttcctgagccaaagccacaccctcttcttggaggagcagcttgtatccaaagactggtggatacaagaggacagagtcagtcccattgacccaagccagggaaattctgaaaggtcatcccacccacagagcagggttggccaagggaggctgtgtggtaactgcaccacaggcccccactttccccttagtccagccctgcttccctacattttttcctataagaaatgtgataaagataaaatctgatcttaggagccaccctcttaaacatcctacatggctgatctctgggtcagaactggcctcttggagaaccataatcccttgttcaagaccacccacaagctattattgacatcctacaatcattttaatgcaaaatctggtaaaataaacatgaaacactatcttggccactagttttggacatatgctaagtgtcaaagcccgtgtaagtgttcagtcctggtccttcatttctcatggtcctcctcagcctgaccaccagccagtgcagaatggccactgctgctgctgctaagtcacttcagtcgtgtccaactctgtgtgaccccatagacgtcagcccaccaggctcccccgtccctgggattctccaggcaagaatactggagtgggttgccatttccttctccaatgcatgaaagtgaaaagtgagagtgaagtcgctcagttgtgtctgactctcagcgaccccagggactgcagctcctgggaccccaggctcctccatccatgggattttccaggcaagagtactggagtgtgttgccattgccttctccaagaatggccactagtgacacaatagctctaggatacttgccacactggagagctggctaacacagatatggtctttagcttttctctgatccagaacaaaaacttgcaactaccacaataaggcttttatatcattgtctccactctatgtgaataaacagtgtctagctataggagattgtcagtttctctatacagactaagcacctgttcatattattgccctgctatatacaaattaaccatttgggaaaatgagtagaacaaatatgctccacaaactgcaatgcaagcagtgcccagtttgaagataagttgtattctgtaaattgattcccattggctatttggaactcagtgtcataaatgatggccagcttcacagtattctccacaaaccctggtaaactcacaacataattaaaatgccactgtctttaataatgagctgttctttatgggggaaatattcttcacagggtatgagataaagccatgtggcaccaggaacatgcacctctctcactcatagctgtactcttctgtatgccacatatttgctgtaatcacccattttcaagatggccacaatgttgggcagtgaacctggccgttctctctcctctagaatttaaacacaagtataatgaagacttggagacctctggcttctagcagatgataagaaaaatacagaggctcccagaatgtttcttgatccctgggccacaaggatctatag

SEQ ID NO: 27107 - DNA, 3966 bp, Bovine  19866880901209
  misc_feature (1)..(1): n is a, c, g, or t
nctgggatgacccgagggatggtatggggagggaggaggaaggagggttcagaacggggaacacgtgtacacccgtggcagatgcatgttgatatatggcaaaaccaacacaatattataaagtaaaaaataataataataattttaaaaaattaaaaaaatataaaatgaaaaaaaaagaccctccttaaggccttcatcttgctgtacccataaatccaaagttattttatcataaactgcccaatcttaacaacttgcctgtcttgcagaactcagaattggctctaaaaccctgtaagtatgcttccataatttccccattttgagaagcaatcactattttttcaagttggtgttctccctcatgctatgagtcaaataaagttagtcatggttgatcaatgggcttctttggtggtctactgaggagtagagagttgagactactaaacttttcatcaaacttcctttttcttgccctgagtgcaaaatgggcctttagtcctcagaatatcttatctaactggttttcagtaaattatacataattatccctcaagcttgctcagaaatttatagaagactttcatcccaatcttgggtgatcctcacccatacggctcatcccccagctaagaacactaccgtggaatgcagataaaccttgggatggcagaagaatgagaagatagtcgttgtcctagtcctctgccaaacctaccaaattctactttgctgaattacattgatatgcaaacatatagggagtattctctgattatataacaaagagaaagccactacccactttcatgcttgaaatatgcagtaagcagtgctctctaggagtctatgttcctaggctatgttactgtatgtccctctaccaatttcatagtccttgttcaaagaaagtgtccttggacttcaatttttaagttttgacatcttgtcttctccattaactctccatgacattatatggaagagcgtgaagcatttggcttcctcacttaactatttacaaattctcctgaagcccaaattgcccacactttttcaatcgagtcaaaatttatctcaaagtttgtaataagggagatttgcacatgataatgcccttcttccttccttgtaggactgcttcacagccttagggcctcagtctgtggagctgctgagctaatagagctaattaacaatataacattattatcaactgcaacaaagcacttttgtgctcttaaaaagactaaccatgaactgacctcattttaatttgtttatttcatctagaagggaccattcagtgcccagctcctttcttctatggttgagaaagggaaagaagtggtgggagggctcgtctccttctgagggttcctgttaagctcaggtggttatgcaagtcaaggtctattactatcggtgatctgttaccaccaagcaccttcacatacttaacttttaaggagaggaaattggcttccttttattgagagaagcacctcagaataattttctaagcccttctatcaaggcagaagttttcactgagaggttactgagaagcaacttggggcacactattaaatttaacctttatccttataatatttacaattttaattacattggagggattattcaatgcatctttctccactagaatatatttttcctaatgtcataaaccacgtttgtatatagaatatgcctccctggcacataatcagtgatcttttgccacatagcaggctcttgttaggacacaaagagtccttagtaaagacttaaaataagagactgcacaagtaggaaggaaaccagtcacctgtaaggaatgcttcctaaattatgcttatttccactaatatacagtgtaatgagaaaaataactagaatggggccaattttcataatattattaatacatatcttatgctatgttttattctactcttttggtgttaaaaggccatgccctaccttttatgaaatgttggtatgaataatgttgattttctgtgtttgtaattttaaaattgacactacttggaaaattaaaattggcaactctatctcagtcatccaatttaattttattttaataaattttcttcttcataaattctgaaagtttgggaactactcttctaaggcatttcaaagtataattttcaaaaaattaaaattgtgatatacaaatatatagtatatatatgtcaaagttttttttaaactcattaatgagagaattagaaggatggcaaacctgtttcaaaggaggatatgagaatttgaaagatggctacaaaaggagagaaagctgaaataagtttactaatttagatgcagagcaatgaaatgtaacctttaggggttatcttttctataggacaaaaaaacatttgagtctctactagaaaaaaatgtaatttgtaccttattaatcttctgtagttaacatgtaactcattagagactgagccttaatcaataataaattgtaagtcaatattactttcctttggaatggcagatgactcagacaagcttgctagacagcttctagcaagagtttggaaggtcacacgctagtcttgatttccaagtttgggataattttattaagaagaacctgcctctaatatttggatggaggttatatgtatatatgtgcacataagtaaatgtggatcaaatttataggtatgaaactgaaaggaaataaacccaaaaattaacagttgtcctgacttggaaatagcattatgagtgtatcggtttgtgaggactgccttaataaagtgtttacaaactggcttaaacaacagaaatgttactatctcacagttctggaggctacacgggtgttgtgttccctctaatggcgctggggaagggtcagttgcaggtctcttctctcctgatctgcttgtggcagtaaaaggccagccttcacgcgatgttctcactgtatacaagtctgtgtccacatgtcctcttttgtaaggataccagtcatgttggattggacctggccccatataacctcatcttaatgaactgattacatctaaaatgaccctatttccaagtatggtcacattctgaggtactgggggttagaattcaaacacatgggggacacaactcaatacaaaacaatgcattaagtttttctgagatgctacttcctaaatttttagaaaaaataatatgccagcacccattttcaaaaacattcaactatagttctagttgtcagtattagtttcctaagtccgctatcataaattaccacaaattgggtggcttaaaacaacagaaatttattttattatagattgaagggctagaaattcaaatcaagctgttggcagggccacactccctctgaaggcctgaggaggaaccttttcttgcctgttcctagcttctgtgcacgtgagcgcacacatcacttcagttttgtctgacattttgcaactccatggactgtagcccactaggttcctctgtccaagggattctccaggcaagaatattggagtgggttgccgtgccctcctccagggatcttcctgaccctgggattgaactcttgtttcctgcgtctcctgccttggcaggtaggttctttatctagcttctttacctatgacttttcctgtggtcatgtatggatgtgagaattggactgtgaagaaagctgagcaccaaagaattgatgcttttgaactgtggtgttggagaagactcttgagagtcctttggactgcaaggagatccagccagtgcattctgaaggagatcagccctgggtgttctttggaaggaatgatgctaaagttgaagctccagtactttggccacctcatgcgaagagctgactcattggaaaagactctgatgctgggagggattgggggcaggaggagaaggggacgacagaggatg

SEQ ID NO: 27108 - DNA, 860 bp, Bovine  19866880982087
  misc_feature (1)..(1): n is a, c, g, or t
ntcactcagtattcattgctggggaatgtgaagccagtaggcagatcacatcacctcggtcttggaattggagaggtggcagcaggattaccagggtttttttaaaaagcattatcaacatggatccaaacaggttatgcttctcagataggagaaaggcagctcaatatacttctgaatgccaaccctaaaaatctatccaaagatattcaatttcacttttctttcttgtatgtctctacagactattttctcctgtcaacagaagaggccacctcaggctgtcctctaacagctgacactggcgctccgtcctttgggttagacctatgagctgcaccactctgccccgctctgcctggggtgccagccacagcatccttttgtctggtttccaggtcaataatctctcctggcatctgcctatttcaccccttccatcctcctccccctccatcaagaaatttaattccaagttggcaggcagaaggtcagaaatctttgaaagccgcaatttccctcacccacgctcggggctcgcctcttgcacattctgccaaatgccaacttactgctctccctcctctgtcacatcctgtatctctgccatgcccaggctgtcacctgaatcttgctctcacatctgcttccctccccttcctcagcagcagggccatcttttaatagtaacatcctgccacgtctgtcccaaaggcccagggcatcgtgtcatccatcctgggaccagcagcctcttcagagctatcgactctgggacttgcctctgtcagaggtgttgagaggcctggagctggcccacagcacctggggaaggagaactgacagtcccccgaaaccca

SEQ ID NO: 27109 - DNA, 1117 bp, Bovine  19866880986421
  misc_feature (1)..(1): n is a, c, g, or t
ngaaatctaacatagaaaattctagttcattaaaaaagtggggtttatgtagaatctaaaaaaaatgatacaaatgaacttatttacaaaacagaaataagtccacagacatggtaaaaaaaattagggttaccagagaatgtatatttcaataaaaacttaaaaataaacaaaaataatggggttttaagaggtcatgaattctaaaaactaaaatatacagtattaattgaagtcataccatgttcttattaaatttcccatttaaaaaattaaaaattatcatttcccttttaaaataaataagaggataggactgtttccatttaacagatgttaaaatctaacttaactccaatatgccattttcatagctttttcctaactgttcttgataacaaggatcacaatgtgtttggaagtttgctttgctcagtttaaaaacttggttaaaaattcagttgaatgtcctggtttgtcataggagttcaccaacaagcataacaaccaatgcttcttaaaggcattaagtagaacatttacaataatgttaattcatatagcatatatgtttttaggacttggaagaaatataatgtcagtgagaaagaattctaatcaaatttggagatactcctgtagaactattctttgaatttttcaggcttactcatacatattgttctcaaattatttgtggcttagtagagacatggatggagaaggcaatggcaccccactccagtactcttgcctggaaaatcccatggacggaggagcctggtaggctgcagtccatgggatcgctaggagtcggacacaactgagcaacttccctttcacttttcactttcatgcgttggagaaggaaatggcaacccactccagtgttcttgcctggagaatcccagggataggggagcctggtgggctgcggtctatggggttgcacagagtgggacacgactgaagcgacttagcagcagcagcagcaacagggaattcactggtttaggaatgcaaaaacaaataaacagtagaagtgggtcatatactcactatatctttattctaattccaagagaaaacgtaagttttcctattccatcactctatt

SEQ ID NO: 27110 - DNA, 1206 bp, Bovine  19866881049438
  misc_feature (1)..(1): n is a, c, g, or t
nttaccatttccagttctcttcacttgctcctgtgtatccaagttaccatctggtgtctcttctttatgccaatacagctttgctcccactcaccttctttgatcagctattggcaaatacattgcatttcttcgtgttataggtccaacaatacaataatgtacatatattattttataattgccctggatcagttaagtaaagataggaaaagaactatgcatttatactgtcttttaaaattgcatgattacctttaccagccctctgttttttcatgtggattcaaatcaactgtcttgggttacaggcattttctgtggtctgctttttcttcccaagtgggtcacacttcctgtttctttgatattttgtcctatctctttttgaagagattgggctgcctttctgggtgcatgggatcttccaccagcattcagaagttgttttgtggaaattgctccacactcaaatgatcttttgatgaatttgtggaggagaaagtggtctccccatcctatttctatgccatcttgaggccacctcccacactttcctatttccttgtgtgtctcataatctttccttgaaacgacattttaagtaatatattctagaatactggatatggatcccctcccatctctggagcttgtgtttttgttatcattgtttgtttaacaacttggatagatgatttgagtaaagtctactatcgtgcactgtgaaacctccgatgttgctcctcagagggagcagctttgggcatacatacagtcaccctgggatgacagtggtttcagtagagctctctttaactatttctctggccctcctgttagagggtattactcctttgacatcacaccaagttcttaggctccactaattgctaactgattgctctactatctttgaccatattcttggggcataagttgttctacagtctgatgtaattgaattggagctgattttcaggaatatttttggacagattttgaggtttgctctggccccaggagggctcttcttaattgtgtcttctgctggttctctctggtaaactagatggcttctggtttaggtcttttatagatataccaacctcatcttaattgcttaccaccaaaaatctccattgtatttgaggcttgaaatccccaacactttgtttcaaatgaaatcaattcctttgggaaaca

SEQ ID NO: 27111 - DNA, 1062 bp, Bovine  19866881135104
  misc_feature (1)..(1): n is a, c, g, or t
nttacacagacagcattatggagagagggcaggcaggaaggagcactctcactcacacatatagtgatttgtcacggcagcaacagttattggccgaacacataatcaacacggggctacagggctactcatatgcctgcactgttttttcctttcaccttctttttttcaaagatgaaagctattttgctgacatatctaaaaacattgttttgattttgataataaagctctttataataagaaattggaggtacacttcactaataagttgtaaatacattttctaataagaaaattcagtactgctctaaaaacttccgggttactttaactgctacttcgcaatcatgaaagacattgtgacttacagattgtatctgtttatctgatatgacacagtcctgtgaagtgggtacaagtaagcccatttcacagctgaggaagaggagcctcgcagagatttacataatctccccaaagtcacggaggggcaaaagaggggcacagcctaaaggcttgggctttaatctctaagcataagttctttcttccacatgactgcatcactgattttagttttaaatcaatacatttattttgagaggagaagtaatgccactttataagcctttttgagcatttgtttagtatcttagcatttacttagctagagaattcctaaatttccatttatatttcaaaacagttctttgtatggatttagacatactctatacactgggggaagggagggactcagagtaagaaagcatatgtatctgtgaatactcagtatacttttcttcactttgcattttgtaaatattgatgttgcagctcccagagtgctctcataagtagttatgactgacagtccatgagtgctgtgtctctcaaaacaaatatgctttactgacagagagcacgtgtaccgccatctaattattctgagagccagggtggaacaaacaacataattcctcagctcagtttggcattctccactgaacacgataggcaggttacagtttaacacatactatgctgctgctgctgctg

SEQ ID NO: 27112 - DNA, 869 bp, Bovine  19866881176175
  misc_feature (1)..(1): n is a, c, g, or t
nttggtgatggacagggaggtctggcgtgctacgattcatggggtcgcaaagagtaggatacgactgagcaactgaactgaactgtaactgtatagcctctaaatattgctggtgagaaacatagcagtctatttacaaaagcaaattcttttataagtatagagcagcatcatgccaaatggaaatacctatggtccaagatacttaaactgtcatcaacctataaaaagcaaaccaaaatagattatttgcattaaagctattatccttaaatgttaaatcattaacatttggtggtaataagagtaaaaatcagaaaaaaaaataactttttcatatgtggtttgaatagttaagtcagaaacagaaaatattgggatattttcatgtctctgtaaatttgttctcatacttaatggccttcatatgcttttcaaagctctttttcaaaatctgagccacataatagtctactaaataaacacctaaggagatatttagagcactatttgtttcttattttggcagattaggaaaatacaatataaaaatatcatctcaagaaaagattaaatttttacaaaagtgtcaattactcaccactggtctttggtttccccatttgtcatcagtgctaaccctattctaccctttctgctgcttctaccgctctccagatatgcatggtctaacctgaccagatttcttctatcacaaagagaaattatctatttcataaattgatatctttccctacataaaagtatttttaaagatgagtctgtggcatgattgcaaaactaaaacaaggcagtggtttactacatgaagaattccaaacacaaatacttagaaagaggaaaagttt

SEQ ID NO: 27113 - DNA, 1490 bp, Bovine  19866881303707
  misc_feature (1)..(1): n is a, c, g, or t
ncagcatacacattttgatatatgttgcagataccacccccaggaaggtgtaccttgtttttctattatatccccttttttgatgtttgatatatttcctattagagactgccttgttttgttgaattgttagtccagcattagacattttgatgataaaaataagagtgttttctataagcaactgtaaatattttttcttttataatggtttgtaattagctttgttttagatttctgttaagaatgtattatctgctcaatatttagcattcaatttttaaaaagatatgctctgtatatcccagcttaattgaggattgatgtaacttgtcatgatcagctaggtcaggaactttttcatttcaaatgctgacttggtgaggtggtgtcaggaagtacttaatgaccgaaagaaactagagaaagagattagcaattatattcacattgtaagatctatgtagctctttatttattcaactgacctctaactcaagtcagaaaattatttaagtcctctgtgatagcctacagatgataaatcttcctgttggtgtttctttacctgagttagcattctagagttgtctgttttcagttttgtgactgtggcattagaagctttgtgtaatttaattgtcaaaacttgaccatttctttaatttgttattgggcagttcatcaagcagtcttataaagtattatcatggaaggagttatagctctgtaggaattcttctgaagctggactccattcaggagtagaaatgttgtacatttaaccaaataatggaaaacatccttgcatggggagttccttatataacagagctaaaagaaatggagacagagcagttactacttacctagcaactccactggaccaagctctgtgataggtacttatgtggcatgatctttaattctcataactgccttaaaacatggctataatactgaaacagtctccatttaacatgtgagagactaaggcattgatttcttaagtaacttacctatagtcacctagctagtaagcagaagagcctaaaattcaagccagtgcgtcactcaatggtaatatacactactcgccctccaacccctaatccttacctcaccccccacaaacacacactttttgtatcttttggtctccaattttatatttatttttttactacagtagaatttcttctccccttatcagagatgttttggtttattacattatgtaccccaaacgtaaaccatttttttggatctcaaattgaagagttttgctccttggaatcatactaagaactttgatatttaaaagtactctcatcatcatttttcttacagaagaggcaatagcgtgttctgttagtaaactcttttaaatctttatttccagatcagtgaatagaaaatccagacaaagtagtgctgtgctaggcagtaataaaggccctccaaagatgtccctgttctaatcttagata

SEQ ID NO: 27114 - DNA, 676 bp, Bovine  19866881344592
  misc_feature (1)..(1): n is a, c, g, or t
ngaagaaacactgctggtggcctcaaaaaatattgctcagatcaggacaaaccaaagccatgcgatagtctgctgcttcattaagttccctctctgggttaggaattttaaaaaatattatagcatctggctgatgtttctgctcaaagggacctttgagtgatgcacaaaattgtggaatcaagtaactgtttttttttgtttttaagatttcttcttcaaatttaagatactagcttgagatcttccactaaggagctgtgtgacattgggaaagtcacttcacttccctgtactgacaggtcaggctatgtgatctcagaggacttttccaactctagattctgttttccaatttttcttaagtccttgaactatgagtttgtgagtggtggagaagcaagggagggaacaagaaagtctttttcagatgccttcgtgttttcaggatatgggtcatccaaataaataagtgactgaagaataaatgacttgacttgttgttgatatgggataaggaactgggcatgcttggctctatcccttttctcctcttttacttttgatgctggaagcatcatttccggttggcttttcaatgtctgaaatttgttttacaaggtagtttcccacatagggaggcctgtagttctccacttttgcatttgacttgatg

SEQ ID NO: 27115 - DNA, 1057 bp, Bovine  19866881368275
  misc_feature (1)..(1): n is a, c, g, or t
ntgaaaagtgaaagtgaagtcgctcagtcatgtccgactcttagtgaccccatggactgcagccaaccaggctcctccatccatgggattttccaggcaagagtactggagtggggtgccagttatacactggtcattttggagactgttggttcactgaattatgcagatcttccacatgttgactcatttcatcacacaatatcaaaaatatcaagttccttaattttatcactgtttttcatcaggaaacattttgcatgtcaggatactactggtagtagtagtcgcttagtagtgcccaactctttgcaactccatgaactgtatcccactaggctcctctgaccatgtaattctccaggtaagaatactggagttggtagccatttccttctccaggggatcttcccaatccagggattgaacccaggtctcttgcattgaaggcagattctttaccttctgagctaccagggaagccctgttaggatactggttttccaaaattctaatttttgtttgaaagttctgattttatcattagcaagaaatactattggttgtttgctttgaaggacagttgctctttatttctgagaaaatacctgccagatactcaagtctgagtaaccatagtttgtctgtcacttgtcctttcaaataaaaatgctactctgtgaaaaaagtggctaattcaacttgaaactcaactgcaccaatgcttttcctcaagacaaccattgtacttctgtaggtagcagaagcattttatgtatccttcccattttgtctcacaggttaaaaagacatgccctgaagggtaaggatttgataaaattaataattttcaccgccttctcaaagacatttgtaagtgaaaatgacttttctttcttttccttctctctctttttttttttaactgcaggtgtgtggtgataaagaatatattgactattactacagcttgatgccactcttttgctttctgttgaggcaaccagagttatatcccctgtcagtgaaaacatcaaccccagaaaaaggtaaatag

SEQ ID NO: 27116 - DNA, 1115 bp, Bovine  19866881372701
  misc_feature (1)..(1): n is a, c, g, or t
ncctgtacattgtctaaaatgtaacagtaactcaacaaagatttgtaaaacaaatgaacaaacaaataaaaggactgtgaattttaaaaaggatcagagagaatagggatgagatgggtgctagagaatgttgggtgtcccaggcatatggtgaccagaatgtatgttatagtcatcatggttattcctgcgtagtgtttaaattttctaaagcacctttatatttgaactagcttgtcatactcactaaaatccatgtgaggtaggtgagacaaatagagggaatttcttttaaagatgaaaaaaatgaagcagggaaaggttaaatgatgctttcaatattatatagctagtagtagcactggggtagtactaaggttctagatacctagttctgcaagctttctgccctaggtaggagagaggggaaaggggagtcaccaaggagtcacttaaggaccataccataaaaatagatctctaagtagacaatgattttacactaatggttttgatagtaaagtcagtaagcactagcattagcatcagccagcccttctagccaccatctcatcagaagcttcagcaacatccccaacagggaaggtattctatgatacatccaactctttggaactcctttcttcccaagacaatggatttcatcttctgttggttttgagcactacagaattcttctggatctttaacgtaccttttctcctctaagtgttatccactgttcctttttcagttcccttgttactacatagaacaatctaacccctttttcatgtaccatttgaattatgtgaaacagcactcatgaccgcttcctgccttgagtcgtgccttttccaggcagtctcagttctttaaatcattcttcctgttcctgattcctggtcttctctcaaaccctgcctattgtctttgtcagtttactccttcaagtgggctatccagagcaggtaggggctgaggcagtgtgcagtacagcatgaccatggctcccttctctttgaaacaaaatttctattactgcagcctaacagagaactctcttctttggcagtcacatctctctgctgactggtactgggcttcttctcaaa

SEQ ID NO: 27117 - DNA, 1735 bp, Bovine  19866881403088
  misc_feature (1)..(1): n is a, c, g, or t
ntcatttccttctccaatgcatgaaagtgaaaagtgaaagtgaagtcactcagtcctatccgactcttcgcgacatgcagcaaatccaagtttttctttttggaatgtcctgaaaaaattttttgaatattttccatccacagtttgttgactccatggatgtggaaactgtggatacagaagactgactgtattccatttctttgtattccgagtcaaaatatcaaggggacaaggagtgggagtggagcttctctgtgagaggcagtaaacatttgctagattccagtggtaataatcaaagacatcagttctaacatgtgtttttaacagttgtgagaaggcagcaaagttagtgttagcccatattagcaaatgtgtatagactcaagtctgtcttcagcccatcttcgaaatctgaactaactggacctgtgagtattatgcatgtgaacaggtgttggaaggggaaaaaatttactagtttggaggggtagcaaatagaaaataaatgcttagagatatctgagatgtttaaaaaaataaaacttagatcaggttccatttgatgatattttagttaaatatcaaagctttttcatagtttgaaatttctcaggacaaatctctttaaaatgtcatggatgacaggtttgtaaaactgcgtgaacccatcatcctcttgaaatgctaaacactgatggttctaaagaaagtaaatacaattttcttgaatttaatagaaaattttggtgtttttttttttgttttgttttaagctcaatacattatcacatacattcttaaagggaaaggaaatatagaattatgccaacttatctcaaaagaggattaactggtatatgaagaaagatgtaaaaaatggataaatgaagaattagatgtttaaatgtgatcagaaatattgtgaaaaagaactgagtgttgaaccaagagtgaatagctgtagatattgagtttctcagactgtgaatccctatcataaaacatgaatgtttgtgtgatcacttatttcacagctttgaaaccaatacattctttaacctaacatcatagaaaaagaatttcctaattttatcataatcaggccactctaattcccaaatttctctggggtttttcttctttctaattgtgctggatggtacctttaatattggactgaaacacactgaaaattctcaaatcttttttctcttactgttgtcttcaagaatagtcttagagatgtttttaaactatgtaaatcgaagaccttgaataatatctgtctcacaccttctctttgatcctgtttcctatgccctcagatgtgtctgtccatttcagaaagaaaatggggtttcaactttgttttccagttttccaatatgactttcaaagacattaagataatcctttccatttcactaaaagttatttttgtcctgttttttcctccattctcacttattattataaatattctgaatcattaaagtgtttgtgtgtaatcttactttgggatttagccttacttgtgaaaatggtgaaaatcctaaactttttaggaaataaggaatgaagattccagccttgaagggcattgaggttttcagcatcataacagtttctaacttcttaatatacagtagttaattaaatcatcagctagacatatcctgtttattgctcttttagattaaaataaattaaagcagaaaagaaacacaat

SEQ ID NO: 27118 - DNA, 1026 bp, Bovine  19866881469315
  misc_feature (1)..(1): n is a, c, g, or t
nttaaagaacattttattctagaatggaaaaaaaaaaaaaaaaacctaaatgccccacactggtatggggctaacataaacacagaatgataggcagttaaatttaaaaccagaataatgagataatcttacagcatatcaatgttgctatatgatttcttatgtacagtgttttggtttccatgaccggaatttcagaggccatatgatgatgaatcacggtcctgtttacagtgctaacatttttgttctcccttgtagctatgacaggagtctgaagagattttcagctcattctaattttcttccatgaagctgctacttactgtccagggctgatgctctttgcagaaagtatcctgggtagctcagggtttcaggatcttaaaagtgtctcctaaccagagtgcaaggacctaaaggcccttaattaagtttctaatcacaaacaagatggtcttgtattaagggccctttgaaagtagcagcaattgtgtcattgtgtctccgtcccgtcaccgtatcaaataggattcttattttagcactgaaagcaattctttccttgtagagagtgaagagaaactctcaacagtcagtttgacgaacagaacacagtagagcaaaacacatttccttttctctcccacaaggctgtggagctgactttattttatttgacaattacagagcgaatgctattttacaaatcttgggctgtttaatcttcgtagcaaccttgtgacataggtactattgtcatctccagtttacagaggagaaaaggacacactgagtgtgtaaggccagccgatagcgagcccagatgcaagtgcagggccctcagctccatcactcaggaacatccagctactttcttctcttggtggaggtctccactgtctacgtgccaaacaaacagcactagaggcaggacattttagacatacttaaaatactccataaatttttattttaattctttctgcctgtacaaaatttatgcttaataaaagagaaaacagc

SEQ ID NO: 27119 - DNA, 1650 bp, Bovine  19866881585517
  misc_feature (1)..(1): n is a, c, g, or t
ngttgaggggttctgccccctaaacccctgaaatccccaaagtgtttcagcaaagcagttttaaaggccaggtgagggaagggggcctcttaggaattgtgagcatttcgtgcacagttctctgattattttgatgttgagctaacaggacagttaacatcaatccttagaccccattaagtcctgggggcaatgcgttcagaatcatcaaatactgtagttaatttcttccatttgatgctggtctttagcctctgaaaaactcaggaaatatgcatgagttactattatctgggtccttcagagaggagctaaagcagaagatatgggggagggagtctgtctggggaaggccccataggatcatgccagttacattttctggaacagtttgtctgcctccttttaggcaccaagaaggccagtcctggctcatttctaagcaataactccggttaagtttttttttcccttcttcccttcaccatttttattccctggtgcttgttcctgcttctggactcacagcaaggaggcctgcagcttgagaactatttgccacttaacgttcctcttccattttctgttcacagaagtattttcttaatttctgtgaaggtattgggatttagttatagttgatttaaatatgtatatcctgggacatagataaaccatttttatgacaatctttaatgcttaatttgatgatactaataaaattattttgaaagtgatgaaaattaattgactgtacttgctgggtttagtaaaagtttaaattgcatgctactttaaaaaatattttcaaatgttctttttcaatgtaattacccctagaggtatctcattatacatccttggataactttatttcgggtgttatctaaatactgcaatatgatgtagtgaaagcaaaaatgattttattgccaggcagaagtaggttctcatctcaatttcaatagccgagggattgaggaagtttctaaattgtgttttctttctgaaaagaaaacatcacttcaaatatgaaagaggaattagatcaacatgctatttaaattttattcagcattagttcataaaaagacagaaactactgtacttggcatgcagatcttcactgatttacccctcttgtggtcatggcaggagtcactagttaaactttgtagtttccatctgagccaagatcgactgcaaaattttcagcaaagagcatctactagctgataagagatgacactgcagaaaactgatatatgattttagctctatccgatccctttcacctttatcactttttccctaatatactgcttttatttattgctgatatgcatctagcaaataaatgtattcataaggccagggaaatgttaatatctcatatgatttaatttcagatgtgtcacttttctgaaacagactaggctacagaataagtcattttacagaatgcattctatttgagtgacaataattatcaactggtagaaaagatatggataagaaatggctcaacagaataatagtttagcataaaagcacttgagagagcatattctacaaatggtgaataggtgttgtcagaaaaaagtttttcatgagaaaataattttatgataaaagtctgcatttaatgat

SEQ ID NO: 27120 - DNA, 6571 bp, Bovine  19866880515703
  misc_feature (1)..(1): n is a, c, g, or t
ncttttataaataaggctgccataaacattcatattcaggtgtttgtatttcagctctaaaatagaatgctataatatatatctcataagctttcggatccaccgttatgatgatggaagggatgggaattgtcctaattttatagctgagaaaaactggagggaccaaaagatatgtggcttacttaaggctcttccagtacaagactgatgagggttcctttgcctcagtttcaaatgtctaaggtagcaatcaaggtcacaggctttggagcccagacagccctgggaccagacaccaactatgttatgtactagctgggtgagtatgggaaagttttcctactttttaaaatcttactttcattctctgtataatggaaacaatagtattattactattatctgatgttgttatgaggatggaatgaggtaatgtatgtaaactctaactatgatgtctagcatatagcgagtgctcaataaatggtaaccatcatatcctcatcatgaagatgagatttctgcatctagtccaatgttgattctctaatttgagaggatggaagaatctgaagtgtccccagcacttatcagcatgttaaaactgttttgtctagtagtcaaatctcttttcaaaaatatttgtgtaaaattgaccctcctgggagttgagttaggtttatcctatagcacttagtattgacattgctgcatatatcctgaggatacctttgttgttgttcagtcactaagtcatgtctgattctttgtgaccctttcatggactgtagtccaccaggctcctctgtcatgggatttcccatgacaagaatgggaagaattctggagtgggttgccattccttctccaggggatcttcccaatccagagattgaacctgtctcctgcattgcaggtggattctttaccactgagccacctgggaagcctttgtttcttctttgtagaaatgtctagttaggtctgctccccatttttcagttgggttgtttttttgtcgttgagttgtataagctatttgtatattttggaaattaagtccttgtaggtcacattgtttgcaaatgttttctcccagtccatagattgtcttttcaccctatttatgactttctttgctgtgcagaagcttataagtttgattaggttccatttgtttatttttgcttttatttttattaccttgggaaattgaactaagaaaactttggtactatttatgtcagagaaaactctgtgtatgatgtgaaagtgcattataacttcattgatttgtggctctccaactttcccaacatcacttactggagagactgtctttgccctgttatatattcttgcctgaagttgttgatgtttctcccaccagtcttgattccagcttgtaactcatccagcccagcatttctcaagatgtgctcagcccataggttaaataaacagtgtgacagcagacagccctgctgtactcctttctcaatactgaaccaaacagttgttccatacagggttctaactgttgcttcttgacccacataccagtctctcaggagacaccttacttataagtaagatggtctgcttgtcaataacttcagagatgtggatgataccactataatggcagaaagtgaataggaactagagaacctcttgctgagggtgaaggaggagagtgaaaaagccggcttaaaactaaatattaaaaaagctaagatcatggcatctggtcccattacttcatgggaaacagaaggggaaaggtggaattagtgatatatttcctcttcttggactctaaaatcactacagatgatgactgtagccatgaaatcagaagacagttgattcttgacaggaaagctgtaacaaacctagacagtatgttgaaaagcagaaatatcactctgctgacaaagctctgtatagtcaaggctatggtcttcctgctgctgctactgctaagtcacttcagtcatgtccaactctgtgcgaccccatagatggcagcccaccaggctcccctgtccctgggattctccaggcaagaatactggagtgagttgccatttccttctccaatgcatgaaagtgaaaagtgaaattgaagttgctcagttgtgtccgactcttagggaccgcatggactgtggcccaccagggccctctgtccatggggattttccaggcaagagtactggagtgggatgccattgccttctccctgggaggcatatatatagtttggccttaatcctcatgtctgacccctgagttagatcattacacacggcaaacccgaaaagcagaacacttagaaatgctctacgtggacataacaatcctaggtcagcattgtctgtgggtgtttatgctagaagctgggcaccagcttactttcatgttcttaatacatacaaccgaatgagcacatgtcctactgtcaataagcaatttgtcaccttctctgggtctggctttcgcctagcctagaatgtgctctttcttggtgaatgttccatatgaacttggaggaaggtgttagcactgttgaatactttttccattagatgtagctgataggtgctgtttagttcaactgtctttactgattgccctgccctgccaggcctgtcgatcagatagaagggtgttaatattcaactctaaagaactgcaaagagaaatggataagtccatgtctttcacattttgacattatatatgttcacacagactgttagagtcgaccccttaattttgttgtgctcttcttaatccttgataacttcctcagtctttcaaagagagacttgctccagctcgtagtgtcaacatggtatatcttcatcccattacttatcatcttcatatgaaaaatgagtttcttgcagacaacatcattgagtgacttgcctaaaaacatgtttgaaaactacgtggactgtggctcactcccttcagtggcacataataggctgtagctaacccatccattcaccaaattaaagttcccacttcaggggtccccaaacaatgctgaataaatgctgtcacaagtctgtctttgtaaaccggtgctttcattactgtggatggactcccaagagtgggattgctagaatgtgttgcacataaataagtcttactgttgccaagttgccttccaaaaaggacaatatacactctgctgcaaatagtactgtcttcattggagccaaaggcagaataactgggcaattgtccaggaagttggaatccttttgataaggtatctggaacattcaaaccaatactgtcatcttgtagcaagctcttcaaatttcagttaattgctccaacacaatccctcctgccctatcgatgcatcctgagccaatggctaaatgctgcttaggcacgtttggatgagcctttttatgtgaggagaaaaacttgaatttggttaaatatttagactcttattacctgagttagttcaggtgatgattaaagattgagttcagccaacggttaatgcttgttctctctagcccatcctataccctctaaatagatgggcatctagaaactgcagtctgctagggaagctgtttgaatgggctataaccaaggtgttaaaccaaactgtttgtggctttggaatgtggggcaggattttgcacaacagctttatctctcgctctgctcgccactaataggtcattaacttatctgggctatgaatgcatccccatcgcatatgtctatcaaaccataaacccacagccaccctggcagactgcataaggcagtgctgtagagacctctgtcttggagccaagtgctttatataactccatggtggtggccccaaccaacttgcctttcaacagctctgcgtggcacctttgcctgtctcatggtgacaagccaggaccttcttcaggcattttctcagcaggttaatcaaatggcatcagtgggaatgtttacagcttgccgccacttagggagctttatcagggtccttttaatatcagcccgcaacccaaggctgataacagaacaggagagggggcggagcaggggatggacagcttcgggagagctggtgaagaccaaaaaacaagatgtcagtttaatctgaaagacctcccatagagtccctgctgtagggtggcagtttggtctggaaattcttttcagggggtcgcgtatctctagttccagactcttggcctctagatctgtaggtctgttcaacactagagcaccaaccacgtaccaggttgtttctatggtgataagatgctgtcctctctctacttactcataaacgttgagctaagatctaagcctgagtactactattcctgcctctgaacaatttcctttcttggccattcttgaccctacttgaccgtgggtatgttttgaatgctgtttatgttttatgatctaacaagatatgaagggttggaaagcagtttgaaccacaccatcacaaggaatttgactatatctgagttttttacccatatttggggagaatagaataaaagcattaaagcaagaaacctaaaggccaagataaaacttgaggggctccagtgaaagaaaccaagagggaggcccctcttctgaagttcacacttgctgctttcactgaaaaatagaccctttgtacctttcaaagagctaacgtctaccaatctgttatggatattctcctgccaacctagtatggatgtttgctatctgaggcattttgtgctaaaagaggcaacatgcaattatctgactacagatgaaccacaattttaatcccaggcacatctcctggctttaatcccatgctgacttcagtgacaccatgggtgtccgctgctgtaaagttagccttggtaccttaagcaagctgaatattgttacctttggccctctagaactgcatgatgcattgaaattcagcggatgttctgaagtctgttagagcatctatcgaagagtctagtcagtgtcaggtctaggctagacacacagagtgaaacatacagagcatcttaatcaccaagttggcaagtctcgccctgtccacctaagtatttttcaatgatccactgaacttctgtgacccccaggtgcttaccctatgagctgatctgcctcaatccctccaggtatgcaatggaatccttgttttccaagtgaagttcacaaggacaacccacaagtaagacagtgaaattcaaacacgggtgtatgaagtctgtttctctgtaccagccacctccagctcccacaattggcaaccatgtggtcaaaatgagtaaagagctgacaattagatcaagggcacagactaggcaatgggcactaaaatatgacctgggagggggttctgggagcagggagagggctgaggtccctcagtttaagtttttagattctgacttctgcatcaccctctcccttgtgcctggagttcgagcatctggctgaaaccccacctagagaatagacataatcttcagtgggtaccagtttctgctgggaacggagggctgagtgtatggctgagtcagtgtctgtagagcagttatctgaccacctcacccttagcttcccaacggcgaggtctgaagaccccattgagtggatcaatccattttctttgtcttgtctttgcagacagtagtcttgactttcccctcttccagctggatgtgccacctcctcttccagggatttctcattctatattgagagtctcatccttatgagcctagtaacaactcttaaattcctttgggattcagggaaagaaaagagaaaagggttactcatttagcaatcaatctgaaacacttacctggcagttccaacggctaacttgcctgtttattcacttcctttgaggtgtctgtctcccaagacggcaattcccaggaggaaatctgcctgtgagttcagtcgactggtcttgttcctggaccagcttgtttccaggaaataagctgagatggagttacaggcacaaaagttttattggagaataacacagataaaggggaaaggggagaagcagggttggacccaaggaaccactggcccatgacccctacctggtcaagtctttggtcgcccagtggggtgctctggatccaagactgcccagtagagctttgcattaagctaactcttgcaccatttccaggcatctccacaggcttcccctgtaagtctggagaagagctgccacgtttaacagtccttcattccttcaaaatccgaaaacgtcctctttgaagatgctgtctcaatgatactagggttgctggacttggcgaaaattcagaattcctaatggatcttaagtttcagataagtgctttccagtctaagtgtcccaaatatttcctaggatgctgtttttaatcgggaaacttggcagtacagagaaagtaaaactctaatgttctaggagttataagagaacctgcatttgaactagggcaatgtgcttgactcctgttgaagttaaagggttaagtctctcccacct

SEQ ID NO: 27121 - DNA, 2118 bp, Bovine  19866880525562
  misc_feature (1)..(1): n is a, c, g, or t
naaaatacctatgttaggctgttcatctcaacgttgttagtgtaggcaaataggcaaacttaccgtccttcacttggtgagtggacagaggaaacgaggtgaaggaaggcatggacgattgtgaaacccagaaaagcaaaccagaggtatacatagcagcatgatggccacaagaatattttttgtggaaaggtaagacacaatgtggagagccgtatcacttacataaattgaaaacaataccaaagtctctcaacagttgactaggctaaacagcagtccccaaccctcctggcaccagggactggtttcctggaagattatttttccacagatggcaggaataccgggagaagtttggggatgaatcagcacgttacacttattgtgcactttatttccattattattacatcagcttcacctcagatcagcaggcattagatcctggaggttggggatgcctggatgaataccccggggtacattcatgtagtggagtactactcagccaggaaaaggaatgaagtgctgattcaggccacaacacagatgaatctcaaaatcattatactaagtgaaagaagccagacacgaaagaccacatgcagtaggatggccccatttatatgaaagctgagcacaggcagacttagtctgtaggggcagaaagaaagccggggcacccgtggcagaggcgattcccaagaggtacaagggaaatctttttctggagtgatgggagtgttgtacatctggattatggaggttacacaaataggtacatttgctaaaatttatcaaagtagatactcaaaaacaggtacctgagtttactgaatgtaaattagtcccaacaaagtttatttaaaatgatattttattgtaaacagtaaaataaagcaataatactttagaattttgatgactatagctttgtgtacatatatccatgtatctgtctctctaggtgtctgtgtatgtatgcatgctatgtgtgtgtttatggatgtgtgtataggacatacacaagagtaggtgtctgtagcagggaggaaaaagaaattacgaatgcggaattgtggtaggttggctcattgttcccagtcctcattccctgtgtacactgtgtaaagtacgtcacatgtgtcatctccctttttcttcctaagaacctcatgagataggtgctattgctccattttatagatgggaatctgagaccagagaggttaagtaatttgcccttggtcacacagctagcaggcaatggaaatctatgaatatgatcccaaagtctaggttcaagatgaagggacttaacttcaaaatgtcttttaggatttttcccctccatttgggtgtttctgtcccgcaaagacggtggcagaagtcagggagaccgttccgtgatggaaaacttaatgtggttgaacctgagaacatcaccttggggaagggctttgtcccttaagaaattataaatatttcattttcccctcttccctccttccttgtcagtcccgagatggagttatcgacgggaaccaggatgatggacagattggcagggttctgtattgatgagttaatagattgttggctatttttttcattctctgaaaaaaaaagaagtcttgacagctgtcttcactgtcgtgggggtgggagaggcagctgcagaaggtgatggaaagcaagacctgggtcagggtggtgcccatcagacaaccacagcagctcgaccttcaacacttaccccgaatcccaccagcttccattctcttccctgatgccccttgtccaaggccccatcatctcttggctgattatcacgagttcttctcagtgcctcagtgcgttctgcagccagcaggcagagctgtcgcaaagcataaaccagggacttgcctgctgatacagtccataagaatttgcctgccaatgcaggggacacaggtttgatccctggtcggggaagagcccacgtactgcggagcaactaagcccctgtgccattactactgagcctgtgctctagagccctcaagctgcaactgctgagcccatgtgctgcaactattgaagcccgcgcacactggagcctgtgctctgtag

SEQ ID NO: 27122 - DNA, 1509 bp, Bovine  19866880565528
  misc_feature (1)..(1): n is a, c, g, or t
naatggagtcacgatgatactaaccccccccttcaggtccgtcaagcactcactccgcaccagggaccaagtggttcacttacaataactcacttgatccttacaacaccatgaaagtgaggcaccactgattctgattctcctcatcttacacatggggaaactgaggtgcaacaaggttacagatgaggggctaaggtcaccacgaggagccgggagcccagggggcagggagaggaaggatgagggcagggaagcccgggtcggaggcgggtatggacctggagctgttggctttgtccttggactctttcttcttcttgtaggacgatgattccagggcgttggcatcctcactggcctccttcttgatggtggatggtaacacgtggagcatcctaccctggagtggggacgagaggaaggaggtgaggacaggcagggggctagtgcttctacatcctgcctgggggacgctggcctctccacgcgggggctggaccagcgctgagagttctgtcttaagacgggagcctcgggcagaacacccacgaggttagcacaggggtctgatgccgccttaaagagcacgctgcacagtttgtaagtaacgcctgtaggctctccaccctaccctgtccctgtgagcatgtgcgccccatgcgggcaagaatcaggtccggcctggcgcctgcaggggatcaacagatcatgaacgagtgaatgaatgataggaaagggaggcgcgtgcaccgagcatgctacttggaaagagaagcttcctacattctatactgtggccgtttcaatgcccggttcaaaaccctttccttccttactcctcctccaagtggtatttctcaagctggagagcatgttcatttaatccacaaacactttttaaaggcctactatgtgccaggcgctcctctaggcactaaatcagggaccagaactgagcagaccctgccctcggggtgggggtggggggaccctcccagcagctcagatcaggaggtggcttcacgggcatcaggtgcgtgtccctagaagctggcttgcacgtccgtgcctgcacacgcgcatgtgcatacactcacggcctcctcccaccgcctgggcccaccagtcatctgccagcccataggccatcacctggaaaacctgcccgtccacctcggcataggccttcacagcgtgctccgggaacatgaaggtgacgaaggcaaagcccttgggcttcttggtcaggctgtcgatggggtaatgcagctccgacacgggacctgcgggcaggaagggcgtcagtgtcccatgggccagggccaggtgtgagctccgggcaggaaaatgctgggcactagtcaggggaggggttttaaccagtgagagcgtggagctgaggtggctgctgaactaaacaggaggactatttaaacagcagagttcagactggagagcacttcatattcgcacacacagtgagtgggcttccaagaccaaagtgag

SEQ ID NO: 27123 - DNA, 1929 bp, Bovine  19866880627663
  misc_feature (1)..(1): n is a, c, g, or t
ntataccctttggtggtggtggtttagttgctaagttgtgtccaactcttgacaccccgtggactgtagcccaccgcgttcctccgtccaggggatttcccaggccagaatattggagtgcgttgccatctccttctccaggggatcctccccgacccaaggatcaaacctgcgtctcctgcatggcaggcagattctttaccacctgagccatcagcgaagaccagtgttccattaggacttggctgaaagagtacttttggaccctggctcagtttctttctgattttctcccttccccagaggagatgttgcattgtttcctggcaaccagcagcaatcagcgtctttcatcagttctttcactatggattctggggctttattagcaaatgaaaatggcccgagtccagctgacatcagtggggctcggctaggagttggggctggagcatttccggtaggctccagcctcagacaaaccagtttgaagagaagccagttggctaccagtgagctatttttgacataaaaagaagctgaatttagccgataactgattgaagaaatttcaagcacaactggtggggggttataacatcttggcagcggtggtagagagacaaagggaagacaatgaatttgatcaggcaagatgttttgcaaacaactaattaaataccatcaagcaaccaattgtttgcaaaacaatggttggatagagttctatctctgtattttcctctccctctcatctttttactacctaaaatagtttatgtagaaaaacaaagtctttgcatttttcacgaacttgaagttggcacagtaattagaaaaattccctagcacaccattagaatgtgttcccttatctcctacagaaaaccaatttcaaaagttaagttatactttttcctgaaatactttggataggtaggcaacagaaaaaaaaaaaaaaaccattgctagatgtccagccaaatctaaaggtacagaaaacaatatcttgaaaatcttttattttcaataattcataaagaaatcaccttcacccacccacctttgtttcttcatagcaaccttatgtggcaagggtaaaaactataattattttttccttgagatctggagaactagacacccagaaaggtcgagtaatctgcctagggtcacacagcagtcaccaaggggctcagagtgtcccaattctatatttcaaggttctgcttcattttgccccctctgggttgtctgctgtggtttgatataaaaatttaacaggttcctattgctgattaagaattgtccgatttgggcctaaaagtcatttaactttggaaagtgtatccttgattagacttcttattattatcatggctactagttatagagtgtttaccacgtataggtcttttaatccccacctcaacttgtacaagctagctcttatgtccccgttttattatacaaaggaagaaagtgaagcttggtaaagcaaaggctgcccgagatcacgtacacaaacatgaccttgaaaatatttagtgggatttcctggtggtccagtggttaagactctccactgccaatgcagagggctcaggttcgatccctggtcagggaattaagatcctacatgccatgtggtgtggccaaaaagaaatgttttttatgtacactgaactcagcagtgtacatactttaagtcccccaaattgttttgggtatctaatcgatagaaactcttgtgcacagaataataactagtatataagaagcagcaggtaagatgttcactgtatcattgtttatagtggtgaaaaaaggaaacaatctacatatccatcaacagagaaagtgccctgggctagtaacttaaccctgtatgtcttagtttttcttggcggataatagaataacagtagc

SEQ ID NO: 27124 - DNA, 1263 bp, Bovine  19866880641495
  misc_feature (1)..(1): n is a, c, g, or t
ngatgaatcctgggcctggtggctagacggtaaagcgtctgcctgcagtgcgggagacccgagtttgatccctgggtcgggaagatcccctggagaaggaaatggcaacccactccagtattcttgcctggaaaatcccatggactgaggagcttggttggctactgtccatggggtcgcaaagagtcggacacgaccgagtgacttcactatcactatcactatgggcacttgggtttctaaagaacagacatgaaccacgacaagtcaagatgagccctttctcccaagcaagatctctaccccctgacctgcagttagggaggcatcttattctagcatcactgtcaagctttgaaggaccaaactggggcctgaatttcaaacagcgtggggttctgacggtgacacaagccatctgcaacatcccacctctacacaacactgcagccaccagaaacaatgagctggccttgtgcacatctccccacaccaggctgtgtcctggcaggatcttatttaagtccccagaacttcaattcaggcagctggtgacacaagtttctcagtttttgcttttcttttagcaatgctagtcttgcttgagtatgtactttggggtcagtcattaccgaaacaagtaagaaagcatctgggaaggtccaagctcaaggtttccagcaactcagccacctcccccgatgggagctgaaatgcatccaaaaggcaagagtagaggaggaaaggacaccgacaccgcccccccacagaaaaggtggccccaggcagggtggcaccaggttccccacccaagggcaccgagcccgtcagtgaggggacctttcttttcactgatctttccaccactgcaggcggatgacttcttgttgcatttgaggataagtgttgataccaggtggtcagctatggtttgacaatttccatttagtgtgtgggagtatggctttcatgccaagcctgtgaatacagtacaaacagctgcgatccttaggctgcagctctgttcctgcctcagccccctggacagaagttggtgcccactgtagggtggaataaaggtgtccagaaggcttaaggttttagcagaagccccctgcggattcatgcaaacaagcaggtgaccccaggcctgctggttcctgggtcctgggcttaccttgtggttctggtaggaagtcaccgcaataaacgccgtctcaggaaagacatgagtacagaacgcggtgttttttgagccaaatc

SEQ ID NO: 27125 - DNA, 1823 bp, Bovine  19866880667698
  misc_feature (1)..(1): n is a, c, g, or t
ntttttgcaatgatggaaatgttccacactgcccaatgtggtagccattagtcatgtgtggcgatggagcactcggaatatggctagtgaggcttaagagctgaatttttcacggtattaaatttaaattaattgaaatgtaaatagccacacgaggctattggctgtcttattagcttatgcagctttatttaggacagtgtgcttcctaaaaacagaaagtgttagttgctcagttgtgtccagctctttgcgaccccaagaactgtagcccatcaggctcctccgtccgtgggattttccaggcaagaatactggaatgggttgccatttcctcctccagggtaagtagctcacagaactttaaataatcttgaatcacatggtgagaaatcattgccttttttctcttggtcttcctccagtcttgggattccagcaagggagacagtctccattggtgccaatgggtctttagcaattttctaaaaactgttcacctctgtttttaatgaagggagagcagaaagagcctggagccttcaataggtaaaaatattggcttaaattaatagcataattttgggtttttgttgttacttgtacttatttgtatggttaccatcaatttatggcaagagaaactgattttccatgtataatcgtggcatggtttcattttaaattaaatttttaaaagtagagacttccctggtggtccagtggttaggccttcaccttccaatgtggagggtgcaggtttgattcctggtcggggagctaagatcctacgtgccttgtgaccaaaacaaccaacacataaaacagaagcaatattgcaacaaattcaataaagattttaaaaatggtccatattaaaaaaagaagcttcaatagcattatgactagagttaataattctgtattgcatactgtaaagttgctatgagcatacgacttaaatgttctcaccataacacttcatgcctatcagatgttcatcatcaactttctgcttgcatgcccctagtgacagggaggtcactccctaccaaggcaacacctctcatctttggacaactctgaattggattcacagcattctctctgacagtcttgtcacttgtccgttgactgtcttccaagtgacaaatagagaaggcgggtcttcaaacccaggttatctggctccagagtctgtattcgggatgccacgccaaactcacggtttcttctggcctcctctatggccttttcatgaagtgttctcactcgctacaaccaagtgatcttgtaaaaacgcaagccctcccatctggtttacgtcggttctctgcatgagaccctccagcggctacccatttcagtcttcttgccaggacagtcccgtggacagaggagactggcagactacagcccatggggttgcaaagagtcagacacgactgcgtgcacgcggacgtacatacttctgacttccgggttaataaatctctcccagttcccaccagatctccaccctgacttcctgtagcctctctttgaacctctgccccttcataccggtctccttactactcatacacagcagctccttccctccttggggtcttagcatttgctgggttttggagaacctagctcattccctgctcttcacaagcctggttccttctcaacctttcggtacacctcctcagggaggccctccctgattcctcaatcactgcagacttccctctgcgatctttacttcttgttagcctcggtcacccggaccctgttgatgtcccttatctcaaactcacactctgttttcttta

SEQ ID NO: 27126 - DNA, 1002 bp, Bovine  19866880693291
  misc_feature (1)..(1): n is a, c, g, or t
naacccctgggatctaaggaggtgaagctgatgtaataataatagaaacaaaatgcacagtgaatgtgatgagcctgaatcatgctgaaaccattcccccctgatccccaaccccattctgtggaaaaattgtcttccatgaaactggcccctggtgccaaaaatgttggggaccactgtcctattcctttccaccccgcgaggacacaggtgaagtctgtgacccccaaaagggccctcaccttactgtggtggcaccccgatcttggacttccaatctccagaacaatgaggaataaaatctgtcattaataaggcacccggtctatgctatttagttgcagcagcccaggggactaagtcgaaccaaagacacattccacgtgtaattgttttaaatggtggtatgtctaatgggtgtgaaatttctcatcctataaggtttaatttgaatgtattatcattttaggtgccttggaccactggcccctggagggtgtggggtcagggacagtccatttgccactgccagaccaaggaggccgagttccctggctccagaggcatcttgggacagtccttaatgtcccaaaggtcagcaatgactggacagaatgaggagctcattggacaattgaattccaattgccttcagagggaggagggcaaacttgttttgacgttccctggggcagatcaaaggggttattagtgaccattgttaggctatgctcctaaccgaatcttttccaattagggaaaaaatgaaatctctgctcatttggtgaaccaaagcagaatgagagtccctaatgatccctttgaaaggccacagtgaagcaattaaattggtatagcctttctgaaatttgggatttaccctgttacaacaagagctgtaaaactgttgtcttggatgaagaaatttgacagccatgaattgatcctaaggaaatgatcaaggacgtacacagttaacacatgaaaagatgttcacagtag

SEQ ID NO: 27127 - DNA, 1004 bp, Bovine  19866880874944
  misc_feature (1)..(1): n is a, c, g, or t
nagaaggtgggtctgtctcggtggcccgcggagggtgggcagcagagacggcccttgccacccatctctccttgccatgtctctgtggcttcgtctttctgtccagtgccactctccccaggaccaacccccctggcccccgggagccctctagagactgggggaacatggcctcagagaacgtggttactctccaaagagttagcaaggttgagccctccctgacctactttgcctgttctctcttcttcccgcttctctggcgcccacagctgaaagacgataatgagttccaggagttcctgtcggttcaccagaagcggacacaggtggccacttgggcgaacgatgccctggacgctgagccctcgaaagggaagagcaagccagccaacgattacctgaactttgactccgactcagggcaggagagcgaggaggaggaagatggggagaactcggaaggtgagggtatgccccccgctatagtgtgcgccctgcacttgcccacacctgagcacgagtgacctgggagatggcagatcagatgctgccccgtagagggttgattatcccaaccatgggtacgtcggacttgatcgatcctggtcccttatccagtcagtggattactcgctcaagaattgattgagcgcctgctgtatgccaggcagtggatgtagcagtgagcaaaagacgagagtctgctcctatggagctgtcgtcctggtggggaaagaaacagtaaaggaatcagactgattcctttattcagtattcagtaaatgatgtgaacgtgagtgccacagagagaaagcaggaagtggggggtgggagaggccccggagaagggtggtccttgaacagaggcggtgagggatgagcctctgtccttagaaggggctcacggtgtagccataaggggctcagcgtggtgagtgcggtgatcgaggggtggaatcaacttcggttgaaaggcaagggagtgaatttgaggtgagttt

SEQ ID NO: 27128 - DNA, 1130 bp, Bovine  19866880903524
  misc_feature (1)..(1): n is a, c, g, or t
ncaactgaaatttagcctttccccagccttccaaggttgcctttgagaaggatgggcagatacctccatcagcagctgtcactcaccgtgtctgtatgtgtgtgtgtgtgtgtgtgtgttagttactcattcatgtccgactctttgcgatcccatggactgtagcccactaggctcctctgtccatgggattccccaggcaagaatactagagcaggttgccattcccttctccagaggatttctgcgacccagggattgtacccggctctcctgcattgcaggcagatactttactgtctgggccaccaaggtcattcaccataggagaagaaaaagcctgagtagcaggaaacccaggatgccctcaatggttcctctgaaccgcaggctagaaatttcttccctctccctatcagtgctctgaaaggctatgcttctttgtcctctagcttcctcttggattttgccaagaaaagattgatagaagagggtaggaggaaagagagagatgggggtatctcttctcctgctctaccaccacccctccctgtgccagcccagtatgggtttggcagccactgtctttctctacccaaacctgcagcttcttccaggcagtgctctcctaaactgttgttctctccaggtaccagaaacctctacgtcacctgcctcattgggtctgaatccagcaatagtttccccacatttgtcagcctctgggttctctgccacccctctgagttcccttaacccaacctctgcctttgcaaacaactcttccttcaactccctttgacccctcaagtgtgcatctatttcctgtctatttcctgccgggatgtcaagcccctctctgaacctcagtttctccatccgtgaaatgggatagcttctgcccagctcaccttgcagaggttgcctcaggggcaaagcagatcctggatgggaaaatcccctggggaaaaacaaaaagttcaaagtgccacccaggagccaggcattagtgttattaataaaagccagataggtctcctccatccacttggggcattccccctcccctctcacgccccctgacccttccacggctcagcctggtcagcttcctcccctgggtgatgttc

SEQ ID NO: 27129 - DNA, 1239 bp, Bovine  19866881001875
  misc_feature (1)..(1): n is a, c, g, or t
nacagcctcattaatatgctaatctggttgcaggcctggaacggagttttgggttggtggtgctccggggtggtgggtgtttggttgcttagcaacccttttctccaggtaacccttctctggcttgcccttgatatcccccaaaggattgcaatgtggaagaggaggtaagcggggggaaagcattctgttgtcacagaacagtgagcaaaataaaaggcaaacacacacacacacattcgcacacaccacattatgccgggtgtctttacaaacaggctcggggagggggcagggaaggctgggtgggtgtaacagacagacaccaaaatgcaaatgcagtgtgtggtctgtggaaataaacacaggggtaacacccttctacgcacacacacacacacacatttgtgtgtgcacataaacacaattgacaaatgtgttttgtttaacaaataaacgcacataatgagattctcagtttatgtaataatacgtgttccgtgtcataccctcccatcatacatacacatgcatgcacacacacatgcagccatagcctatgggcagagtcttttccaagaacacaatagatataaacgcactaaacacagtgtgatactcagaatgtgcaaatgataaataataatcgattgtcaaatgcaacacacacacacaatccacagagcttgaacagataggccctggtaaaaatcacagggaggtgtgtacatatgtagatgcacagaaatgtacatgcatcatgtatgatgtctctgcaaaccaacagtgagtgaatacatatgggcatatacaccgtgtgtgaccaggtatcccaggaggcgctaggtacacacacaaacgtgcacacacagaggtgtgacagagtctcagcccttttctctttcccttgtcactgctaagctgaacaaagtctgctttttacttattttttaaaattttctatctagagaaatctctcattcgaaacgatacaggcaccccgccatgttcacagcagcactacccacaacagctaagtcacgaagcaacccaaacgtccacacgcccattgacgggtgaatggatacaggagacgtggcacgcgcgcacacacacacacacatacacaggaatattactcagccacaaaaaaaaacggaacaaggccatttgcagcaacgtggatggacccagagaccatcatcctgtggaagcaaatcagaaagagaaagacaaata

SEQ ID NO: 27130 - DNA, 891 bp, Bovine  19866881027372
  misc_feature (1)..(1): n is a, c, g, or t
ntcaaacccattttacaggtgggtaaactgaggctcttagaggcacatctcctgctcaaggccatatactttgtaagatgctttctatcccagagagcctgtttcctaaaccaaataactttaatttaactgatctccacttcagcatcctcctcttggtcaacttttttttctttttctaactcctctacttcctgtcctgtcccgggattctcaccccacgctctaccactcaaaagtggatgagtgcaaataaaatacttgaaagagaacaaataggtccagaccaaggcaggtcaactaggttccagtgtaaatccaaagatcattggccagaccacatggtagcagatggcactgagaggcggacttgaatgcggggacagaagtaggtcaggcacatccctcagcccttcttcacaggaaacctgtccctggactcggggcttcaaaaggatttggtcccacctcctgtcttgctccagctcctacagccattcccatacatcctagctggtcttcactcctggagccagctctaagccctgaaaggtaatggggtgtgagaatatggttttggaaaattgctcggttaagatccggatgcagagctagggttcctgtggggagtcctttcacataggagctggggcagttaccaaacttcctcttatctggggactgggcttctgcctgtgatgtcttccaacttcaaatgcattcctctgctaccagggcaacgccccaggaagataccaggaatcctatttattggccgctgggactaactcacggccaaatcagcaaatagcacttgagcacggaggatacccaaggtgcccactgcacatccaaaatgctaaggtgtcagttctgtatatgtgtgcgtat

SEQ ID NO: 27131 - DNA, 645 bp, Bovine  19866881109296
  misc_feature (1)..(1): n is a, c, g, or t
ntggctgtctccgccttgagaagctctgtctggttcgctcaccatcacctcttcccaccaccagtctcgttttggtggaatttgcaaggcgaagtccataggtgcggagaggcccggtgggactccccctacgagatgctcagtatcaccccaactgcggtgggcctgaggccgtgtgcccacatcacccctccctgccccccaccacctccgcaggcagcgagcaaaaagtgagaagtgggaaaggagacgtcaactggcgcgaccccccagttaaagctgcggctgtttaccagtgaggagaacgctgcctgccaacccgcccgccatcccatctccctactgccggctccccccaagtgtttatttaagccaacacattgctctgctaattggataacattccatgtgaaaatagaccttttaaaacaacagcagcagcggcaaataaaaacagctgcaactgcaaaagtacaaaggctcggtgggctcggagaagggagaaattaaaggcgcatgcatggggaggaaaagaaaaagaaaaaaaaagaatgttctggttgctgaacctcaagtctgctcttcttcctcagtgaccgaccggcagtccaggtaaagacggagaaggtggcggcttctacatgg

SEQ ID NO: 27132 - DNA, 733 bp, Bovine  19866881166201
  misc_feature (1)..(1): n is a, c, g, or t
nctcgctgggaagggtgtgttcaggtggagagtttggaaaggacccccccccccccaagagagaccccttttaggccaagccttcttccagcgtctgtcaagggtagtaaggtacctcccagctcgaagttggtttgtggtcctcgacaaattaaatattactgtttattaccaggcataccccaataaaataaagaggcgaccaggcgatacggactatctcaccagccgctgcacctataggacgtggagacgtcacgagtcacgcaaccggcccgcgcgctgtcacgctcgattggggggcagtggcgggatgttgatttctcgaatccccgacttcccctacaactccctccaggggtctgcgcaaccacaagtcccagacgcctgggccaggggaaaaataaagaaataaacaaatccaactctctctggggacatgggggtggcggacagcatccccaaatagaaccaagatcgattttcttagggagggaggaggggagctttgggcgaagggaggtgagaatcccacctcagcccaaaggttagaaagaaatcgggttggggggaaggggggcaggaatcgaggtctcctgaaggaggttaagagaattttttttttcctaattttctcaggaggagctctcagcattggcgtttgaggcgcctctataactggttaagtttgggacgcgataacttagtgccctcttgcagacggcatagaagc

SEQ ID NO: 27133 - DNA, 724 bp, Bovine  19866881323432
  misc_feature (1)..(1): n is a, c, g, or t
nttggtctcatcagtgggcataacttctaagcagccccgtggtggatgcgcataagcctttgcgcgcagctggaaatgcactgggttcaggggcgaaacgtaccccatagacgtccctggcagcgccgagaggagaggtaggcctacccgactccgagcgatcgagcgtccgaccttccggaaagggtaagttccccgccgaggggctcccagggagcccgaactttggaatctgggctctccccccggcttcggagttcgagactgggtttccgcgcgcggccagcccccagggctttccgaagcatggcctggctccaggccccgtccatctggggctggagcggcgcaaaatgtgcaggaaggcagtcgaccgagcagcctcagaagctaaggtcaggcccgtgggggaaagcgaccagtggtttccagcgccggacgcgggcgccccggccaattttggccgcaggctctgctgcttccagcaaatagaacccgcgtgccttttctccgtcaggcctcaagaactttaccgagcatcgctttcatttcccaaattattaataattattttttacccaatgcaaggccctttgggtgcagcctttgcgcctgtggatgctcaagagcgcaacccgaaatccttcgcccaaaacctggaaacgggttcccatttgacctctgggccgaggtgagccggaaaccgaggcctgggccccaaagg

SEQ ID NO: 27134 - DNA, 846 bp, Bovine  19866881330176
  misc_feature (1)..(1): n is a, c, g, or t
nttcattagcgcaagactgcatcggatgaatcttcttcaattcctcaacttaaacaagagaccggctccagacctctgaagaaatagctttgctgggcatccatcactttgtcagattcctgagaatatgaagcaccagcgcatactttgtggtagcccacatttgagagcagaccatgtaggcacagagctaaacaggtcttcaatttcaattagaaaccccgtccagataacccagagtggggaggaagaggcggtgcagtattgggtgggcatgtggtgccggtgagggggtgggggtgccgggttgatggaaacaccgggtctctgaaatctccgccgctctgccctttgcccttccatccgtgcctccctcatctcctctgactccctcccactgccaccagagacagccccctcccaccacacagtggaggggaggccggggtgggggagcggaagggtgggtaggggagagccctggtgtagaaagagcgctgcactggaggaaccaacgcagggaaaatcacagaagggcaggctctgctgtctactttcattacaaggctttttcaaatattaccaaaacacaccgatccctttcataagagacatgggttccattcctgggctacgaagatcccctggaggagggcatggcagcccactccagcattcttgcctggagaatcccagggacaggggagcctgatgggctacagtccataggatcgcaaagagtcagacacgactgaaagcgacttagcacgaacccatgcacgcacgcgccagtccctttggcctgtccagtcaagaggatctttaatccaattctccactttctgc

SEQ ID NO: 27135 - DNA, 757 bp, Bovine  19866881398256
  misc_feature (1)..(1): n is a, c, g, or t
ngagatattgttgctttattgtttaaataagagaatgacaaatgtcatacaaattacacaattagtatggaatgagttttagcccccaaacaacccttgaagctgccaagaaaaaaaaaaaaaaatcaacagtctactgaagaacaatttcatttagcagataatttagaatcttgtaattattttcttagttttcttcaaaccaaagcatgcagacagtattgcaaagagctcactgctgttggttactaggagagtgtttgtgtaattagcaatgtggctctttggaagagcaatatggctcttcttgtttggaaagaggggagtgaattctctgtggtgtcttgtttgttgatgcgggtttttaaaagtgtcatgactaatatgtctctggacttgagccagatcacataatgtttggcaggcatttcgtgcaggcagggaggaggaagtttggtgaagggctggaattctgtctgtaactctttgctggtgagatccgagtctttgtgtcccaactggatcccacatctgaacaatgtgtgggatcactggctgggtagaggctgaggttctggggtcatgggaagttccacggccttggtgagtccagagctgatcattccttcagcaatggtatgaggtgcaactcaatgcagtgtatgtgctcagtcgctcagtcgtgtccaactcttatcgacgccatgggctgtagcccttggggcttctctgtccatgggatttcccaggcaagaat

SEQ ID NO: 27136 - DNA, 1317 bp, Bovine  19866881648260
  misc_feature (1)..(1): n is a, c, g, or t
ncttagctattgccgtggcgtttcccaaatctatccggtatctgccttcttttcctggggggaaaaaaaaaacatttgcagaaaaagaaggggagagagagaaagaggcagagagatacataaaggaacctaagaaaagcttttacattgctctaatttctgaaacataaaagctattctttttgagtaaatccatttttttcccctgtggcattaaggatagagaaattcctaggaaaataatttgtcaagtcccgactgatcaaagatatgtatgaaaagacctcacttttttttttttttttgcttcccgaggaaaaaaccagcccccatctccgttcagaatgaattggcaattcatttactgactgtcagatgaagtagcacgatccccatcacatctttaactgggacaggaccagaaggaagcaattctgtgcccaccgaatgtacaagctgggggtatgttagtgattaagggctccaggcctgggggaggcagggagatatgactcagattcgaaaatgcaccataaatctccctcttttattcaaaatgtgtgttttatagtcgtttcctggccaattgctgccttgaataaatatataacatatctggactgagcttttaggcccagagctggggtttgtcttgagggccaagtattcttgatatttccaagaacttagcaaagggcaaataacgaaagctctcctttcttcctgactcaccagccacatcctacatggaaaaatcaaaataagcgatcaaggctaagtgggcagagagaggtaaagcaacagctactcagttgagctaattgcttgtgtccttcaaacaggcttccactttaacctctcctctgataccctcaaccagatacaccccaatgaagttgccagctccaagccatggacagcattttgttcagtcaatgtagactaactccgacatgtggcccaaaactttggtttggtggattaagagtttataaagagttttaggtttccatttgttttttaaacatcaggccatctccccagctttgcctgccccccaccccacctcaccaactttcattgcattatatcgaggctgtcacttccagaggtgggaaagagagaaggctcatttcacccagtctctttttccctctccttatcaacttcagttaagcttggagtttaggctccagagtgcttcacagctctgattattgaggatttattacatgctaagcactctggtggctcaaatggtaaagaacctgcctgcaatgtgggatacccgtattcgatccctgggtgggaagatcc

SEQ ID NO: 27137 - DNA, 1029 bp, Bovine  19866881666465
  misc_feature (1)..(1): n is a, c, g, or t
ncgatctaatagtcggctctgtatatgttaccaagtacttagggctctcttttggaaagccattatgcccatgtgatttccctcaaagcctttcttgaggattttgttttgacaggagggcattaaggggttgaaactgatagcataagcacaccacttacacactttgatcaaatcgacccataattctcctagagaaagtcttgtatatattaggaaggaaattaattttatgaccgctgtggctttgctggttaatggcccagcaagtcagcctgccccagaaggcgggctgtgggaggtgaactcaccactttcctcccaggctcaccatccacgggggaggatgctccacaaggaagaacaatccagagggtatcagccagcgggaacctgggatgctgcaggacacggatgcaggggaagctgcaaccccttccttctgaccgcacctctgcctcggggctatcccagctggaatgcccacagtgcgctcacagagtgatgcacatttggctcaagtccagagcccaggtcacaagctcttggcaatgggagaaattcaaagaccgtaattcggaagaccaaggcagtgacgtggtatcacacgtttctatgaattaagaaacaaactagagagaagaaaagaatttatgtaatgggaagatctctttttgtctcactctcttcatctgcctgccatgccacttaatgaggcagcctggatgggaaggaattttgggggagagtggatacatgtatatgtacggttgattccctgcactgttcacctgaaactatcacaacactgttaatcaggcatacccccattcaaataaacagctttttaaaaaataattaagggatctgagttaaaaaaaaaaaatacttgctccaacgtgggtataaggtgccagatgcaaacaaggtctcttgggttcttctgggctcctggatgctgagtgtgactccaggggtgcagatgatagcgttttgtattaatacaacatgtacccaggcagccacttc

SEQ ID NO: 27138 - DNA, 906 bp, Bovine  19866881782998
  misc_feature (1)..(1): n is a, c, g, or t
ncccagcggcgtcgagccgggccccgaggccgccaggaagctcgaatcggccggggactgcgcctgcgacggcgggccgtgcgcaaagaagtcatagttgcctccgggcgcgtagtagtctccttggtagtctgcggaggggacagggcggcagaggggagagtgagagatggggaggtcgctgaagaaggactcaaggggcctgagggaggagatccgggggaggggacccagggagaccaagggcagagtaggtgcagatgcggctggggctggcgggacaggacgttcatggggaccatgcgacacagactcgaggttagagaaagacccgtggagaggcaggccagaggagcggagggccagactcggagttcgtgctggggagacagacaaccagtgagacgcaaaggctacagtctcaggagctgggagagactcagggacgatgaaggacacacacctttcaacatcagaggttccctgacacagagacggagaggagacagaggtcacgggggaagctcaagagacagaggattccagacagtgccttagagctggcgagagatacacagagagcgcgaggcactggacaactgccaaataaagagacagggagagatcggtaggaccgcacgcaagtagacagcccagactcagagtccgaggggaggcaagaaaagagactcagtcactgaacccaaggctgagatagacacccggggttattcgagtaaaacagagatagttcaggagccggaaagggaaagctgaggcggctgtgtgtttagagacgcagaaaaaatctggggagagacccaggaacaagatggaaggtgggggagagacaaaaggcgtccagagacgcgcgagatgagtcagacagagggccagggacacggg

SEQ ID NO: 27139 - DNA, 1206 bp, Bovine  19866881791028
  misc_feature (1)..(1): n is a, c, g, or t
nccttgaatctttaggtgacttccttgtgcagaggacaggcccactgggccccattcaagaggaattgggggtgtccttgtcaccccagaactggagtgcagcgcctgcctcctctctggagaaaaagatatataacgctgaatgctgtgaaatttgccgctgtgagaatagctaatttttcacacccagacgaactggctgggtttgttaaagcccaagataatcaaataatcattataactcatcttcgcccctcctgtctttcgctctttgtaccattaatgtcccagtggggtgcagctctggtgagttcagacctagcctatttagataaccttccggttggtcttctgagagcgaaatatccctcctggagtatcttacaacaaatgaaccaatcctctctaatcttcttatcgttgtagcctctgctccaggcctggttatctcgtgggcttgcaagagagagaaagccagagatttatacatatatatttacgtttgatagaaattgctataaatatatgtgtatgcatgaaataagaaaaaaggaggcaccaaaaaagaggctaagctcttttctctctccccagtgaggcagcctggctgcaagcagtctggcccctctgcctggcccgggaggcatggagaagattctaaagacttctgtgttctctgctccctccacctgtcttggctgtggcagggaggcgcggtatgggggtgggagaaaggagggtggctggcctggccagtggggtaggggaccagcatccaagtggccggctccctggggatccatctccctccagcaaggaggttcctgtatctttctctcccctgttttctcatcttcatgaccctctgtatctatatttttttgtgttttttttttttcttctcagctctctgtagctcccttccctccaccttctctctctttctctctctcccctttgagtctctcctgtctctctctctcctctctgctgattctttccctgtgtctctaccagcctgccctagctcattcctctctgtgtccttccccaccctcgctggcagcccttgcctgcattctcttctctccagaccctcccggagctctctatttccccctcacctcccccgcgttcagcgcccccagcatcctggtcccccccagcctccctccctccgccagctgccccaagcatctcctcaca

SEQ ID NO: 27140 - DNA, 2486 bp, Bovine  19866880271029
  misc_feature (1)..(1): n is a, c, g, or t
ncagttcaaaagcatcaattcttcggtgctcagccttcttcacagtccaactctcacatccatacatgaccactggaaaaaccatagccttgactggatggacctttgttggcaaagtaatgtctctgcttttgaatatgctgtctaggttggtcataactttccctccaaggagtaagcgtcttttaatttcacggctgcagtcaccatctgcagtgattttggagcccaaaaaataaagtctgacactgtttccactgtttccccatctacttcccatgaagtgatgggaccagatgccatgatcttcgttttctgaatgttgagctttaagccaactttttcactctcctatttcactttcatcaagaggcttttgagttcctcttcactttctgccgtaagggtggtgtcatctgtatatctgaggttattgatatttctccctgcaatcttgattccagctgtgccccttccagcccagcatttctcatgatgtactctgcatataagttaaataagcagggtgacaatatactggggtatggtaaaaaattaatataattgaatgttgccatactaaggtcattagacctagatttttgatcattttttcaatctgattataattaatagctgcctgaaggacagggtgtattttggttacaacgaacaagagaaaacattgccggaatcacagtgacactctactgcgggagaatgaaaaagaaggaaaaaagaaaagcctgcttctatggtaaaacccaagggaagagaaattagataaaagacatgaagatatatgtgtgtgacatgctccatagcaaggttttaattgtccttttcacttgataggaaaaaatgcagacacttaatagaaattaaaaactcatttttcttgacttttccctgtgccaggcctggtggatgaaatcattctgccaaggaccttggtctgaagccattatttgtatagctacttcttgttcagaaatcagaaagtcatttaagctgggggtagacagctgtgtgaagtgttataaagtaagtgatgtctgaaaattagtaaggcagaaaagtctgcagctggcagcatcatctgaaattcaacaatgtttggaaaatgcttggcagctgaaagaatgggtgaagagaaagaaaaaaaaaagaaacaaaatttgacattcagaataagaacatgaaatatgtttctatgagacaaggttatattattatatattacatgatacatatatcctacatattgtctaaaatgtatatttcagagtagattgtactacttatactttgggctactactgtatatttttaaatatatgttttgacatttaattctcttaggacaaaatgatgtaaaactaaccatgaaaaaaatgtcttccaagctagatttctttattgaagtaaagattatacatatgaaagagaaaaaccttttctgtgcacaagcatttccaagtgacaatatgattctgtaataacaccagtgggacaagcctgggttgacagcctatgcctgaggatcttgtgcacttgtgtggttttttggagtctgtctagataaaatacattttctagattagatagaatgaacaggtaggctcctgggtgccctctcttttgggagaaaaaaaattgctttcggtttcaagtttgcaatcttgctacttgaaatcatgaaatagttacagttaatcaaaatacatcaaatactaatatcaataagaatgaatacatttcaggtcagtggggtggttggaaggcatcaccagccaactcaatggacatgaatctgagcaaactccaagagatagtgaaagacagggaaccctggcatactgcattgcatggagtcccaaagagtcaaacattacttagtgaaggaacaacaaatttttatatttgtgggcagaattctttcttagaactgctcacattctgttttggttcatcactttttactggatgtaggaagggaccttggccactggactagattttatcttccacagttggagcgacaatgtactccattccacatatttttctttctgtgtgatgtaaacctgttctcatttaatgagtgcattccaatccctgagtcgggaagatcccctagagaagaaaatggtaacccactccaatattcttgcctggaaaatcccatggatggaggagcctggcgggctacagtccacagggtcacaaagagtcagacatgactgagcaacttcactttctttcactttccatccctttgggtggaatctgagggccgccccaaacaagaacttacagtgaaagtgatgcaaatgaggtgcaaagtgaggtcataaaagtgccatcaacttttgctgtgttctctcaggatgctcatttttggaacccagtcatcacgctgtgaggaagccaagtagaaacttggagagacagcatctgtgttctggttgacggcctgttatgga

SEQ ID NO: 27141 - DNA, 3760 bp, Bovine  19866880422779
  misc_feature (1)..(1): n is a, c, g, or t
ntgaagtagtcatctcaaacagaaagaattaaacatgaggatgatatatcttagaaaagtcctaaattataacataagtgaacaataaaattagatcaatttctgatcatgaaaatcaatcagaatccctttcatgaattatggatgcctgctgagacagtcaaaccgtttcatccttgaagggctcaagaaaaaatagtagaatttgctttcttatttcaaaatgaagaggttttttctttatttattgctctaatcatctttaactcagtcttctttctcccactattcaaatcacaagtatctcttttaagctccaagatgtttaataagtaaagaaaaatgaggaggaataaaattgaatagtatcgatcacttaacaaagttctgaggctttttctcactccaaaaagaacattaagtactttgtttttgaagattttaaatatagatggttttataaaatgatgttctggggtttttaagcattttgataactgcatccttattttttaaatctgtctagtgactgataaatggaccatggatacctttgctttctgtctccagtggatgttcagatacactcaacaactggatggtatattctacacagtgaagattatcccttaaaaaggtcattgtctgaagtcatttgcataagacaattattcagtctgaaatgagttagaagtgatttctgttgcatatgccacatgtggataagaacctgtaaactgcaaaagatacacagaaagccaacacaaattgagacctgtgataatttcacattagccattgtcctctaaataaagatattccctcaggacacagactggcttacgttggagtctaacaagcttagcaagctgactttttaaattctctaaatgctattgaacacatccatggagtagttcactgctatttttcagagttaaagcaatctctgaaggtcggtgactggcagtaagaaagtaatttaaataggagacaatccagaacagtatatgagaccatctgatctgtagccatttttgctgaaaacattacgaattagcttttatgtttttggtgaacaaaaccaacattgagtcttttaaaaactcctcgtaaattaacagcataacagatattcaagacccattccctgtgtttccatcaaatattgtttcttctataagaagtggcttccttggtggctcagacggtaaagcgtctgtctgtaatgtgggagacccgggtttgatccctgggtcgggaagttcccctggagaagggaatggcaacccactctagtattcttgcctggagaatcccacggacagaagagcctggcaggctgcagtagtccatggggtctcaaagagttggacacaactgagtgacttcactttcttttctttctttctataagaatagagggcttccgggtggctcagtggtaaagaatccacctgcaacacaggagactcaggttccatttctgggttgggaagatcccctggaggaggaaatggcaacccactccaggattcttgcctgggaaatcccgtggacagaggagcctggcgggctacagtccatggggtcgcaaagagtcgggcacaactgaagcaactgagcagagcagcagaacaagaatagaatcttccttcctggtcccagccatgatggccagagcacagaaactgggagccgtgcttctctgagagtctgccttgggctctgcggagtacagacacacactaagataatttatactttagcacacaggggtggctccttgctgggaacgtgtctatgactcacaccattccagctccctggaaacatttcttcacggctcctgccctgtgtccctgaaacagaattgaatttagtggtttgtgaggtgtgcctcttccctcttccaagatgggcgaagcttggaggtacaggaaggaattagcagagcaactaagcaaaggatgaacaaatgggtgacgtgtggatttctccctctgacatggcacatggactcagtggattcttgtgcgtgtaatgaagtgccagacgaagagcaacatttcgaagtccacataggagatagggaagagcagaattcaagtcctgtctttggagtcccaccaaggggaaccccagggctagtgcaggaacctggaccagccatggtttccctgccatgatggatgggagtgctcttaggaatacaggccaattcccaaaaggacgctgtctcagaaaaaaaaaaaaaaagatggtagttgctggtgtctcaaaacaagaatgacctattgatcatccattgatctggacacctcatcagaggaaagacactggaagttcaacagagtaaaaggagaaaaagatgtgaccacacgtgtatgtccctcgagtcgatgaaccaagtcataggagttcaaagtgttcatgaaatgcacaaatacataataaatgtcacaagagttaatgtgtcgccaccatccacagacttcccagagaagggccctggctagttttcttagtttaataaaatcctgcctccaaattatgcagcccccacagtctaattaaacctgacttcttgccaagactttttaaatgtttttcagggcattgctcttttagcctttttaaaatgtcgtgaacacagtgaaagtgaaagtcgctcggttgtgtccagctctttgcgatcccatggactatacagtccctggaattctctaggccagaatatgggagtgggtagccgttcccttctccagtggatcttcccaacccagggatcaaacctaggtctccccaccatttaaggcagattcttcaccagcatatgaatcagtgatgttggtataactggatttatgttagagaatgcattgtaattaacaattacatagcatattaatataccaacattgctgattcagagttcacagataaaattattctcttcttcaatgaattacctgtatcttgagtcctttctgaaaacctatcacccctcaattacacccattacatcctagaaaaccttctgccaggttctttgtgacccattaaacatggagtcagaagaacttccatatctattaaaaatatattagacttttaccaaaactgaaacataattttcttcaaattcagaaacagaattttggagaaaatcaattactggaattttcatgttcttctgtgattaaaaaaaaaaaaaaaaaagccaatataagccaatcatttgtgaaactgttaaacaggcaaagtgtcttcgagacttagcattttcaggcactcagtattttcatgtctagttttcccccatcactaagagaaggactggtcaacttattcatggcatggtgttgtgaattgacatttatgtaacctcagaattgaaatatgtcacagagaccagccagcccaaacttctgcctaatacagtaatctcctcttcattatccttgagaagcaaacatctctgttactcacacggatcaatccctttcccatcacactgccaagcaagctgtttcagaaagttctgacctcctaggggtcaaggtcacctttttcagctttcatccattacccatttttgatgccacagacaagagtatgtccaggcttatgtgtgacagctctccaggtatttgaagaaagttattttattctcaagcggccctttcactgggctttatttaactccagtaatttcaacttttcctcttatgccatggaatttccaattgactaacaa

SEQ ID NO: 27142 - DNA, 2083 bp, Bovine  19866880453315
  misc_feature (1)..(1): n is a, c, g, or t
nctagatagcatattcaaaagcagagacattactttgccaacaaaggtccgtccagtcaaggctatggtttttccagtggtcatgtatggatgtgagagttggactgtgaagaaaggtgagctccaaagaattgatgcttttgaactgtggtgttggagaagactcttgagagtcccttggactgtaaggagatccaaccagtccattctaaaggagatcagtcctgggtgttctttggaaggattgatgctaaagctgaaaccccagtactttggccacctgatgcgaagagttgactcactggaaaagactctgatgctgggagggattgggggcaggaggagaaggggacgacagagggtgagatggctggatggcatcactgactcaatggacatgagtttgagtgaactccgggagttggtgatggacagggaggcctagcttgctgcagttcatggggtagcagagtcggacacgactgagtgactgaaatgaactgaactgaactgaaaccctttctatctaatatgctttaggggcagaaaaggaagtgtcatttcagagtccattgtctgttttctagcttttgctgctctgacataatttgactctgaaattgtaaaattaatttcatgtaaacaacataagatgattccaggttagatcagagacaaagacatactatgagatgagctggatcagtaatttctaactttctccagggagttttgccaaatcttagcatcgcaagaacgtctcaggtttctttaatgttctttaattttaccagctttactatatgctgtacaaataagtgggctgtaaagtgcacttaaagccaaaaggaataatggcaaataccactgataaatggttctacttggaagtctctttatcaagtatgttagcagaactaaacaaaagccagaaaaaagaatttatgggaccttcgcaaaggaacttgaaaaaaccttttattttatttttttctaaaaaaaatttttttttctttttctaaaggagtaggctgaatctcaatgtgcatttaaaattcagcccattgcattctcaatactatcttaagtatggggcaattatagttctatcctaagtgttctgacttttcacaatgggaatattaagcaaaattgtagctaggtcttgaaattggatttcacttcatcctgctctctagaccaaaaccaagatgagctgaactcgccaatcagcatacgctttgaatatgagaatatgttatcaaagtaagagaagaaaaggaaacagtttgtcttttcaagggctagagactgtgcaaatggctttcaaccgcccctttatgagagctatacgtggggagggaggagttgggggagaagttggaagtgggtattattccaattgaagaacgagggtttccaactctattatgtccacctgcgtgtggaagggagcgagctgcctaacagccaactttgtttcacaaaagtgcaagaaaaactgttcagggcttggtgaatatgattgttatctgctcgtattcttcactgaaattgcgagcaactttagtgtagaagacacccaaatctatacacatctggattttttttcttaccattttgactttatgaataaatgcaaaaaatgccttccagtctacagtgcgtttctcaaaccagatgaagaagcaggtagttctgccctaatcccaccttgataagtgtcttccatgacaatatttatagcagttattgcattcacttatttcttgaagattatccatcagcagtgctctagtcctgagatgaacaaactgtaccatacgctaaccatcacgccttgcattttgtactataaacggagagagtgaacgtcgggtcttcatctttgctatttgctttctgattggccacagtaatcagctttttttttttttttaatgcatgaagaggaaaatttgtatatgtatatctaaaggaagattatttatcatatctggtcattttctttcacttcagcattcatctcactattttaattcagcaaataaatctaaagcatggattaggtcacagacagtct

SEQ ID NO: 27143 - DNA, 1345 bp, Bovine  19866880464122
  misc_feature (1)..(1): n is a, c, g, or t
ncctttttaatgcaatgattctcttaaaaatcacaccagtaataattctgtgcagaaataaggcagccaaatgtgtggaaataaattccatttgtgtataaaatatctaagataggaaaaattatacttgtaaaatttaaagccagctaaggattcattgaaaaaaattttcatataccatcccttcaaatctggttttaaagaggctgtaacataattctaggaataaaaactttctggaaccggggtctatggaaaagagattacagcccccataacattatagaaatgcaaagagcttgcacgatcatctcagagaagtttcttttctttccttgctgtagacaaggaaacaattaaacaggggttctgaaaacattgctttctatgagcatacatttcttccattggtgctgaattttgtattgattaattacatttttttcctctttggaaagaaaacttttaagggggaaaatcactgttgtgctcacatgaaaacttcctattgactttgagaggtaagcattgactttttgatgggagggtgcaacttattgaagacgaaatttgaacccctggtgagatcctgattctagggtatagtttagttatctaaaaagaatgtgtctaatgtcagtctaaagaatcatatgcctttagatttttatatggggaaagttcagtaagacattttgacatagaaaatttcaactttgaaaaggaactttaaaaaaaatgctgtttgttcattcttttgaaatatatctgagtacaagaagagtaactaaacagcaaggaatgctgggcacagggttttcaccactttgaactgtcagatagtttctcaaaatgtatcaggcactgggaagtctagggaggttttagaaagtaatcaagcaatggctgacgatgcataagcctgaatcatcttatgtgctattgcgtgttttttgtaggcgggaaagtcattgctgactgtgatgggggctgggtgatatagactcttaatgctctcaacattttccaactcgcatgtcaggccaaaattgtaataacaaagctcagggcagctgcctgcgctgggtttggttctaactcaggtgagaacattcatcatgtctctacccttcatgaatgcacatgcatacaggttttcaaatataaagtcaaaagacatttcaagatttgaatagaacccttcagacttaaaagtaatctgaaagcacaagagttttgaaactttcccaaggattaaacaaatggcaagatcttgtctgtttaaatggtgtatgtcttcaggcctgtcagatctcagagtcatattttcaatagaaaaatagca

SEQ ID NO: 27144 - DNA, 4852 bp, Bovine  19866880475869
  misc_feature (1)..(1): n is a, c, g, or t
nctacagttgtagcaataattgtatcaatcacatatcaaagaaagtgtctcaccttttagacgagaggggaaaatcccatgaagaggatggcacgtatcttggcataatttttcacaggtgaaatcagtactgttcacaaaagagttcatgaagcccactgcctttacatgaggtgtaagatccagcaggctggtaactgcatgcagtctcaggcctagagctgtttggggccgtgttttaaatccccatcccctgtcgcattctctgtcccctgcccccactcaccactctgcccctactcacctcatcctcctcctgctcccccgctaccaactacaaagagaagacttcttctgatcggcctagaagtttggtcaaccctgccagatacaattgcattcatctcagaagttgctttcgtgccaagggcttgtcagaatgtgtaaggccgaatggaggtgcctctgcacttatacatgtctccatgacatgtttatttatttatttattttcctgcttgctaataacgccttccccttgggaggatttccgtctgataactgctttaatcattacccacactatggagaaggaaagggcaaaccactccagtcttctcacctgggaaatcccatggacagaggagcctggtgggccacagtccatggggtcacaagagtcagacacaacccacaacaaaattaccaccaccacccatgctatagtaagacaaacacaatatgtgtgcaatagagacactcaggctgtagtcacaaatacttgtggtccctaccacacgcaagccaaattgctggggggttccctgaccactgttgaatgcctgaagtcagctcacagatgtgatcagaacttcacagatgctgaactcctatagttgagatcacctacttttcctttccttccccttttaccaaaagctgactcttcagctttttgtaagtttttttttttttttttaatgtggatcatttttaaagacgttattgaatctgttacaataacacttcttctttttgtcctgatttttggccatgagacatgttggatattagctctccctgaccaaggatcaaacccacaccctctgctctggaagaagtcttaactcctggactgccagggaagtcccatgattcttgagctttttagcattttcttcccctcccagctatctcatcctagtctctcccgagtctcaacagtcacagagtgattctgtcttgcggctgcctttcccgttgggagccactcttcattcttgtgaggggctgaagtgcgctcctcccagactggtgggttgaagtgctaacctcacacctgtgaccgtgacctgatttgcaagcaggtcatctcagatgagatccatttaagctgaggccatcagagcacgctctaatgtgacttggctgcaacttctatcagaagacagacacggggggagtcgaccaagcgaacacagaggcgaagaccagaggtttgctgctgtcagccaaggagcgcgtggcattagcagcagctgaaagaagccgggaaggatgctctcctaaaggttccagagggaacaagtctctggctgacacttcaggactctgagaaaatacagtagttatttaagtcacactatttgttctgggggcctaggacataatacacttcccagcattattgatgctgtttaggcttcagcataaaatggtgctaaacacttgcttatcatacaaacgataaggctaatgattgatgataagactaatgattgatgatgtcaaggctctgactccattcacctcctcttcatcctttgtaatgaaatgagaccaaattgactcttgtcattctcttgcttccctgggggctcagccataaagaatccacctgccaatgcaggagcctcaggagccaagggatgttgggttccatccctggttggggataatccccctggagaagagactggtaacccactccagtattcccgcctggagaatccactggcgggctacagtccatagcgtcacaaagagtcagacacgacttgagcgactcagcagacaggcaggccactttcttgctcaaaatacttgatgattatcacctaaatttagaacagagtccaaatcttgagcttgagtctcttaggacccacccttgctcttcaaatgcacctcttactacactgcttcagaccctttcctgaacactggaatcttcccacccttgcactccaaagccatctgctctccaggacttgaccccacaatgtcccccatcagaactgccctttttctctcatctccactggtcagatccagttcacatgccatcgcttgagtgatggcttttataatctacctatccaaacaagccttttcatctctctgcttcataagactgcatgtatacatactggtatcataatatgctctatgttatagtaaattgtatacatttgccatctcaattagattccaaactccttaaggcttttcatttttgcacatgctgtcttatcttgcacagaaactggcatatcacatagtatttgtcagactgaattggaaaaaaaaaaaattgtgggttgtctcagtaagattcgatgcctacatgttagtgaaatggcatctatcctctttatgaaaagatgcccactgacattttcccactcaggtcaagtctttctggtgattaaccaagcaatagatagtgcatgagagaaagcaatactcacgcaactgtttatctttagtaacatgatcattgtggaggcatccactccccaaacacctaagatatgcatagctcttccttttcagcaaagtatcagaaatgtttatctaaaaatagagaacggaatatctcatatcctaagctctagagaaaccttggaatcctttcctgaacatcatgaacacacaatggacacaatctgatacttgtttttgtgactgatggcaacaattcaataaggctggatatcgattgactagtagaatgctattttatagaattcttttatttctttgagcatttcaagctttctgtattattgcgtgtagctgatgaactggatttggtagacttcctcctggaagttgtactcttgcttctggggtttaggagtttatgctggctcagctcatgggcactatatttcaaatgctcaaagtaaaagattttcatacaagcagtactcttgtctttctggaaaggatgaacatttaaaataactgtgtgcaaaatccacacattgactaggtaagattgaggaataagcattgacaaatatgctttcgaaaaataaactcttgaattagcacttttattatgaaacccagtgcccaatatgaaccaaataacatcatctgcaaaactaaaaatcaatttccaaaaaaaaaaggcaatctaacataggtcatgcaaattctagaaccatgaaatggtatgtgaaaaaggaacatttgccctgatttgctgtaataaaaccatggactataaattatgaccaattcagaatggctcttaagtcagtttttaattactgagtgatttgacctaaaatttctatagctcttccttttcaacatctgcatgtatcagtttagaatttcatctatgcttaccaatttagaactgtactccatttctgcctaacacttatttccaaggaaattaaaattgggggaatatcctacctaactctttccaccagcacttcccagtagaacacataatattaggagtttagcctttactgttgacactcttggaaagtgaagagtgaaacgtgttaatcactcagttgtgcccaactctgtgaccccatggactgtagcctgccaggctcctctgtccattggatttcccaggaaagagtactggggaagtactgggagtgggttgccatgccctcctccaggggatattccccacccaaggatggaacccaagcctcctgcatcgaaggcagattccttactgtctgaaccatcaggccactattattattttgctaaagctctgtaaacatcctacacttaaatcctttgttttacaatctcttattacccagagacaaaaagcaattcaagaatatcaacatcaggcatcccccttccccacctggatcccagcccaggttagggactcagaaaagaatcaaatcccaatacctccaatggagtcacacctgtcttcttcaagatttcttagagttgcaatgtggacatggtttttgtcaattataacaaaacttttgcttcagttgtacaatctttgcaaaaaaaagtcttatgtattccagttgacttacttaaggatcaaacaacatcatagctttagagcatcaagcttaaccatttaatttcgtcccttgtgtgacgatttccaactttagttttcatcatcatagaatgctgacgttcataggaaggtagtaaaagagggaaacattggttagatttgaaatatgtccaacaagcaggatcaatggtaatgcctcaaagccgtatctgcctctggagctagtttctagagatactgaacatttggttccagctttcttaaataatggaattggcgtcacagaatcctgggagcatgtctgttcaacctctacccatatccatcaagtttttctgtcccaaggagtgtttgagcaacaaagcagaaactagacatccatcgtctcttgagaagcttaggtctaatagaaggatcagagtagaaatagatgcagagatgattacagtcataatgatgcttaaaaggaaattactattcaaaaatggctttagtataaacatttctttgaggatcgtattaatctggaaa

SEQ ID NO: 27145 - DNA, 1292 bp, Bovine  19866880477425
  misc_feature (1)..(1): n is a, c, g, or t
naccacagctcaagatgaagtcagggacctgattaggcaaggagtctgaaatggatccaaaaagccctgggaagcattagcacaatgggtcccttcaaaaatccaggagatactgtgtagcacagggaactatatttagtatcctgtgataaaccataatggagaagaatatgaaaaagcatatttagatgttggagtcagcagaaattaacacaacattgtaaatcaactatacttcaattaaaaacacacacacacacacacacaaagtctgagaggacagtggcaggcattggtggggtaaggcttgacagtcacttctctgctgtgtttttacaggtagagcagtatttcaaagcattatctggtgctagaatgcagtaactaaccagcatgggagactaaatcagaacccgctggtacccgcaaacgaacatcaactctgcatggtcatgtgactctgaaacactttcaaactgacgtatatatacactacgatatgtaacatagatagctagtgggaaccttctataaagcacaggaagctaagctcagtgctcagtgatgaattgggtgggatggagggaagtccaaaaggagaggatgcatgtatgcatattgctgattcacttctttgtatagcagaaatgaacacagcattgtaaagcaattatactccaataaaaataatccataaatacataaataaaagatcattgtaggttgctggctgtccgagggttagacttctggtagcatccatgaccctgcagtgtgagatctgcttttagtggcagctcttatgtttcttcacgtaagcaaatgacaaatgatgcttgtccttctgaataagcaggtctgggttaggattatcagaaagtcagtacttacacccaagagaatgttgccaccaaacccagaaaattccacctgatttgctaaagtgaaaagctcctccctgattgtctggaaacctcaccatctccccactctggctcttttatgagttatcataactcagcggtagctgtaatgtaactgaccagcactgatgatgaaatcaataaccactaaacaaaaataaatggtgttttgggtgtaagaaacacttagccatttttatcttagggaaagtacatctgactgaagtgtgctccaactcctcatatttcacattttttaaaaaataaactccaattctgctaaaatttctgtagtgtctaatcaatatatataacagtggcctgtctctctgggctcaaatagaatcagtgcgtcatttagggaggaaa

SEQ ID NO: 27146 - DNA, 1527 bp, Bovine  19866880482917
  misc_feature (1)..(1): n is a, c, g, or t
nggatttcccagacaagaatactggagtggttaggctttcccatctccagtggatcaaactagggtcttctacattgcaggtagattctttaccatctgagccaccagggaagccccttaagtgaccataggtcttcctttttccctaaaaattcaatcttgaaaaaacagaaaattcacatggacaaaccccattatgcagttttaatcaatctcataaagatataaaatgacccaaccaaaagacataatttcagtgacaaccaaattaatattttaaactaaactaaagaaattagaacatttcaagacatatataattcctattttataagactaagaccaataaagtccctacctcaaaataggagtgaattacacatattaacaaaaatacatcttcctcctgcaaacagcacaggcttaacccttagatgcagccatttaaactcatcacagtaaaataaaatatattttgcacaagaaagttgcattttccataataaaacacagtggatgtttttgaatgctacttccatgagttcaagctttcaagacattgggtataaaaacaaaaagctacacaggaataatgtggctcatagtgttttgggtcaattttgcaaaagtgatgtggcaactacagacaaaccttatggggaaaacacgaatataaaattttgaatgcctagagtgtaagaggtcctaacgtgtgatgacaacttcctggtcttttctcagaccaagtgaaattgtattcagataattttccatctgtacttttcctttctgtagatcccttttcctttcctcacatttaaaaaaaggcttcaaacagctctgcagtattttggcaatgcaaggacttttaatctgaggtcatggtcagttttccctgtcacgaccactttgcccagaacatgcacagatactcagctcattttcctgctttgcaggttttcctcctgttttgaaagagtcagtagaaggaggctgggcacgtgaattcgctccacacagatatagtcagagaagttttctactgcaatccagtctgctgtgaaggttgagcattagactgtatttctgaggtgtctgtcctataagtggaaggggtcatgggatcagcctgggcttcaaggcaggagaaccaatccccagatgcccttctcactggagggttttgaggctgttctaagtccccttgtcctcccagtggtggtgcttctttcataggagaggtgtacggatgacgcaagacacaatgtttgcagttgcatcagacacaatagagcgccagacacacgcaggctattgtgagatgcgtctacgggtcagtggccgtccttctgtaaagtggacagcgggagaagcaccactggaccagtctcttgctgttcagtagctgagtcatgtctgactctttgtgaccccacggactgcagcacaccaggcttccctgtccttcactaactcccagagtttgctcaaactcatgtccatgagtccgcgatgccatccaaccat

SEQ ID NO: 27147 - DNA, 1153 bp, Bovine  19866880513025
  misc_feature (1)..(1): n is a, c, g, or t
nataatggacttgtatttagagtatataaactcgttacagctcaatagtttaaaagacaactcaatttaaaaataggcaaaggatctttttccaaagaagatataaaaatggccaatgaaatggcacatgaaaagctgttcaatgtcatttgtcataaaagaaatgcaaagtaaaacccagataagatgccacttcaaacccattagagtggctatgatcaaaaagataaatataagagtatgtaaggatgtggaaaaaatagaatgcttcagcattgctggtggaaatatgaaatggtacagtttctttggaaagcagtctggcagtttcacagtaaggtaaatatagatttagcatatgacccagcaatcccactcctaggtataaacccaaggaaaatgaaaacatatgtccacacaaaaccttctacatgaatgttcatagcagcattattcataatattcagaaaatagaaacaattcaaatgtctatcaactgatgaatggataaaaacttgccccaagtcacacaagggcttccccggtggctcaggtggtaaagaatctgcctgagatgcaggagacccaggtttgatctctgggttgggaagatctcctggagatggaatggaaacccacttcaatattcttgcctgcagaattccatggacagaggaagcctgtgggctacagatcatggggttgtgaagagtcagatgcaactgagtcactaacactttcacttcgtaattgacagagaccgtactgatagagactgatgttttgaaatgcaagtcttatggaactaaaataaatttgttaaatgcaaatttgaattcaagatggcagaccgactgtgtacacatgacctgactttagttggtggtggtatttataactattagatcttttttagtaatattgttagccttctgtgtggagtggtagggggaattagacatccccttccttacagtctcagacagaattctgctgtacatgcagtcatgtatcatcaagcaggggcaaaatcaattgcactaaacttaatgttgtcactctctctattttttttttttcccatcctctacttgcacagagtgtaacatgtttactcaagccagaagacaaaagagctaagggcaaaattcag

SEQ ID NO: 27148 - DNA, 1656 bp, Bovine  19866880565930
  misc_feature (1)..(1): n is a, c, g, or t
ngaatgcttaaagtaggtcttactctgagggacaactgagtcccagacagttacatatccatccttaggtcacgtgaccagtaaacgcagcaccgaaactgagtagtaggatgtttgagagcaaaactgcttgaagtgaagtgggaaagtcactcagtcgtgtctgacttttgtgaccctatggactgtagccagctaggctcctctgtccacgggattctccaggtaagaatattggaatgggttgtcattctcttctccagggggtcttcccgatccagggattgaacccgggtctcctgcattgtaagtggattcattgctgtctgagccaccagggaagcccgtgactcttaggcaatttataagactgagtccagtagattgttaacatgtcaaagaaggactttcaaagtatctgtggagaagtgccaagtattgctctcattgtttaaaatttccagcccatggaggactaatatttgtataaaatacaatatcatgtcactgctgtgtcctattgctataaaagttcctagatattttcattgtggttctgttataaactgtccacaaactggttttaaactcctttcaatagcatgaacttaaaattctaatttgggatttcttagctctcactttctagaagtttctgatatctttgaattcaagttgcagacagtttcctccaggaattgattattttcattctttgcaataactgatacaaaatgtctaatataattcaagagcaccaggaggttttattatcagtgctccaaaaatagccccaccaaataaattctctccgttgtattagctgtatgtattgtgtatcataaaacaagatagtttatgaaaaatagccgttttgacttagatatgtttttcatcattctccaaaatgttatgggggtggttttagggcttgtggtattatttacaacaagagtaagcgttctttatattgtgctgtggttctatttctttcttaatccttagaattatcttttccttcacataatttggtgaaagtctgaagtttgataaaattgcctttcatgtagcatggaaaggaagactaggcagctccttagagatatccgctagtgttactagtaagtctaaattcaagagtccaagccatgccctccgggtttctattttgagttggataagtattaaaaaaaaaaaattgtgtgttctctttaaccaagtatgttggctaggagaaggttatcatttatctctctgaaccagagatgagaaatttacaagaccacagggggcaggtagtaatttaaatgagtgagggcttctggtttagaacaaaagaccctagaggtggagtcttcgctgaatggaagacaccccatagaaagacattcacattcagtattgtaaagccctctctgaggcaaacacaggtgtcctggcatctttggtagtattttcatcttctgcatacatcagcagcgtggattctcaaagctttacaataaatagaaacaaatcctaaaccattcagtttcattgaatataaaactgtttttaattttctgatttacaagctacttctcagggtttcccacatgcaaataaaacccccctagttttttgagtatcatactgatgacagggggagaaaatgca

SEQ ID NO: 27149 - DNA, 1465 bp, Bovine  19866880587348
  misc_feature (1)..(1): n is a, c, g, or t
ntaaaaagccccagcatgggcttatctttagtcattagatttaggatcaagtcctgtatctaactatctaactatccaactctgtgggcttgaataagtcacttacctgcctgagccctagggccttaatccatgataccaccagatagtccagaattttccactcttatgatgcagtgttatactctctgtatgattgagtacttaagggttcttcatatcatttatttcaaaagctcacctaaggaggggaaaagacaaactcttaaacacagcatctcacacatcatttacctaaacagtaaatatgtagaatatgagatgaacctagattagaaaaacaaaattagagcaagtttactgctgatatgttgtgggagcaattttaaatttcatagcttgctttcatttcctttctaaataaagggattttgagatagaaatttaggttattgttgttgttcggtcactcagtcatgtcccactctttgtgaccccatggaccacagcatgccaggcctctctgtccttcaccatctcctggagcttgctcaagctcatgcccatcgagtcagtgatgccatccaaccatctcatcctctgtcgtccccttctcctcctgccttctatctttcccagcatcagggtcttttccaatgagttggctcttcgtatcagtattggagcttcagcttcagcatcagtccttccaatgaacattcaggtttaattcctttaggattgactgctttgatctccttgcagtccaagggactctcaagagtcttctccaacacatagttggagacaaaatttgattcctaaaagctcacagtctaaatgggttacaggcacacctcacgtatggatactcggggcagaaaagctttctcttcaaagtttcaatcttaagccttttatggagttcgcgttgtcggcggccacacgtcatgtagacgggggcttcctttctgaaatatgcctggactgcgcagcctgacatgcttgtaaaccaaatacaggaacggcgctgcagaaataatgacttcatgcccggcatccgcgtcctatttccactgtttaaccccacacacattgttctcatttccactcttcacgagacatttgttcttttcactgttctgtgctttaagtggatgaggttcatctggtttgctgatgttatgaaatatggaattcgcatattaatggtcctaaagtcatatgggaatactttgcaccgtgtctttgccacgacgtggcactacctggtaccgtgcagagtgagttaacatgatattaaattactgcttttggtgtcacttgcgtttcttattttcagaggacctttgtcctcctgtgggtgaaatgcaaccactcatggtcatccttggcgagcttatgcagagtttgaccttttacataaaactatgggatcagcgtatttaggcttcagaggagggat

SEQ ID NO: 27150 - DNA, 734 bp, Bovine  19866880595376
  misc_feature (1)..(1): n is a, c, g, or t
ntggcacatgggcttggttgccctgctgcctgtgggatatttcccaacaagtatcgaacctgtgtctcctgcattggaaggtggattcttaaccattacactgccagggaagttcaaagagaaatatttattgcatatttttagtgggcgagtatctacacttggacatcatatgcacattcttcaagtattccaatatcatggcacaataaaaattcttattcatatcctaaagatagtgaaactcaggctcaaagaggataaaaattaaacacaaaaagtccactagtaggtagaacacccatgcaccctcttgaaatgtgctgtccaaaagcagcaacacacaaaggtccatggcctcgggctttttctcacaagaaacatagattcaccatctttctctactctttgcaccctcctgaattaaaattacaaagtgcattcacatttataagtcttacagctttttgatgctgtaatgataaaccagcacaacttatttttgagagaaagaaaatctgcatcctatagcccagaagagtcggttccaggcagggcgatggatggtctgacagtttcactggaggttagaagggacagctgtgttccacgtaaatttgctgacctttctgaactttccatcaacaagattttctcatcctcccattattgctgtccgacaattaatcaacagctgttgaaacattataagcatgcttgtaatttggggtaaa

SEQ ID NO: 27151 - DNA, 1416 bp, Bovine  19866880620790
  misc_feature (1)..(1): n is a, c, g, or t
ngctcccccttccctgggattctccggcgagaacactggagtgggttgccatttccttctccaatgcatgaaagtgaaagtgaaagtgaagtcactcagtcgtgtccgactcttagcgaccccatggactacagcctaccagactcctccgtccatggggattttccaggcaagagtactggagtggggtgccattgccttctccgacaagtggactagcacatacatattttgcaactaaactttaaaatgtccttaatttctcaaaataaaaaaaaatcaagactttgcctctaatttttcacattgcttcactctgtgatattctgaaaatacaacaataaagagatctgtggtttagggggaacaaggaggtaagtaggcagagcagagagcatatttagggctgtgtgaaaatacggactgcgttatcatagtgttggaaatacgtcatatacattcatccaaacccacaggatggacaataccaagggtgaattgtaaggtaaattatgggctttctataattatgttaatgcttctatgttaatgaaggatcaactttggtaaaaaaacatccactctggtgagtgatgtagataatgggggagtcagggaataaataaatgggaaatatttgtacctttctctcaattgtgttgaaaacctaagactgatctaaatgataatatttgaaccacaaaaagaataaatgccatcgaaagcagtataaaagtaaagggcgaattatcaacaaacacagacatagctccttttctggaaacaataaagcaaaaacacaacactgtaagtcacccatactacaatataatttcttttttaaaataaaagggagggtggacaagacgaaaaaacaaaacagtttgagagtaatttgaccttttgaaagatacaacatgaagtcacaagggaattgaaaatgaagggaacaatacacaatatttaacaattagcaatggaagtgtgcagtaaaaatggcatcactttatcatctttcattgtaaggaaacactaattccaaacatcaaagagccacataaacgattaataatgcacttaaatgaactgatgtggcattgtaaacaaaggtatcagtggcagctaattcttggagtgtggctgatttctctcacagggccccgctcaaatcagttaaagaaagtcttcattctcttgcagagatcgtgtgtgtaaccacatggtctcttttacataaacaaggtgcatgcgtgctattgttcacacactgtgtgggagcaactgaaaatttaaaaaaaaaaaaagagcgagctggaaagaaatagttccataaaatgaattctttaacatgacattatcttctcaaaaatgcactggcctaacattgggaaggagatcattgtgaaaaaataatgg

SEQ ID NO: 27152 - DNA, 1156 bp, Bovine  19866880716311
  misc_feature (1)..(1): n is a, c, g, or t
ntttaacaagcctccggcggagcacatgatattctagggcggaagccgcagttttttctgtaaagggccacttagtaaatattttaggctttgcagcctgtttggtctctgaggtaaccactgaactcattttgtgagcacagccataaacaatgcataaacaaatgcattcagccgtgttccaataaaactttatttatggatgttgacatccgaatttcatgtaattttcatgtgtcataaaatatttttctttggatttttccaaccatttaaaatataaaaatcattttcgttcacaagccctatgaaagcacgctgatattaataagttgcaaatgatttttgtccaattaaggtatagaatgatttctcccgtgtagggaaggcccatcaagggtaaaagctttatgccctataggatgttaactggttttgtgtttgatttttgtttgtttttggcacagcttgtgaaaccttagtgaaagcggtggaaaagtaccagatggaatcatgtgcctctgtttgctgttcagtttatgctgccgagtgcctttcacaggctctttctgttcctataccctagggccgttgcttggttccaagctggtttttgagtctgagagcaaggatttcctgggctaagggaggaaaaggtgaaacacagcttcagaaaggcaggttggcatcctaacaagccaggaccttggggagagagatggacacagaagataaggaaccagaggccctgtttaattacacagtacccttggagaaggaaatggcaacccactaccggtgttcttgcctggagtctgtggggtcacacagagtcggatacaactgaagtgacttagcagaagcagcagtggtgcttaaagcccctgagtatttcaagcgcagaggagagatcatagcagctctcagaaggcattggcccttaaccttttgggggaggtcagggggtctgttgccaaccagggaaatctaaggctcctctcctcataaatttatacacacacacacacacacacacacacaccaagttttgcctgtaacttcaggggtcttttgaaatcccagacagaaagagattgactcactaaatttaaacaaaaaatccagggcctttggtgtataaactcgtcgtctttgg

SEQ ID NO: 27153 - DNA, 2449 bp, Bovine  19866880719770
  misc_feature (1)..(1): n is a, c, g, or t
ncttcagtgaatgttttttaacatttgcttttttacttgagtcttgatgttttccttttgaatatccctaagagtgcttctctggagttgtctaaatactgaatgttcataaatattttttttcttaggttttttttttctttaaagcatcaaatgtaaaaatagtcttagttatccttactacttaaaataattttcatcagttcaatttaaaggcattctccttttcatcgtacacttaatttaaaatcattctgaggtcatccattaaatgtcaaaacaacaacaacaacaacaacaacttttttggtgcctttttgtcctctatttgctttaaaccctccttaaactaaacaaaacccaaggcgaaatctccacctggaaaacttgagacgtttgattcgtttcaccagtttcatgcaatttaatttgggttcctttttcgagacagtctagaatataaactttctcttaaagagatcactttggaaaatccacctacacaagttgaaatcaacggtttccttacagaaaggaccctggggcaagaattagtgggaattactccatgggtacgtctgctactagttttttatgcttgatggtttgtcagttggcagaaatcaatggttctcttcacaccacagagcagctgaggaatagggcagactacaagttatcagcaccctgagtgtggattaaacatttcgtggctgcctctgcaacatgtgccctgaaagcaccacttggttcagaatcacaaaggactgagtttagcaaagctttaatttaaaagagacacaggtgacagctctgttatttttgcacgttcagatgcatccgcagctggttttatttatctcagccgtatatgcccgtatttgttgtaattactagtctcggatgtacttaaagataaatatctcaaatgcctatccggctaaattaaattaaggaaatcacacttttcacccgcacccactttggccctgctctgctgtggataatagcaacgatttaaaagtttgtgcctcatttcatctcccccatcagaagtgcttccaaagaagtcctgggtttcctatctcttccaactcaatatgctccataacggcattgttccctctagattcaacacagcaagaaggatttgtttcagagcttcttacctgctcataaaatgcttttaaatgcattttgacggctgggaatgtgaaagagtgttgtgtgcccaagaagtgtggcttgacccgttttaattcttctcccagtttgtccttcagtttgggattgcagacttggcttcggtgttcgtttgtttaccgttcacttgtggctcgttcaccgtgagcagtgtgtgaaacaacagggcgaggggttcacgtaacgtcagagtcagcatggggaaaatcagtgagagtctggaagtttgggaaaggggagagagacataataaaatgagaaggcagattaagaagatgaagttgcagagttttttaaaaggagtttgcttggcaagccgcacagaagtttgcccatgaaaatgtcaagaagatatggtatttgcctcccaaatgcttatacacggtccttcaggaaaaacagtgaatctgtttgcagtagtggcactcggttgacttgttttcagatgggaagacagagttttatttacttactttaaaatttgaaacaagacctgatgtgcacctctgttgaggagttgactggcttatgagtaagaatagtggcctttgcaaccccggcgtcaacactaacttctgctcctcttgagatctgagtatgttcattaatgacctggctgtctggaaggagcagctgcagagcaattcctccaacaatatttgggagaattagaccgcctgttaagaatgaacgagagaaaatgtcagtcaacatacttatacaatgaagaaatattgaataggtaagcaggtgatgcagggtggaaatttacatgtttttgcccgataaaaccacgggcaagagaagtatgttagtttcaacagaagagagtcgtatagtaccagatttcttctttacaggttgtgctgtttatttaaaaagtatttctattactttgatttatcactttaaatcaaagggatcctctccaaatgtctctctgaagtggatatctaataatgaacattgaagaattctgagtggatggaagccaagtccttttcgagaaagaccgtcagattgattttgtctggcttaacgtcgtggttactgtttgactgccttgcattttttctaaagcaaatttttttttgacccccctccaccaacccattcatttaaagggactctcttcagaaagacttgtgattttcctcagcacaatagactttgcctgacattcactctccttaaataaagatattaaaccctagtcctgcttcaggtactaactcagcaaatcagc

SEQ ID NO: 27154 - DNA, 780 bp, Bovine  19866880892704
  misc_feature (1)..(1): n is a, c, g, or t
ncttccttagtttttgaaacgctaaacctcacaccatccccgcctgcctcagtctccctgcccaccctcctgaccaatcactaggacacacagcacggacctcaccccctgccatttcccatttctctggttctggcctccactcccccacctgattcaaagattcttcttctgttctccccatctcatccattctcttcaaggaggccggacaaagcgttcgcaaagacagcttgtgctacgtccctgctgttattagaacctttagcagctcctgtcatgggcccaattaagtaggaattgctcacccttgcatttcagggcctcctccatacggcgccacctccctttccagcctcatttcacacgtctcctctacaagtaccaacacggttgctcactgctcatccaaatggtctgtgcatatggcctgatgtcttttactcatgctgttacttcagttggcaagtcctcctccacaattttccctttgaaaagtctcctcttctttcaaggccagcctgaaattccacactgcttacaaaaaaatcattttcctgttgacccaacagaacgtgctcacttcccctctgagtccctttaacaattcatatgcatctctcatgttacttacacatgttcacctgaggcccgtggtcttgacatcttccctggtagattgcaaccttcttggtggcacagattgggtcatatttttcatacaccctagagcacccagcactgctgaatgcattttagatgttcttaactcactattta

SEQ ID NO: 27155 - DNA, 1375 bp, Bovine  19866880892995
  misc_feature (1)..(1): n is a, c, g, or t
nagaagatttcagagaacaaaatccagtaataatttttattctgtgagtcagtcttttgtctgatccttcttgtttcccaagtgctatacccactttacaaagatatgaagataaactgtgaatggtctttagaaatattaacactacgcctattctttgtatgtgtggggcgggggaaagatgtcaagatcacaagagcaccatacttcattcctaaagctacaagttcttaggactaagatgccagtctgtctggtagaatccacacaaaataaggacctgaaataaatttcaactccattttccctcggaccactattgatttctatcttaaaacttactttcttgtggtactttggccaactccactggctaccctacaccttcaaaattcaactagcataattttcatctttacttcatccagatcttcaaggtcactcattggctccttccactcatcacagcttctgtattttccctttaataccatttcaatgtttctcccattcaaccctgagtacttcttaccatacatttcctgctgcttttagttcagtctgttatggaataaataacttttcctgtagttaatttcaacagccccaattctgggttttcgtagaagttgaagcccacataaatttttgaagcaccatattttcaatccttataactgactataaagttcagctcctaaaatagcttttgctttatgcaatatgtggtgattcaaatgtagccattcatcgaagcatattcttaccagatttatctcctcgtttaaaatgcttccttcattttttcatgactctgctcacaatgcaagtctctgaatttcaaagccctccagctaccagttctggaaaaggaaatggcaatccataccagcattcttgcctgggaaatcccatgggcagaggagcctggtgggctacagtccatggagtcacaaagagtcggacatgacagagcaactaacacttttcacttttctttctctcaattacttactctctcgatgcctcattaacaagaagtctaatagtgtcttttttccccaatgtatttattcaatttatttttattgaagcatagttaattcatagcgttatgttagtttccagcgcacagcaaagtgattcagttatacgtatatagacatatattgactagataaatatatacacatagatattctttttcagattcttttctgttataggtgattacaagacactgagtattcttccttgtgctacacagtaggacctttgttggttatccattttatatttagtggtgtgtggggttagtcactcagttgtgtccaactctttgtgatccctttggagtgtaaccagccaagctcct

SEQ ID NO: 27156 - DNA, 1172 bp, Bovine  19866880923978
  misc_feature (1)..(1): n is a, c, g, or t
nccacagttaaggtaccgagagctttgatctgtgtcattatgtttacgtaattaaataattcttttacaacatctcaggtggctgaggaccagggcatcttggagaaaacacactcatatacagttttccatcagccaactcaattcatagataactgaattccggggagtctttgcataattttagtgtggaatgctaggcaatccatagaacctttctgaaacttagtttaataaaagttgatgctctttacttgcctaatattacacaacttcttatctgattattagtttgaatcatgttctttattaacactacattgagtagaagagtgattctaatggcttttctggaattcttgggatgtgccgacctggaatgcagtccctgtaagccatatttcacatctatttaggttgtgtggagagagggagggcttccctgatagctcagtgggtagaaaatccactcgcaattctcccaggaggagacacaggacttgcaagttcaatccctggtccaggaagatgccctggagaaggaatggcataccactccaaaattcttgcctggagaattccatgggcagaggagcctgacaggctacagtccaaaggttcacaaagagttggacacgactgagtgactaagagagagaggcagggcttatgagaaactcatttattgaccaagtgcccttcactgatgagtgcagaaagaagctacctttaaaagaacacactacttttctttgctcctttaatgcttctgttcattctgatatgtttttaaataaaatattaaaaaattttcaaaggaatgaaagcatgtagattaggtgaaggaataaagactgttaatttgtaacaggaatggagcacagatttcagcagtaaagtgatgactgcacagggattcaagaagccagctcccacataaataccctttggtcttcatgttttccatctggtaagtaatgactaataaccatatgattctaataaaaagactttctgggtgagggtaggaaattctcaagtactcccttcagctggttcctgggagtggatagagtgactcagatctaaggggtggcttagcagaccactttccatttgcccatcttccttttcatttgacatagatggaattgatgcttttgaatatacgt

SEQ ID NO: 27157 - DNA, 890 bp, Bovine  19866880952440
  misc_feature (1)..(1): n is a, c, g, or t
ntgggaaaatagagtgaaactattcttgctaacattctacagctgttcaagggggagaaaaagatacttcagtcattagtatttaaaggaaattcatctatgcaagactttccagttaggttatgggctactttttagatgctgaagaacacaggaacacatctttcaaaacagtgtggaaattctcataatcctttcatttaaaaaacctggccattggacagggaacaggtaggaattagggaagcaaaggaatgttctttgatgtcagaatagtttaatccagaagaacagatatatcaaagttaactgagtgatttaattcatggaaacacactttcctgtgttcctttgaaaaaatggcacctgcttaatttttctctatggagaaaggcatgtttttgagacaatcatagatgctatttgcaaagctgtcaatgcattttagggtttcttcttaaacattgtgctttagcccttaaaactaagtctcgattgtaaaatttaaagtactacttgtagaggttaaataagaatcttaatgaatttccacaaaatatgtctgtaaactgaatgctacattactttctgctatatattttaaatagccagaaaagagattcagggataatcagctttttaagttctttctcctcttttacttttacctcctccttgtctttctcctcctcctcttaatgagaaaatcagagtgtggatggatggtttcattttaaaatagtgaggtcaaggagggctcgtaacaatggtattggaaataataagacaaaaatactattaaaaggcaaaacatgtatgtgtatatttatttcatgtatatataagaaagttaataaatatgtatatagttcttgcttgatgtacagaat

SEQ ID NO: 27158 - DNA, 839 bp, Bovine  19866880954779
  misc_feature (1)..(1): n is a, c, g, or t
nttggctctttgtgacgggtagccaagaattggagctttagcatcagtccttccaaaaaatattcagggttgattccctttatcattgatgggtttggtctgcttgctgtccaagggactctcgagtcttctccagcaccatagtttgaaaacgtcacttcctcaattttcagcacgtagtccaaccctcacatctttatataactactggaaaaaccatacctttgactatatggacctttgtcagcaagatgatgtctccgctttttaaatatgctgtctaggtttgtcatagcttttcttccaaggagcaagcatcttttaatttcatctctgcattcacggtccacagtgattttggagcccccccaaaataaagccattatgcagcttttaacaccctggagccttttcccaagccttggatcaaatgaaaacaataaagtttttgtaaaaaaaaaaaaagtgtgggcaaagcaataaagctgttctacctcacccaaaactacctctaagatttgattcggtacctgtgcacagaagctgaggtcttggcatcaacctcaggtaatcaggaccacaattcatactaggacctgatcttttgatccagagcctacacttcccagactgtttgagcaagcagtgcacagataaatactataatactttctttagtttgtattgttattgaaaaattgcttcaattctcaaaattctgtattgaacaacaatgagaattagcaaaggaggagtgaaatatgattagacgtttatgcataatatgctgctcagtcacttcagtcctgtccaactctttgcaaccccatggactgata

SEQ ID NO: 27159 - DNA, 2387 bp, Bovine  19866881004111
  misc_feature (1)..(1): n is a, c, g, or t
naataagagacactctgtggtatagaaggaaaaacccttggactagatgtgctgtgatggtatctctttaggagtcaagctcctagagccttaaacagggtgaatgaagaaaccggccccccaaccacttaacagtcgtgtctgactctgtgaccccatggactgcagcacgccaggcttctctgcctccactatctcctgcagtttgctcaaactcatgaccattgattcagtgatgccatccaacttctcatcctctgatgccctcttctcctactgccttcaatctttcccagcatcagggtcttttccaataaattggctcttcgcatcaggtagccaaagtactggagcttcagcttcaggatcagtccttctgatgaatattcagggttgatttcctttaggagtgactggattgatcttcttgctgtccaagggactctcaagagtcttctccagcaccagaattcaaaagcatcagttctctggcactcagccttctttatggtccaattctcccagccatacgtgactactggaaaaactacggctttgactatatggatttttgtgggcaaagtgatgtctctggtttttaacatgttgtctaggattgtcatatttcactgttatacagggatgacatattcctttcaagtttcagctttatgtgtatgcattccagattaagtggtttacttcatgaggagaataaacctcatgtcaagcttgggaggcaatcaaatttcaaaggcacacattcctctagagtggaggaatacattttttgaaagcttactgagatgctatcagcaataaaaagcactattcagcatagaaatagctaaaacatgattatgagagttttaaatatttactaagaacatcacaggaactttgtcatgggtcaaaagtgacccagcagggcaagtgtggaaatgggaatagaattacctgcaaacgaaacagacatggaggataaataaaaaatttctgccaaagcagacaagacaatagttcccctgtcctgtttccagccaaggaaattacctggactaataggatttgatatacctcagtgagacgccccggcctgtaatttctccatttcctaccctcccccccaccaaactacacagtgcatttagccacttaataggttgaaacagagtcatttttatgtagtttttgttattttccaaagcattctttcttataataaagctagaaggcattcaaggtaataaatggatattttaaactatatttccaaatctatcatccaataaactctttgaacattgatttaactacgcaatatcaaattagcacctttcttaacatgtactgaacctggaaaattaggaaagatacaatcagaaatcaactcattcaactcatcccctccccccactgcttatggaaacccctggacctgaacaaaatagacagtagatgccccaggtatcagccacttgccccaaggtaacgaagagtgctctagacacttccaggcccaagaatcgcctggttgtgttcattacaatcctctaacctctacaagaatggaaacatcagtacttgcttaaattctcttcatgactttggccaatccggggaacaagcagcaagggtctttcttctccgtgtttaagtataagcttcctgcctttcctcccaggagcgtggtgggaagtgctctggagagaagaaaggccagtgcactgatgctctgattgacttgccaggtgtgaccttccggtggattcctccagaagtgaagggcagtttactgctgaattctctctgaagccctgccccatggctggtggttccccatgagtagccctaccagctaggctggatgcctacactctggctgctctcctgagattcctcccccaaaccctgacaatctggtaatactgtccttccggcctcagtctgcagaagtcctctcattcatgaaaaccttttggacaacagtttaactgtgattcataagaaaagagcaaatttgctggaatgcagtggtttctaagctgtagccttcttgcttcatgccatcggtatacaagcctcccttcttgaatgctttctagaggaaatcccacacttctgtgtccccttaggtcccaggacacacctcaagctcttggcaactggaaggggaaatgggtagagactcagggtatattggcaatccctccaaggacaggctgcaagtctttttaatttttttcttaattgaagtataattggcttacaatgttgtgtcagtttcatgtgtacagtaaaatgagccatatatatatatatatatatgaagtgatttagcatatatatatatataatgcggagaaggcaatggcaacccactccgg

SEQ ID NO: 27160 - DNA, 1077 bp, Bovine  19866881013552
  misc_feature (1)..(1): n is a, c, g, or t
ngagagcctgtgtacaggcaggagtactctttagatctgttgttgtggagtccctcctaaagcctggatttacttccttcggagtatttaaaaggcacccgataaatgaacaccgatgttctggaagcttttaatgacagtagatttgaaacagtccatagatgcttgctttataggcttttaattaaattaagccagtaaaaataccagatgtgtgcattcattttatcatatctggtatggcttcttccttctttttattctggattccagtgtgtatatttcagctcagtttcaaaccatttttggccagctgttatgtacccagcacctccatggctgctgttaagtctgaagcattactggggaaagaacatggtactgcgtatctagaatctaggaagtcagtggaagaactttaacagagttgtaatgaacaaaataagcataacatcacaggatggataacaaatcattgtattacagaaagccataggattcttttggacagctgagcgtggctcctgttgaaagaccctctctgcaaccatttctctcattttagataaagatgcttcagcagaaactctgatcagagtattcccacatccaaacaaacatttataattaaaagctttccaccggccaagcaggaagtttctctctgggctgggttcctgcttttcattctgtccattctgttgttaaaaccagcaacaacttttaagaaaaagtcccctccatcttgcctcctgctgcgcgattcacagcttctgtctttgtccccttccatccatctacgaaaaacaaaccgcacccatacttctcaaacgcttgtctctgaggatgaaccgctttcccacccgaggttcatctaatccaaaaggaatgttccttttgttgcatcgaagctgaaatgttgaatgttttcaatcaagcctacatcctttcaggctctccgtattatgtctagcagaggtagatggttcaatccagccttaattaacaattctaatctcaaaaatagcaatgtcaactagaaaagaggaggaggagatagcaccgcggcctgcccac

SEQ ID NO: 27161 - DNA, 1887 bp, Bovine  19866881065789
  misc_feature (1)..(1): n is a, c, g, or t
nttggcgatttcctaaggcagtcttatgagtgctctgatgtatagtaacctgataagtctttatttagaacccatatttcactccttaacctttgaggcgggcttcagggaagctgtaagcagccaacgctttcccactcgagcaatgatgaggcgctcaccactatttgacacaaatcagtcaggtaccgttttggcagagacttaagtctcaagctttagtaaagcctctcaacagtgacgtcagactctggaggactaacccttatccctaagaaggttcagactcttgcgaatgtaggtgtatatgtaagtttattcctcacatacacacaaaatcagcatctaaaacaattatattggtttaaatcaatatattttttcttttatttttttaaaaaattgaaatgcagttgatttacaatgttgtgttaaattaatatatgtcttaagaagaaattcttataccaggacacaaaagaaatgaaatctccaaaagtcaacttttacaaaaaaaaagcaaaactctttattatgacttttccctcatacctaaactaattgcatcttaagtgtctataaatgattgatgttcagaagtgctatggtcaacattttttggcgtggtttggcagaataagatccatgccagaaatgtatagagacacagacaccttattacttgaaaatcaaggtataaagttaaaagtcgtcaggtaaacaacgaaaatagttttctgatccaaaattcagtctgaatctggtgccctgatggagcctacagaaggaagcctatcagagcttttccaggatgttcttagattacattctgagacaactcactgtaaacacattttgagaggtgctcattttcattcatttgagttttgtaatgggcagcattctgcttagaagaaatagcctttgaacttagccttgaaggataagtggtcaccttccaggctgtatgtgatgggggaataccaggttgcttagcagaggctgtagagacacatgactcctcacatatggacgaaatcaacagcaccatatacaaatttgaattccagggggactaaaaacccaagtgtgaatggcaaaactagatttaaagcctgttactactattattgggtggtaaagaatctgcttgctaatgcaggagattttggtttgatccctgggtctaggctgggaagatcctcttgagtgagaaatggcaaccccctccagtattcttgcccggggaaccccatggacagaagagcctggtgggctacagtccctggggctgcaaagagtcagacacgactgtgcacagagcacttccaatgttctacatagaatgcttttccagaaagaagctacctccttcattaccatacttcactcagatctctgatcaaatgtccccactttgtgacattcccagggttccctgactcccaagtgttgcatcacatctcatccctgacacccatactccctcgtacctgccttctttcctctccgtatcttgtattatcatttgccctcccatatatttcagtgtcggagaaggcagtggcaccccactccagtactcttgcctggaaaatcctgtggatggaggagcctggtaggctgcagtccatgggatctcgaggagtcgaacacgactgagcaacttcactttcacttttcactttcatgtgttggagaaggaaatggcaacccactccagtgttcttgcctggagaattccagggacgggggagcctggtgggctgccatctatggggtcgcacagagtcggacacgactgaagcgacttaacagtagcaatatttcagtgtttacttgtctagggtcttctctccactaaaacatcagctccctcaaggcagt

SEQ ID NO: 27162 - DNA, 1071 bp, Bovine  19866881101824
  misc_feature (1)..(1): n is a, c, g, or t
ngagtcttaggagctcgctccttttgaaagggaaaaaaataaaactgagagcaaaagagaatgtgaggcaggaaaaagaaaaaaaaaaaaaaaaaagcacttcccctttccagatacgctgaaacagaactgtcaaatgcaggaaaatcttgtaaagttttcctccgctgtaggccattgaatagaactgcaataaactctgacccataaaaagtcatgtaaacattataacccggttttactagccctttaagtacggggaggcattgatctaaaacagcttgggtctcctaagttcccaaaaccttcgcgagcatccaacctccaacatgggtgttcgaaggcctccggcactgaaagccaaaaataggatggagctagaaaattgcagctatttagctatttgccccaggcagatgtttgatatttccaagagcaaaacatccgaaaggaaagctcccgaggaaaagctactttgtagcacctccgccatggaactatttaatgcgcaatgtccacagtcaaaataaatccctacgtggacctccgctgccatgtttcactgtccctaaaaatcatgccaagaaagtatttcacgcagtaaaagtagtcatctcactgccttaggacagatcagctccgactatctccctgcggctaaaaagctttaccgcatgaaatataaatgtggaaacattcaagggagatttttacaggtgtcaacacgaatgctcattccattacccatctgtggaatgctagttaagcctgccttgaaaatatctttttcttctttttcctagaatccaaaagaaagcagggtgaacgaggggagaagcaggcaggacacccggttagctcactgtcagattgctctagcttcctaatttttttttttaattttcaaaagcactttatcattctgttttttttaatgtaaatatttttttaaaatttttatgaagtcatgttggtttctgccatacaacaacacaaatcagccatcatcttgtttataattgtgcttgcaaggaagttagcatccgtgagtcagtctctgttgccaagtag

SEQ ID NO: 27163 - DNA, 959 bp, Bovine  19866881102148
  misc_feature (1)..(1): n is a, c, g, or t
nctccttggcatgtgggatcctcctagaccagggattgaacctgtgcccctgcattgcaagatggattcttaaccactggaccaccaggggagcctgcctgttcttttagatgtctatcattctaccaactgacctcacagaaagcattttaaataacagaagagaatctagattatgaatggggatagccatatcacctcacagcttcctctcctaaacaagaattttaaagtttcctaacatgttctgtgtgcatgcgtgctaaatcacttgtccatgcatgtccaactctttgcgaccccatggactgttgtcttccaggctcctccatccataggattctccaagcaagaatactggagtgggttgccgtgcccttctctaaagggtattcccagcccagggattgaacccacatctctggcatcttctgcattgacaggcagactctttaccactagcaccacctgggaaacccaacatgctttacagaaaaccacaaagcactgcttgtaggatgacaacacatagaatgaagttcaggtcatttcctacacatgtagccacagtctataaaatctgctcatgacaatacccccccaaaagatacggcatacggattctataaatacagaaacacggatcgagtccactgtggggtactgaatttctaagtttaatgttaatcctcagttgctcagaaacattgtttgtctttaattataatattctcattcaattaaaaaaaattaggtgctgtaattcagacttctaattaagtgaattagcttttgacattttcttggaaaaagatgttcccaatgtggctttttccctttacttgcaattaaacattccttagcactatttaaatactttggtaagaaatacgcaatttatagcaacatgccaacttttttcagacagtgacgaggcagctgttaacctcagacatcat

SEQ ID NO: 27164 - DNA, 1243 bp, Bovine  19866881141941
  misc_feature (1)..(1): n is a, c, g, or t
nctgaaggagtccgaggctcgagattgccaaggatcaggcaagcaatcctgaaggctttggactttatcccgaggactattaggaatctatgaatcacctttaaaaggggagtaatctgatcagctcttcagtcaagccaaatccccccagtagctccatggagagtgaagtgcagaggggtaagatcagaggccaggacacgaagcagcatcctctgatccgcgaatccgggaccgagtgggcggctggacccagggaggggctgagcgggtggagggaagatagaaaggcaggagaggcggtgtcagcgaacctgacaggacccgatgactgactcgacgtggaaaggagggagaatgaaaaatgactcccgaaatcccacctggtgcatttggacaccttttgccaagagagaaaataaaaaaggactaaggcgaggtggtgagttcatcccagatgactgcgtctgagctaagtgaagatgtccattctccagcaggaatctgtgctcacggaggtgtgcgctggagcaaggcagtccaggatctccgtgcatagttgactgggcttcccaggtggtgctactggtaaggaacccacctgccaatgcaggtagatgtaaaagacgctgggttcaatccctgggtcgggaagatgcccgggaggagggcatggcgacccgctccagtattcttgcctggagcatcccatggacagaggagcctggtaggctgcagtccatagggtcgcacggagtcaaacatgactgaagtgacttagcacataacacacaagtatagttgacgaagaagccatttgaggcacttcgtttagaaaggctgggaacaaagagaacagacctaagccggaaaatcggagttgtgtttgttctgtgctgaaattaatagctatattgagctctgtgtgctttacgtattgtatttcatttaaaagacatttttgggagcctttatgttcttttgtttgtttgttttatgtattttaacttgtttaatcttcacaatctgtataggagacagattcatccttatctttctcatggttgaagaaacggaggcccagatgggtccagttctctgcccaaggtaccagagacactgaagggcacagtgaggaagctgacccacacggtccggactcagtcttcgttctggccatccggcagtactgacccttactgtgctggataccacatttaagggaccagcagaggaaatccaa

SEQ ID NO: 27165 - DNA, 1151 bp, Bovine  19866881155212
  misc_feature (1)..(1): n is a, c, g, or t
nttttaacagaagctaacaacccccttagccgttcttcatgtcatttatacagtttggagggttgttaatgccatcttcacacatttgagaactggtcaaattgttgtctccagtcctgtatatctaaataaaaaagcattccggtgtacatgtgtgcatgctaagtcactgtagtcgtgtccaactctgtgtgactccaaggactgtagcccgcctggctcctgtgtccatgaaattgtccaggcaagaacactggagtggcttaccattcccttctccaggggatcttctcgactcagggatggaaccctggtctcccgcattgcaggtgcttctttaccatatgagcctccagggaagccctcttcaatagttattggataccatttccatgctacattccatcctggtcagtatcgccggacacactccattttgcttattcatgtagcactaatttactgaggcattgtccaagcaagcattagtgtctaagctgagaaggatacaaagacagacaaggagatttacttataaagtagccttctttatttctatgtcattattccattatatttgcactgggagtctcagatcatttgtttccatctggacatctgcaggtgtgacagccaacattgaattatgtgggtctgagaatttttccaaaaacgtgctgttggtcaaaagttccaagaaaaactaatattctatgtaaattcccaatgcaaggtttaagcaaggcctatacacttaaacaaagaatacgttgcttggtttatgcgtgtggcctatatagaaagcaaatacacagaggctatcttatatttgtcttacatatgataaggtaaaaaaaatctgccatgtgttcatggctgattttgatttgaccacctgtactgtgagactgtgtccaacagttggcaaaaagagtcagtctgaacataagaaaacattcaagtgtggctagattttgcacggaaagggacttattccaaggatcacataatatgatatgtgtacccactcttggggatggaaactagttatatattctagcttttactatttttttaagccaaagcagagatgtgatgagtcccactcataaaaattcaggaggatacatatatattttttaacagatgtg

SEQ ID NO: 27166 - DNA, 1756 bp, Bovine  19866881213742
  misc_feature (1)..(1): n is a, c, g, or t
ntatcttaataaagtagtttaaatagaaagaaaagaaaaaaaatataaaatgcttcttactttaaaataaaacatacctctgtgtgtacacacatgtgcatattttcagttctattcctgctccctactagtttcttggtagcatttgtacataacagtttttgtattttagagaggtacagatctagattcaaagatcatcacaattaagcatgtttgtagcagaaaaggcacatgactgatactttcttgtgtttcctaaatttccttgagagtaaccagtagtcatgtatggatgggagagttggacccataaagaaagctgagcaccgaagaattgatgcttttgaactgtggtgttggagaagactcttgagagtcccttgaactgcaagaagatccaaccagtccatcctaaaggaaatcagtcctgaatgttcattggaaggaatgatgttgaagctgaaactccaatactttggccacctgatgcaaagaactgactgataaaaagaccctcatgctgggcaagattgaaggtgggaggagaaggggacaacagaggatgagatggttgaatggtatcaccaactcaatggacataagtttgagtaaattccaggagttggtgatggacagggcatcctggcatgctgcagtccatggggttgcaaagaattggacatgattgagcaactgaactgaactgaacagaattgaactgaactgaaccatagtgttgagatgcatttttccatatgttttctatatattatattttctatatattatatttctatatattatcaatttttttgtgtgtgtgtgaggtggttgatggagtccctattctgtttggggttatatctacttgggtatagatattaaatatagaagagattaatgaatcccaaggtttctctaataaaactctgtgtgctattttcttgaactcatttaatgatatttttgtgaaaagggaatttttcaagaaagggaaaattctgcaattctgttatttacctagattatattgtatctaacccaataatacttttcacatgtactatttaggggcttccctggtggctcagctggtaaagaatctgcctgcaatgtgggagacctggctttgatccctgggttggtgagatcccctagagaagggaacggctacccagtattctggatattctggcctggagaagtccatggactgtatagtccatggggttgcaaagagttgagtcagacacgattgagcaactttcactttcactttactttcatatactctttgaggtccttaggttaacacttaactatttttctcatttgaacaacaatgacagcagcaaattctgagtcttttttgtgttgctctattttttctagtgtgtagtttggcgttggttttgagtaagcatccactctcttttttgctgttgatactaacaccaatttattaaagggtaagacaccatatgttcatttcagaataccaattccattttgttcatctgaattcccggtatttgcaaagcagtttatttacttctaatttgcagtaatgtgtatgctttctattcttttcattttgacttattttcagataattttgttatcttacacttctgatgctttttattttgtgaaaaagatatatttttattctcactgaaaggaaaaagtagaaaagatgggtagcaggaatttttgtatttaaacaaagctgaagaagcatggcactgatttt

SEQ ID NO: 27167 - DNA, 1002 bp, Bovine  19866881262402
  misc_feature (1)..(1): n is a, c, g, or t
nctttctctttcatttttaagagttttaatcttgaatttaaagttgtgcttagcatatgtatcctttaaggtcttattttctatgatgaaagtaatccagttgatctattattagtagtatgtctactttttgtcttaaaaatctgtaattattagcaagggaggccttttaattttacatgggaaataataaatgtttcagaagtttaacatcttaaatcgtatattatcaaggaaaaagataaaggtaagtaaaaaagcctttccaagcttttaccaaaacaattgtaggaaatttctcatcatgcttctattattcttctgtcttgaaaagtaccctcagagacataatggccacaaccatttcattttctaacttattaagcagtctgagggtgaattgagagtttcagttccaggttgtggtgataattactaagtgcaaaagcccctgttgcctttcattaagcagttataatatttaattgagactacagggtgtcaatagtcagcatcataccatggataattatccatacacataaaagaacactgagggtactttcaacaataagacagattatcaaaaaattacatttttaatttaagttttgacttgagtcatttcagtgattaaatacatatctctgcatttttctgcaaatgaggacataaagctaaataaatgaaccataaagtggggaagggaaaaaaaatgttttcactgtaacataaatggatgaatgtagtatgcattaacaaatcacacagtgtctcttctaaaagctgtctcaggaaggagagccgctgacccaggtggtcaaagattcctgccagtttggctgggaaagggtcctctccttggtgagcctggcactgccaggatcgtgggccaaaatgtctgggtggcctttgctgcagcctttggcccccacaacttggcttctggcagagtacttatctctttgaccgctgactgggaaacgactgaaaagggaagaa

SEQ ID NO: 27168 - DNA, 862 bp, Bovine  19866881267590
  misc_feature (1)..(1): n is a, c, g, or t
ncgggggatcttgcccgtcctctagcagttcttccctggagtttagagacggacccaccaaacacgtgagtgactaacccggaatctgaggctgtccccagggtgcacttaggggtgcatctcagtgatgcccttggcataccagtggcatggagaggggggtacagaccagctgaaagggggtggggggagggcagggaagggaaagagattgtggaaaagagcctcttgaagcacagaaaagagaaaaccctcttttgtggggccttgccagcgcctggggaacagcacaagctgaaagggcaagctttgccccgggaagcctggggctgctcgtctgtctgtgaagcacacacacctggggtggggattcctcccctgttgccctgcccgaccgcccgtcactttgagttacaggcctgtccgctccccgccctgctcctgctggtttcaaatggcctagatttttacttctccatttcaggagcaagagaggaaaaacttggcttcttagggtttctaagcagatgatctaattttaaagtccgtttccctcgcggcagagcaaatctacatgaagggtacttggagaatatcttatttttgtattcagtgcctttcagaggttccttgttgttttatttaaagctgtgtttggtgcattagcaatgcataacaataaccgcttagcaaacactgcaaaacggaaactcaagtaggtggcccccagggtaaaaaaaaaaaaaaagaaaaaggaagaaagaacacaaagacaattctcttggactcaaagaagtattttcctagctattatttcacagaagttttctaatacataaccaggaaaaaaaaaaaggaagga

SEQ ID NO: 27169 - DNA, 1492 bp, Bovine  19866881332082
  misc_feature (1)..(1): n is a, c, g, or t
nactctcggagttcacccagactcacgtccatcaagtcagtgatgccatccagccatctcatcctctgtcatccccttctcctcctgcccccaatccctcccagcatcagagtcttttccaatgagtcaactgttctcatgaggtggccaaagtattagagtttcagctttagcatcattccttccgaagaacacccagggctgatctccttcagaatggactggttggatctccttgcagtccaagggagtctcaagagtcttctccaacaccacagttcaaaagcatcaattcttcggcgctcagctttcttcacagtccaactttcacatccatacatgaccactggaaaaaccatagccttgaagaaggggaaaaaaacaggcatttgtaaatagaacaaagtttcttctgaagaaccatgtatcttctggctgacccagagtgtcaggagccaaaaccagtacagcaagaagcttctcaaagaacagtggcaacaatgaaactctgcacacgggcaaagtcgcttcagtggtgtctgactctttgtgaccctgtggactgtagcccaccaggctcccctgtccataggcttctccaggcaagaatactggagtgggttgccatttcctcctccaggggatcttctggacctggggatcaaaccagcatctcttaggtctcctgccttcacaggcaggcttcttatcactagcaccatctggaaagcccagcagtgaaattaaccaggactaattttcacatgtgagaaaggagtaagaacccagagtaacaagatgcgtttgaaaaaagagggcatttctttcagaaacccaggagcaaaacacatatattacagccttaggctattttaaattgctgaaaaatcttagtgttggcacaaagtggtcataataatatgggcatatttgttagggtagaataaatctgatccttaaactacgcctggactttagccgggatttctttaaagacttctctctctccatcttttcattagaagtagctcactgctgtcctgagtaccctcttaattgggagagttggattgtgaagctctactagccacattctcttacatgaagccaatatggggtatcatgacatcataaaacacaacttaagttcccagattcataaaggaactccctctgggagccctcaggtggtgacaggttgacaaggcagtgtctgcgcttgcggtcccctaatggagtgacgtagtacagttcacgtcgtgtctctgagccccccggatgcggaggggagacacacagcctgcccttccagctggcggccatctgcctaagtgacaagtgccagatggggagaagaggctgaaatggggatcaaacattaagtaaaagaggatgtcttggaaagcagccttgacatcgatgattcgtatgacattctaatgtctggaagtttccatctgaaatatttgcgtaggaataaaaaagcagatag

SEQ ID NO: 27170 - DNA, 1130 bp, Bovine  19866881380257
  misc_feature (1)..(1): n is a, c, g, or t
nttccttgtgttcttctctgggtgcttgttatagtactttgtgtcaagaacacttagcagatctagtctcaacatattttaacgtgcacaggactgtattgttagttatacagagctccttaaaccccgaaacttgtgtcctgtgctttttggccaagaataactgataaccacttggttgatccacttaaacacaccacccaaactcagggtttgtcttggcttggccacatcgtgtggcatgtgggaaagagctccctgaccagggatcaaacccatgcccctggccttggaagcacctcgtcttaaccactggaccatcactggtttggttaaaccaaactcatttctaaaacagcctacatcccttctgttaaatatcatttaaattcctgtgagttgattattatatttttgatttgatccattttttaaaaaatgtgtcatgtggctgaaatatgcacagaattcagtaagatagcaaaaaataaaaagtaagacagtgtagatcttggcacatgaggataacagttgggatggactttggctcagagaggatcagagacttgggaacatggcgttgtcacatatgggaaaaaaaatcacctaatttctaaatttttgtttccgctgggatgctgaagcatcagaataaagcaaactgtactctgagggaagatagaggcagaaaggtaacggggtgcttgcaaatagcacactggaggccaagaagaaagggcctgaaaggaagcccagcgtcgtaacagttacgggtgtaatatttaccatatgtcccatatgttttcaaattgcaaaagtgcaactcgttcccacagcccatttgcaagtggacctgacaaccttagcccgcagaaatcaaagactgtaatctactataaattctgccacgctagatggaacgaatatctgtcaggcttttttacttaaacttctcttcctttaagagagcagcatctggctctaaactgcacatttaattgaaaaatcctttaataatagcattaattttcatcattttgcattccggccggctgtgacagggaacaaggccgccagaccgccgggaggaggggctgggcaggggcgggggcaggcgaggtgagggcgca

SEQ ID NO: 27171 - DNA, 937 bp, Bovine  19866881468610
  misc_feature (1)..(1): n is a, c, g, or t
nctgcgatttttaaagaaggtgtgaggttcacacggtaatagtattcatctcaacttcctggaatactttgatgggaaaaaaaaagggttaaaaatgcagctgccgagagagaaaacaccagctagcgaatcatgtgtgattgatggggttggggagagtcaatgataatagtatacacattggacttggcggggattttccttctaaagaagttaagtattttataaatattatctctttcatccttttaaacttcccgtgatgtggcatttattactctcagcttccagatggacagctaaccgcagagaaacgcacaaggctcccagaggcacgtgatgactgggtctctgtgtgctgggcgagacgggctctgacggatggagtcactcattcactggctcattcactcattcactcaacaggaaatgtggcagatctgcgctgtggcaggcaccacgctcaggacatggggaggaggcagggatgaatgaaggcaatcagctcacatggaggccaggaggctcacggaggcaaacaccggtaataggaagagaaggtgagctctccaatgaagagctggaaattgctgtgataaacagtgaagtattgggatggtgatgtgcttagttatagagatacagacatgccttaactggtgtgaaaagacgcacagcaaatattactaggtaacccacgctcagtcactcagttgtggccgacgcttagcaaccctatggactgtcgcccgtcaggctcttctgtccatggggtttcccaggcaagaatactagagtgctttgccaggggaccttcctggggaccttcctgacctagggatcgagttgacctctctggcttttcctgcattctttactaactgcgccacctgggagagaccaagtaaaacccaggtgaaaaaaagaataagaaggt

SEQ ID NO: 27172 - DNA, 945 bp, Bovine  19866881624977
  misc_feature (1)..(1): n is a, c, g, or t
nttctacaacctaatcaggcagatggcttttgacactttttatattcatttttggctatccccctaaagctctgagtatttttgctagctgtagcaggatcaaaaccacaaggtgaattccgggcctctttggttattgaatagttcaatagtacattaattttgtcaataatatatcaatcttagcaaagaaaaatattttttccgaatattttttagtgccctactgacaattatctttctaaagtcttgttatttgtcagcaggtctcaggtcaatttggaaataggtgagtttccaactcgtttctcttacgaagtggttttctcacggcacattccttggctttgatgtaagaggactttgaagccagaataaatatcttcctgataatggtgctgagctccattcccacccgaatagaaatttcagaatatttgagccaaaggtccccaacttttctgcaagcagtttggacacaagatcattaaatcgtaaaacaagcctcaacaaaaacgatgtattttgtttgcttccccgaccaggctgttcattggccttcactcagttccagcataaacatttgagtcacagggattctgtgggcgtgtcacatggctctttatcccgccgcctccgcggtcccatgccttctttgttctagccagaacacccaccatcagcgtgtgtctaacctcagaatgcatgcacagcagaggtctggggggtaagtcctttataagctccatgcctgtcatcctgaagtcatcagcctaaggaggaccgtgagcttactcacagtgtaattaagtggccatgtcagggggtcaggcagcatcatcttctctggccaaaaacacttagaatcctcgtgtggcgatttatgatagtgctgcctggccaactaccagaaaaccagctatcttaactcatccaggccacact

SEQ ID NO: 27173 - DNA, 840 bp, Bovine  19866881798458
  misc_feature (1)..(1): n is a, c, g, or t
nacatttatatccatttctggtcacagagatagaatttttagaaaatgccatccaaaaacgtattcttaaagaatacctctatgaaggagctatttctacacaatcgattcagttactgaggttagtttttgacgtgtaacaacatgaaaacaattttgatggtgccttgaaaaatatcataaagaagtaataaattcataaatgcacaaatcttttctaatatcattttctattatcatttagtaggcatgcttatgttttctcctaagcaatttggtttcaaagatttcaaaaaaaaaaatattttaagccttcagaaaatacctccagtgctttcatttaagatcagcttggccactagggaaccgttactttatattggctgttgccaaatagaaatttgaatgaccttgctacccatttcacgagagtccacaacagtcagatccacatgactttccaaagttagtttattttggattatagcttgattccccacagatctggatatttaataaggaattactactaacttaaataagttcacaaaagacagcaagtaagcagcatgcgctccacgcacacggggaagtgtccgcgacggccgacgttccaataaatgtgcggttcattttaggctgattagcaacggttttcaaaaatggctccattaatcctcacaccgccaccccccgcctcaacccagaaccagcaaaatcttcagcttatttaagcttgaaacttgagaaaataatcttgcactctattggaaccccgaatgcagctgtatgtattcctctgagactttcacggagctggtagacacctcagtaaaagag

SEQ ID NO: 27174 - DNA, 926 bp, Bovine  19866882113620
  misc_feature (1)..(1): n is a, c, g, or t
naagccctagtattgttaggtatgtgaatcaactatacttcaaaaattaataagaaatgaaataaacatgagaaaaagaaagagaggagagaaaagaaaaaagcaattgcaaaatgttggtcttgttttcttgctgagaaaaccagataccagtgatctgatttacctgtttattcacaaatagctaattaattgcccatcatgggattttttttgtcattttgttttcctttcaaaatcatatccatgatgcgtatgcagatgctttttacatgtttaaaaaataaataatggggcttttatatattctattatgcagactttgaaaacccattttgttcttgatagcggtttggaaggtttgtatgggctgacagccaagcccagacctggctttctgggaaagcaaaggagtgatgaaaaaggccccttgcagttccctccgtctgccattcttcgactcagagatagacctttctcgatatgatgacttcctaacatctgaagtgtgagtggctttacaagacgtaaagagaaactatccagctgcaagttattactgtcaggtcaattaaatagattccaaggaccatcatcatgtttatacgtatcatggatcattggagatgaaaaacaatgtctttgtggtctcagctccctcctcccccactttcacagaaagagctgtagagacccgtgaataattgttggaatacgtttcaacagcagcctctccacacgggcaagcgattccacttaaattggttaatatcctattgttaatggtctgccttttctatagaaaggcattaaggaaaagggttggatcactacataaataacatgacatggtcttggctttgtcctgtgaagttcctgccaaagacgatggagtcttcgtgttgttcaataggttaaaaaaaaag

SEQ ID NO: 27175 - DNA, 1802 bp, Bovine  19866880081383
  misc_feature (1)..(1): n is a, c, g, or t
nctactgctgctacgtcacttcagtcgtgtccgactttgtgtgaccccatagacggcagcccaccaggctcccccgtccctgggattctccaggcaagaacactggagtgggttgccatttccttctccagtgcatgaaagtgaaaagtgaaagtgaagtcgctcagtcgtgtctgactctagcgacgccatggactgcagcccaccaggctcctccatccatgggattttccaggcaagagtactggagtggggtgccattgccttctccgccattagtcattagggaagtgcaaattaaaatcacagtgaaataccactacattttcattagaaaaactaaaattcaaaatactgtaccaatactgttggtgaagatgtggaggaactggaattttcatacactgctgtgggaacataatacaatcactttggaaaacagcttcgcggcttctttaaaaattaaacaggtaccctgtatatgatttagccattccattcctagatatttatccaagagaaaagaaagcatatatccatacagatacttttacatgattgttcatagcagctttatttgtaataatcaaatttggaaacgatgcaaataaatatccatcaataggtaaatggataaacaaattgtaatagacagtaaagaatcgcctgcaatgtgggagacctgggttcgatctctgggttgggcagatcccctggaggagggcattgaatggaagaagctagaaataaagaatgtgtactttacttttactagactagaaaatgcaaactaatctgtagaggcagacgacagatcagtggttgatggtgaagcagtagatgggtgtaacgagaaggagaagggtggaagggaggagatacaaaagggcacaaggaaacttttgagggtgatggataatagtcattatctaggttgtggtgatggtttcatgaagattacatttgtcaaacttatcaaatcgtacactttaaatatatgctgtatgtcaattgtatctcaaaaaggcctttaaaaatatggtttatatccatacattggaaaataatgtagcagttaataaaaataagaaagatccatgtgtattgatatcaagagttggctatgatatgtcattaaacaggaacaaattgcagaaaggtatctctagtatggcctcatttttattaagaaatttctatatgtctactatatgtatattcatatctttgtttttaaatactcagagaaatgtctgaaaaggtccccatcatactgataatggtgtttatctcagggatgggcatggggataagagataaggtagagataaaactttataagcattagtattatttgcattttgattttttaaaaagaatgcccccatatacctattcccatcttactgtctatcttatagtctttgttttttaataatctgttacagctcctcatcgttaacaattctgagttacaccaaatcttcatcttcaaatccccagttcacaggctaatagatataggttgttagtaaatgtttaatgagaggagtgaatttttttttccagcaactgtggactctattacattttatgcagaaatgagaaggcattggttcttttgtgtatcttttgtaaatcataccttcctaagtgagaaactgaactattaataaaaacaatcaatttaaatgtttattacagccaaaaagataagtggaaatccaggagtcagaattataaattagtgtcaatagtagaaaagatttaattgaagttaattcagttattggctgatatat

SEQ ID NO: 27176 - DNA, 2018 bp, Bovine  19866880102912
  misc_feature (1)..(1): n is a, c, g, or t
ncatataagttaaataagccttgacatactcccttttcctatttggaaccagtctgttgttccatgtccagttctaactgttgcttcctgacctgcatataggtttctcaagaggcaggtcaggtagacatggtattcccatctctttcagaattttccacagtttattgtgatccacacagtcaaaggctttggcatagtcaataagtctatgactatttgacttatttgacaagtctgccttgtctagggttttcacaaatatgagctcagtacatagccatttacgtctggcttctttcactcagcatgatgttttcaagtttcattcatgccattacgtatatgagtagttcattcctcttggttgatgaatagtattctacagtatgaatatattacaattttatccattcatcagttaatggaaatttttgttatttccaggatcgatttttttttcttttttacagttacattcagctgtatcaaattgtggatttcttttcatttatcctatttgcaactaaccagaattcttgaatctgtgaattggtgattttcactagttatggaaaactgtattttcatctgaaattgcctctactctactctctctccccttctcatctaaaatttcatgagatgtttgttagacctactcctcctatcctccacgtttctaaatctttcttattatttttttgtctctccatattgcatcctgaatagttccttcaggaactatttgtgtaccttctagtacacaaattttctctttttgacccgttcctaatatttctaggtccctggctggaaaagagtacatcatattcttattgatccattgattgcaacagtaatcattttatttgcaggctcaaatagacattccatgtgtacaggaagaaatttaagaggaaatatagcaatcagaggttttactgttaattttcataactgcaataatccagctaatcaagtttacaaccatgatcgctggtgaaaactgagtaaagatttacaaatctttatataattaaagacaatttctcacattttttgacagtgaggttacactacattttcaaaatttagattttgtattacagattttgcttaaacctctataaggtattttttaacaccgggtataaatattttagaaatgttcaccaaatgtgcagtgtaatacctaagttcaccactttttaaaattaggccaatgtggaatcaaatatcttaagatagaacacatacaacattgtgagaactgaccaaccaaggagactacattaaacagaacagctggaagcttgtctctggaatcttgaaggcaggcctcaaagagggaacgctaaagactaggaaacactacacgtcccagcatgctttgcgactaccgttgactactacccccagagtgcattgctcgccgaatgccgatttccctcacagctggggcttgtagttctctttggagccaatccggcgagggtggcgttttcttagccagccccaggctgttaggcttagtcttccagtctctgcaaaggggagacgcttcgggtccctgcgtggagtctttgtctcatctcttggctactgctttacccaggtaagtggtagaggggctactcctccccgcagctggggccttgccttgctttctgggagcgccttggctggggcgaagccgtttgtctctaagctctcgccgtagcagccgccgcccatccctctttgtgtgctgggggaagccgcggaactagtggtggcggctgttgctgttgcgggcgaaggagagggacgttaccgggaagttgctggcaggcggactcttccccatcccgccaccgaacaggtgggtggacggcccttccgtctccttctgtctgctgtgtctcggccctaagggcggcttggcctgctgacagtgccgcccagcccagcccggccctgggaaggagaggcggggtgagtcaggaaggccggggcctcgacgaacccactcactt

SEQ ID NO: 27177 - DNA, 1094 bp, Bovine  19866880414619
  misc_feature (1)..(1): n is a, c, g, or t
ntgctgggcaaggttgaaggcaggaggagaaggggacgacagaggatgagatggttggatggcatcaccaactcgatggacatgagtttgagcaagctccaggagttggtgatggacagggaagcctgatgtgctgcagtccatggggtcgcaaagagtcagacacggctgagtgaactgaactgaattgaattttagctagcttgctgtacactagaaaacaggccctgctagccttataacaaaatccctgacctcctgggcaatcatgccctgtttccatattgcctcttctaatgtactataaaaccagcccttccccagaacaacttgggaagagtgctccactgcttgtgagacaccgtaccccccaatccatgtatgattttcgcttgaaaaaagacatcaatctcattactgaattgttttagtttttttcatttgacaattcctagaccagatgcctgcattcagaggactccttagtgggagcctcagaggagacactttggctctttccctcttcctaacccaccccctcactgtgccatgggcccataaaaaggcattagtctgtttttcaggggtcctgggcggtgagacagtttttcccatcgtgttacatccacttgatccttccctaatgccattccactaggagaatggaacactgggaaggaagctagggcctctttttcctcttgcttgcattgttatggtaagtaaaaggcttgattgctactttccgttggtctttttgtcctaatggatcacctcaataccttgactgcttcacagtgggaagtgggaatggtgttcgtaattcgttaatttgttattttttctttccttttcaggctttaagggttgcccattagaaatgtttctggaattcactgaatagtaatttgactttacatttgtgaaacacattgtagtttttactgttctttgtataaactttgtgacttaggaattgtctccatcttacaaatgagccttaggcaaagtatgtgactttccccaaaatcataattaatggattcactggaccatagtttaaatttgaggcttattcttttctcagttcagca

SEQ ID NO: 27178 - DNA, 1607 bp, Bovine  19866880454833
  misc_feature (1)..(1): n is a, c, g, or t
ntgagtcaatagtagttactcacctaaatgaaagccatctaatgcccttatacccaggatcacagatgttagaattactagggatcttttaaagggcttccctgatggctcagagagtaaagaatccacctatcatgcaggagacttgggttcaaatccctgagctggcaagattcctctggagaagttactggctacccactccagtattctctcctagagaattccatggacagaggagtggtcgcagagtcaaacatgactgtacgactaacacttttacgtagatgccaggagtctagccctttatatggtcgatcagtatgcatatatcttatataaatcgatgattttggaggacacactctggcagttctcgatctttccaatgtcagaagcatgttatgaaagaagctaaatcaagaatcagtgggcaagttattacctgtgcaagttcatatctgcttcatttctagctcatcctggatgtccacatgctacgctgaatttactggtgacttcctcactggattacagtatagtggtgccacctgattctcacagttttcttttccttctagttgaagggggataaatcgtgcatttgtttttcaaggattggtggtagtttagtcactcagtcatgtccaactctgtatgaccccaaggactgtagattgccaggctcttctaaccatgggattctccaggcaagaatactggagtgggttgccatggccttccccaggggatcttcctgacccggggatctaacctgggtctcctgcactgcaggcagattctttactgactgaaccaccagggaagcccaaggattggctgagctgaatcacataaacatgtgctccatttcagctgttttgaaattgggcttaatgccctctgacatttctcttgggacttctaggtttcttttttctgcacacttcttgagacgcggcgctctgctaactttcaggttcctttcctacactcatgtcgttggcttcagttacagcgagcacagattacgacattaaaaaactctctccttggaactgatctgcatttgaaaaaggtggggcttgaagtcacctgaaagtattcttcattctcatccttgtgcatcttatctacctcagtggaaaacatttttttccctttatctttcaaggtgacccgaaagcatacaaaactgggtctccaagaagtataggtgtgtcctcttacgaactacccaaattcactctccttaaaagtaaaattatcaggaccatggaggcattaaaaggattgagctctaactaagtattctaagatttgatgtttctgatgagtggaaaagcaattttgtaacagaaagtatgtgattctatttaaaatatttacatatatttgcctgtaaaagacataggatgactgcacacacgggctgactggagagtgggattgtggtgtgtagacaaggtgaggaaggggatttacgctttttaaaaaaatcacttctgaactgtctgggtttttcactgtgtagttaagttacattcttaaatgttaattaggtgacatcacacacattcaccaagaatccttatcagtcttcactg

SEQ ID NO: 27179 - DNA, 1237 bp, Bovine  19866880467548
  misc_feature (1)..(1): n is a, c, g, or t
ngaagggtttgcttctattatagtattttgtctttgtctcggtcaccttttcctcctttacatgtctaatagtgttttattatatgacagactttgtatataaaagaaggctccagctgataccttccttaggcagatagattgtagaacagatcatctcaatccaatcagtgattgaattgattcagagcttctaactgagagtttctttaatctctgtttcctcagccctgtagctctgttcttcatgtttgaatttagctctttagtgtccaaccccattattagagactaaatcgtgtctccccctgccctgcctgaccaccccccacaaattcttatgctgaagtcctaactctcagtcatcagcatgtgcccgtatttggagagagggtcttcaaagaggttaaaatgagttcatcagtgtgagccctaaggcaacgtgatgggtgttcttataagaagagattaggacacagactcacacacagaaagaaggttgtgtgaagacagggagaccaccatccataagccaaggaaacagacagtatagaaacctaaccctgctgacacttggatcttggacatctagcttccagaatggcgagaaaataaacttttctagactacccagtctgtggtagtctgttatggcagcacttagcaaacttgctgagcttccccaatggttcaacaggagacacaggagacaggggttctttcctgggttgggaagattccctggagaaagaaatggcaccccacttcagtattcttgcctgggaaatcccatggagagcagagccttgtgggctacagtcgaaagggttgcaaagagtcagacacgactgatgactaagcacagcaagctacacacccatgggcagaaacctgagggagagcctcgttgtgaatctgtgaaagcctctagtaggattttatcccctgtaggctttttcccctaagcaccacaagacaatggagatgaaaacctgcctttctgaccagcacccagcctcacatcaccctcaggaaatgtctcaggggcaaaattagccttgcacttgggcttttccagtttctaattggtcacaccagctctgtgtgactgtcaaaaattctgctggcttctttttcttctagtacagtctccctgcctaaatcaagcccaccagaggaaaaaaaaaagacaatcactagttcaccttggatgggttgttactgttgcagaatttta

SEQ ID NO: 27180 - DNA, 947 bp, Bovine  19866880473357
  misc_feature (1)..(1): n is a, c, g, or t
naacaagtagaaataagtgaaaatctgtttctgtttccactcaagataaatcacttagtaaaggtttactaccccggcaaagaaagagcttcaagtacattctgaacctggcccctgggtagtcttattatgcatggtaattgaaagatgtactttagtttcaaataactacaatcaaaatcaaatccctcagatgattatcttgaacatgtaagaataaatagaaacactttatgactacattcctgttgtagactgtaataagtatatacaattacttaatccacaagcacaaagagaacaattaaattcatgagttgtgtttttttgtcatcttttaaaaggataattatggtttgctttgtttttgactagcccatgactttctattccctgatccttgttccccactttgaaaagaaggatttgtgtaattcaaatgtattttcaaataatgaatgctaaaataaagtagtcactttattttaaaatttggtttaatctctggagtcaaatataagttcaaattccagtttctccatttactgcctttagatttgggcagctgcttttaacttcttaattaaaaactttaccaaatacctaataaacaattaaataataatatcacatcttaatgtcaaaaaaattaatattataattaaatcagaaatgagttcttacctttttgttgatctccagaatccctatgagtgaaaaaggtagcacatggaacactgcaagatacagcaaaacaggctgttgaatgcctgcctaaaaggaaagactaaaatcacagaccgctctcaagaatatattaacaccactattttcccagtggttaccagtgggtaaagagaacaggcaagggataatacaagaattagggcattaagaagcacaaactactatgtataaaacaagctacaaggatacactgtacaaca

SEQ ID NO: 27181 - DNA, 784 bp, Bovine  19866880566502
  misc_feature (1)..(1): n is a, c, g, or t
ncaaaagggaatgaaggttgcagatgaaattaaggttgctaatcagctgatcttaaaagaagattatgatgatgtgatttgagtgggcccaatgaattcacatgactccttaaatgtggatgagggaggcagaaagttaggtgaatgcactcacctaactgtaggccaccggaaacctcctgttaaagatagaataatagtgctagtcccctaaattagtttgtttgttgactcaggggtttcatttactctcattaactagtttggtttcagaggtctggaaatcaattacacttgtgtgtaaaacttataacatagagcagaactgagcattgattcctcctactaagtatgattagccctttacatgaaggcaagatgctttcaaagttgatttggttaaatcctaaaacaattgcacctcaagaccagtaccaaaagaatgttccaatgctcacttatgcattcctctcatgtgccgcagatatatcttgctgtatttttgcttttcttcacaataagcatttccagttgtcttgcctaagggttttcacgggtagatactcttttctctgaaaatctgaactgttgttagtgattagaattccaaagcaaacatgccaagaaatgactacaagcgcctgattatcccataagaatattcttccgttgttcattatttttcacatttgtacttagcagcaataaaagcttctttccttccctctgtggggaagttgtgacaatgttttcatttgaggctccaatcaccagggctaagtag

SEQ ID NO: 27182 - DNA, 1147 bp, Bovine  19866880610810
  misc_feature (1)..(1): n is a, c, g, or t
nactttgaaaatgtactttctgattataaaagtaatacaaagaaggctgtataaacagaggctaagaacgtggggtgtcaaatcaggctccttaggttcgaatcctgatgttgctacttactagttagcaaccatcttggctgccacacagttcttaataataagcccttcataactacagttggctcttgaaccacacagatttgaactgcacaagtccacttatacatgaattttttttttttatagtaggtaccacagagctacacagtccgcagataatatttattcacagatgttctcctgcgaggaggatcagcacccttgaaaccaggttgtccaatggtcaactgtattcatagtggaagtattaagctactataaaaatatataaagaagagggaattccctggcagttcagtggtgaggactcagtgttttcacctgagtggcctggaatcaattcctggttggggaactaagatcccacaagctgtgtggcatggccaaaaaccaaaaaagtataaagaagaaagtaaaaagtcaatccagtccaccgtttagttagaattggcatttctaaagtgttttccccccctaaggagggctgctagtaatagaaccatgatttctaaaaattccttctacatccaagagaaagcttattaattactgaaatatttatttaggagaattaacttttgaggtccatttgtctttcacatttggattctatttattacacttgtttatccttctgctcagccttgtgatgattctgaatttggggcatcacatactctgtctctgtcatcagtaagattatgattttcctataagaccaagtagaaataggtcatggatgaaaagaacaccctcgccgcactccccgccaactggctggtgcatgcagctgaaaaccagcccctctaagaattgatgttacaaaaggcagctcctctctgttgtcttctgtcatttctccccgactttatgctctgtgaatagcagctgttcagggcattgccaggcgagcgcaggggtgctgcaatcagaaatgcgagtgagggacacagcaggagaaggctagggcggagggaggtggatctgctatacagcgagttaaggggagacacgacagagagca

SEQ ID NO: 27183 - DNA, 1021 bp, Bovine  19866880611381
  misc_feature (1)..(1): n is a, c, g, or t
naacccgctgcccagcctcccatccgcccccggcaaactcaactgcgcgggcggatgcagaggccccacaactctccaaggcccccctgccgggagttcccctggaggggaccggtttggcagtgattgccacattacaagatattacattccaccccggggcctgggccctatcggggcgggggagaagctgtgtttctcgaaaagaaaggagcaggcaggcaggtctcggaggagcagccactccgcctgcacgtgagaacgcaggcagaatctctcaatagacctttctttccccggccgcctcgactcctctccgtcctccgggtcgggccagaccgccaacactgcagcatcttagccgtgggcgggctgcgcagagctccctggagtctccggaggccttttttttggagggggggtggggggtggggaatcctccaggagtcctggtgccactgtctgcgtcccgggtcgggttccgccaagcgctgagagcttgagggcggaagcagggggattgaaggctgggcgcggagcccgagaaggtggagaaaggcttcctgtggcgggccagggctgcgggccaaagggttagaactcccgggaaggagaaaaggcgaaggagagggcgggattgaagtcggagcgcgccagggtgatcgcagcgggccgactggggcccgcactgaacaaacatggcgggctttgcctacccgcgctcctatcctccttttgtcgtccaggaggctcagataccctagatatgaaatcgtcgctcacggaacaatggcgatttctggccccggaacccgacggagtccgggctactccgagcggcgtccgggttcccgggtggcctctctcccgcagggagccgccgcaacccccgccccagccccgccccgtctcctggcagcactgcccttggcttcttaaagtcgcaggctgtctcagtgccccagaggagcgccgcccgaacgggaatgagtgttggggtggggtggggggtctatctctc

SEQ ID NO: 27184 - DNA, 1369 bp, Bovine  19866880644579
  misc_feature (1)..(1): n is a, c, g, or t
ntagaaagtatgatatattaatttttagctaagaaatatccacagggagtaatcagagtcggcactgtacaggtgtttttccaattataaatgacatcagaacaccgaatattaacaaagtgattttcacctgcttattaaacatccagagatacatacacactgaatcatgttgttctagctgacatatgaaaggttatatgttattcaagaaagaaacatccaccttcaaggtgccatcatggaaattccttcctattctttttctttttttccttttaaattttatttaaatattaattattattaatagttaagtcctacacaataaaaatatgaaattgatcatggctgaccccaccactcagcttaagaagggaagtgaagtcgttcagtcgtgtccaactctttgagaccccatggactatagcccactaggctcctctgtccgtgggaattctccaggcaagaagactggagtggattgccatttccttttccaggggatcttcccaacccagggatcaaacctgggtctcccacattgcaggcagactctttaccctctgagccacctgggctacagcttaagaaacacaatgtaatcaacatgggggaacctctatgaaccaccactgcgtgctcttccttcccaccacttcacactctccactcccatgaacccctgaatttggtgtctgtccttcccatttgtctctttatgctttgtatacagagatatatagtgttttctatacatgtatatgtacatatatagtgtgttttcacgttttaaaaactgtgtttaaatggcttttttttctgtaacttgaatcttttttccttcaatgttatgatttgtgagattcagccattgcattaccttcctagggctactgtaacaagttggcataaattggtgtcttaaaacaatagaaattcattctctcacagttctgggagctagaagctgtaatcaagatatcctcagggctttccctccctcgggacacgaaggaagcatctgttcgttccctgcctcctccagcttctaacagcttcagacgctcctcggttcgtggctccaccactgcagtctgtctccaccttcacatggccttctgtcctatgtctgtgtcattggatttaggaccaatcctataatcccggatgatcttctcccaagatcattacctacatgtgcaaagcctccagatattatgtggtggaggcagggtttccaacccacacattttgactaactcctgatagttggattacatgtctctaaactcaggtgactgggacttcggttatttaaataaaaggcattttgtgggcatggttctaaagctcagcccgaataggt

SEQ ID NO: 27185 - DNA, 1968 bp, Bovine  19866880663652
  misc_feature (1)..(1): n is a, c, g, or t
natattcccagttcctagcatacttcctgccacataatagacctccaataaatacatgtgaaaataagtccaaagtgaaaacagagaaaaagtcagatcatttttgcatgaacagtgttgctatatttaggaggataagtgtccatttcatccctgaattatgtggtcttaaggccagggacttgtcttccatctttgtatccttccctgtgtgtgtgcgtgctcagtcgcttcagttgtgttcactctttgcaaccctgtggactgcattctgccaggctcctctgtccatgagatctccaggcaagaatactggagtgggtttccatgccctcctccaggggatcttcctgacccagggctcaaacccgggtctcctgcattgcaggcagattctttacctctgagccaccagggaaaccccaatccttccctaccccgtgcccaacacaatacctggtgcagaacagaatgttaatccgtgtttgttgaacaaagaatgaataaatatcattaaatatctagttgatgtggatgaggatttatataaataatatttccttaaatattttctggaacaaggcataaataacttaggtaaataaagtataaatagtattagaagaatatctgtggagaagaagagactacactgatgttaagtcctactctgggaacctatcccttaaaatgggtgtgtctacttctgtcttatttcccttgagaagaactggagccaaactttggaaatggctttgcacatgaaatgggagtataagagtgtgaacatggtggctgtgggatttttgttaatgtagtcatttctttccaaacacttgaaaaatatttttcttttatatttttcattcttttgccattgcctctgtgctttctcctcatttcacatttaaatgctagaaatcgtccagttaatgtggacatgcataataagtgggtccagatcttattctaaatggaagccagagccagtgtccaggcactaggaaagcataattaccccgagaacagagttgtgttttctgcaagggcttttatcagtgcctgtgaaggcccagatatatgtttcagcatcagacaagaaaaaagatttgtgaaacacatatctcctctttcctggggaaaaaaatcttttcttttgcaaaaagactttgtgtgtgagtacattccagtcctttaagggaaagaaagaaaattatatcagaaatctatgcatgctaaaataatattcactcaaaatggggaatgagggattctttccatatgttcttatcctatttcaatttaaattaattttgcaggagtcattaaccagctccacaaaatttgctgggtttgctcctaacacaagcttcggcacacctgcatccagtgcatgtctttttggttaatctataggaaccaaaattaatttcagtgaaacggccaaatggccctcaggatcctttactcatatgtctggctagcattccccaggggcacaaaacacagcctgacaagggtgatagaaatgtttcaaaggaactttcctaagctctctcagtaccatcttttttttttttttttttaatttgcaggtgcaaaaattccatttgtaattctttaattccaagggcaatgcgtgtcttggggtctcagaattcaggacatgtggccagctgggacatgatattatgcttgcaagtcatggcaggtgcagaaggggggtgagcagttgaagtttggcccactccctttttctctctttttgtgcttccttttgctcttccagacgagtgtacaattacacgagctgaattggttatctcccaaagctgtgctgttgtacatccaggaaaaggacttgattactcaaccagtgtttccaggagccttatttgggttctttgtgcagcagaagcaaaagtgctgagtgcaccctcttttgttttgcgatttgcctgctgggtg

SEQ ID NO: 27186 - DNA, 947 bp, Bovine  19866880745571
  misc_feature (1)..(1): n is a, c, g, or t
ntaggaacattctataaaatgcctgacagtcctcctcagaaacccttaaaaatgaggaaaatctgagaaactgtcagagccaagaagagcctaaggagacataagaactgaatataatgtggcatcctggatgggatcctggaacagaagaaggacatgagaaaaactgaggaaagcagaataaactgtggcctttgtttataataatatgtgaatattgatttattaattataacaaatgtaagatgctaacaataggggaaattgagtgttgggtatatgggaactctgtactattgaagtaggaccctatagtccttgcacccaccccatgtcagaccaccgatgaccaatttcaagatacaaagctaactgtgctatttctgcatgtagccccctccttctgtatataaagctcttgccccactggttgtcagtaaatggggagtcaacctttgcacagacgtcagccctcccccacttagttgccacatctgaaataaagcaagctttcctttccaccaaccagacctatttattggcttttgggtggcgagcagctggaccccaacaccttttggtaacactatcttcacaataattctatgaatccaaaacttttaaaataaaagctttattaaaaagaaaaaaaaaaaagattttcccttttcctagacttattccctagccttccacagacaaccagaggcagcggttgctttctgcattgcactcattctgcagtttattatctgcggtggggtgatggaggatataaagtatcacgccacacatctgtaaactaatttagagaaaaaatggaattaaatagagaaaaactggaattaaagcagtacatacacaaaaaaacaacttcccaaagcattttgttatttgtctgtgtgaatagaacataatctgtgagaaactccaagatggaatccgac

SEQ ID NO: 27187 - DNA, 2088 bp, Bovine  19866880772743
  misc_feature (1)..(1): n is a, c, g, or t
ncttttactgagatcagatagcatcttttactgagaacaagataactttgttttaggaaatgctgggcaggagaaacaaaaatgacccactggtttctctggcctttgagtgaccagtttaagattccgagttgactaactcaaatcagcctgcctatgggaacccttgctcttaacacctaggctatcctagctctgttattccctttgttctactcattccaccagtgctaaacagagttgtgtaagaaaggaagaaaagaaccagtactgaagaattcccagtgcaacacagagggaagttcccaccaatctgcaccacaaaaccaataactcagatataagacagaacctgtgatactaaatttatgcacggtgtagggaaagagctctaccgaactctttaaatcccaatatagaacatttccaaagagaagtaaaatttgttgcaaaaccaagaggaaaaaaaagatgccgtaagagtcattttgcgtctatttcattatctccttaagacaatgctttccagtcacaatgagtgaacaggtcaagggggtggggggaatacaacaccaaagagtgtataaaacacgatctaaagaacttggttctaagctggggggatcacggtatcttttggtacatcttggaagctccttcaaaaatctgtctatgtgtgtttttttggaaagaaggttcatagctatcatcaagaggcccagattattgggggaaaaaaaccactaagaactactaacttgggcttcctaggtagcggtagtgataaagaacccacctgcaggagacctaagagacgcaggttcaatccctgggtgggaagatcccctgtagggagacatggcaacccactccagtattcttgcctggagaatcccagggacagaggagactggcaagctacagtccatagagacacaaagagttggacatgactgaggtgacttagcacgcgcacacacactgctaacttttagtaaaaataatattttctataatccagcagtattttctaaaacccaatttcccctccctcctgaaacagtgacctctccctcagtggcaactcagaggagctgggggcaccaggaactcagtgacaccaggtttggcagccacctcaccagcccttcctatcattcctgtgccccagcttagtctcctcggcaatggaagcccatagcaccctaagtaagccaaactggggacattcaaaagtgctaaacaggatatagcatggagaggaaacaccccagtccccaagagaacacagctcaaggtcgcctgcagaatggctcagggaacctggatgactggaatcagtcaaggaagcagaagaggtttccaaaggttagggaggaagagcatattacatgggctgggcttgcaggtgtaacaagcacagatcagaggcaggagcagattaaagcaacagagaggctaggaaggaacagatggtctggtccagggccagggaggaaatgaaaggcaagatgaagcccttatcattaagcatcactgagagatgaagcttgaacttttgtatggaagctgtcagagactgggcagatttcaatggggaaatagactacgtgactatgttctacagaggaaaagattgagaagcggggtctaaatgaatagaagacagaagaaagatatgactgcagagaagagaaataggccagcacatggggtgtcaggtattaattttgaaggcacatggtagatgaatggacaagtcaacaagaggcatacaggaccagatgcaggtgtggataaatggggtgccttaggccaaaggaaatggaggggtcctccctttcctttccctacgacagacttctgcgggtgacaagcctcccaccacatgcctgtaccctgactgcaaggaggtctgccctcagctctaggaactggctattaatgtagaattattgtaaatacttgtgatggtctcaacgtccatctctgcctatacctcattggagcaacctttttcccaactgagtagcaaagactaaagaaaaatataaataacagcacaagaaagtcagaaaataaccaata

SEQ ID NO: 27188 - DNA, 1816 bp, Bovine  19866880783184
  misc_feature (1)..(1): n is a, c, g, or t
ntgggtgtgagtgcgtgcatagtgacaccttcaagggtggtcgtgcagagcaaacacagcatgagattcccattttgaagctgcagcgtgactgacgtcatagtgtgatcaaagtgctctgcaaatacttactgtaattattctgttcttgctaatacccttatttatactttgaaattataatcatccaaagaaagattaaaacaagatgtatgtgttgcctgagctccttgccttacagatggtcacactcagagttccctgaaattgctggggttaattgaagcttcagttttcactcaggtgtagttgatacttaaatgtttcttacctgtcagctttcactatttaaaacagtacaacaatagcgctttaatttgctttcattaatggtagcctctcaggtaatgttagtgcaggtttgtctggatgatgtttgttcctctgaatgaaacctttggaccagcttcccagctgagaagaaaagctaaatagttacagaggtaaaagcatgaatgtctcactaatttattcatttaaaggatgctcagaacccaggacacatccaggggaagttaacttttaaacaaagggcaagcatttagtgtatgattaacggcagtttctttccttgagatttcagtgagctgagacctcagggaatcattcttagggaggcagctcagagtcagccaagtgctccagggataatcattacagagtcacacaaacagcagtactttttgctctagttctttggtgctcttccagtagtattgagatgtgagaaagccgtattaggctcaagcctaatagcaagggaaataagcccttctttgcttctactcctcagctgtgtaaaagtagagggccagtgaaaagagctgggtgttacaatcttacgttatttaggtgatataagcgttctttgcctgtgtattgagatttgagtactgaaaagacaatgactttgctttcctacatcagaggactggtgtttgccagtggcattgcttgctatttgattaaggcccaagagaaaaagcaccccactccagtactcttgcctggaaaatcccatggatggaggagcctggtaggctgcagtccatggggttgcgaagagttggacacgactgagtgacttcactttcacttttcactttcatgcattggagaaggaaatggcaacccactgcagtgttcttgcctggagaatcccagggacggcggagcctggtgggctgccgtctatggggtcgcacagagtcagacatgactgaagcgacttagcagtagtagtagcaagagaaaaaacagaagtgagaaagatggagggaagatagtctgggcttccttatgtcaagtataagttagcaaccccaataaagactggggaataagtactgtgatgcttcttgcatgtgtagtacataaaactaggacgcatattgtatgtatatgcataataaagattaaaaataaataaaaggtaagtgtaggttctctcattcatctacttgggttcaagttgaagccttgttagtttttgatggggtaactttaagcattttgatggggtaactttaagcatgttgctttatttcattctgtgtgaggttttcctctgcaatacaaatataaaaatagaactcctttgatagggaaatagagattaagtaagataatactaaatgcttagaacagggcctcaagcatggtgaatgcttaacttttttatatttatatttaaataaaagataaatggggattgctggtttacttcctcaaatatttgttcaaattgcaaattatg

SEQ ID NO: 27189 - DNA, 1129 bp, Bovine  19866880805076
  misc_feature (1)..(1): n is a, c, g, or t
ncttagaaccttctgtacaaatacaaccttctgtttttcctttcagtacagccttcaatatattacacaatatactcaacaatttattaaaaaatatgtgtggtattagatgatattgcccaattgtaggctaatgtaaatgtgctgagcatgtttaaggtaggacaggctaaattctgtttggtaggttagatatattaattggatttttgacttacaatattttcaacttatttgtacataaccccgttgtaagtcaaggaagatctgtactagcagtcatcaattctataccaccagtcaggggatgataaagaatgtactagtttttgttttaaaaaattcaattcactggagaatgtgttgggaagcatgcaaaaagctgcacactgaagacagatgactgacttgtagaaaagcacttgtacgattgtttgcattgtgaagtgaattaggtgcttttttcatggaatgctatttttacttgaaaaagcaaccgtagacaaactacagctattcagacttgagtatttggcatcttaaaagtaaatgaaatgagctttaaggacagtatttgctgtcaaagataaattttgtgctttcaaacaaaaatttgaatcttggataaactgtgtccaccgccatgagtttgatagctttcaatacttaaaaagatatttcctgatgggaataatagtgtattaataaatgtgatttctgattattagtgaaatgtgtcatatggatctacataaaacagggaaccaaactttccaaattatccatgtgtgatattataaaatgatacctaggtttaaaaaaagattcattcaaagtatatggtgctaaaagaaaaggggggaatgagagagtcatttcctaggcagggactcctagggagtctaggggtccccaaagagagaggggtctggaattctcaaggaggaaaaaaaggacaaactttttttctttctccacattccttaggattatataccaataatgtatcctgcctaaggacagtctttggattcaaccttctgttattttaaaaagttaattatgggagtatacctggtctttacaaggatgtatcttgcctgaggacagtgttatcttaaaatgtaaa

SEQ ID NO: 27190 - DNA, 880 bp, Bovine  19866880848375
  misc_feature (1)..(1): n is a, c, g, or t
nttcattagtataatttctgaaaaatggaattgctggctcaaagtgcttgtacaatgttaagatttaaaatgcatattacaaaaacttgaggtgcatttaaatatttttatttctctacttagagaaaattgtattggtctattattaaatcatcataccaaaattgtcccttcctttttctctacttaaggttacattatgatgacaataagtttagtactctgaaattgtactaggtcttatatttactcaaacttaaaattcattcatttatcagctgtttgttttctagaatttcttcaatacttaaaatttcaatgactgggtttgcaacccaatcttttggtctactaatataggcaaatctctctggtagttctattcagtttttgattaaattgatcatattgcaaacaaccataatctgtcactatttaagttaagtgaatttaaattagaatatgctaggcctttttgatgtgcaaatttacatgtaaattttcaatttacatgtgcaaagccatgtccacatagcagttaaatgctcagtcttttgatattagcacagcatgaaaagcaagtttttatattttggtagcacacatttactttaaaaatatgcatatatatgtatacatgcattctagagggatgctttattgcttgcagatatggaataaattatttaactaccaagccaaatatttataaatgtgttttgctgctgcttctactctgtataaaaaaccactagttagacactcccttttctgctatctcagccttaggaaacaaaagtataatttagcattatgcttgatgattaactctgttcaaaggcacagaaaatgctgatggttagacaagagacagagtatt

SEQ ID NO: 27191 - DNA, 1369 bp, Bovine  19866880898747
  misc_feature (1)..(1): n is a, c, g, or t
naaaaatgatttccttctctcatctttcttccttcttcctttttcataaaaggaatggaatggactacctgcttaaatgtcagtctcacagcaacaaagagcctgaccacatttcaaagcctctgaaagacgtctagaggacaagttgggggcagcagagaaacccttgccttctctaaccttttattcctcctagccaggattccaagtcacgtctgtccgatgctcttaacggcagattatgaaaaattaggtctttcaaatgagaacaagaaagaaaaaaatgtcatcatgtatattcatttgatttgggaataaacgggtgccctataatttagaagagacagggatgactcattacatctatgaaggttattaaggaaatgaataaatcggtcataccactacaactgtgcttgtcatcacagtaacattgccaatttccctttacagttggtaattgctattctataccttcttatatggaatataagacctattctggtgtaacaataaatattagaatagtcttcaaatccattattagttgaggctataaaaagctgtagctagagcaggtgcaagctacctcagaaccatggaaagagtcattcaaaattatagcactgaaaatactctgaactgtccaatgcaataaaagtatatataaaatttaatagtcatcaatgtaaaaagctataatacttgaaaattaagactattttgataatgttaaattgataccccaaactagaaaagtggtacaaagcctaactcacacttatatttcttcagtttaataagcatataaatgtttaacaaagagaataagagtgatatacattatagcagctttatttgaatctatttaggaagtaagatcttaagcttctctgtagttttccttattagctgattgattttcaatcaatttcagctaacactttgcttaactatgtctggttgctttgatccttaagcttggagttttctttctactgtggttttaactattctatagattttattacctctattgtcaaaaagtatgcctacattcaagcctgtttatcttatatttcttcttcaagcaagaaggtcaggaagaaggaaagggtaaaaagctaaaaagtacacttcctttcagctccagtctgtaattgaaaggctccatgacattcagaaatttaaaagcatagtctttggggatggaaatatataaaaggcactatccagagcggtctagagaatagactttggcctcaagccgccctgggtttcaagtctggtttcttcccttaatacctgcattactttggacaagctccctaatctctctaagcctcagctttctcatttgcaaaataag

SEQ ID NO: 27192 - DNA, 1776 bp, Bovine  19866880933473
  misc_feature (1)..(1): n is a, c, g, or t
nctcagacagtgaagaatctgcctgcaatgtgaaagactcaggttcgatccctgggtcgggaagatctcttggagaagagaatagttaatcactccagtattcttgcctagaaaatcccgtggacagaggagcctgatgggctacagtccatgggttgcaaacagtcagacatgactgagcaactaacactacttttccaggaataggtgaagtccaattcccctccacttatacatggcccagactcagtgactcatgtctaaagaatggaatgtggcagaaataatactaagtgacttcggagttttcctctgcctccctctcttggaatgcttgttcttggatatcttcaccatttagtgacaaagccaagctgttgcagggaaagttcacacgcaggtcacacgttgtcaagtgtaggtattccagcaacggttaacaatgagctcccagcagacagccagtgttagccactagacagatcagtgagtgagttttcgggtgatctagccactaattcttgaggtggcccagctgacactgagttcagcagagagaaactatcctctaagttcttccgaaattgtagattaatatcattgctgtttcaagtcatgaaagttttgggtggtttgtattgtagcaacagataactagaacaggttttggtatcatgacaaaaaaaaagtgaaaatatatggcaacgacttcgagactgggcaggaatttgggagggtcttcaagagaccattcgagggaacctcatggttcttgaagatgttattggttagggctgacaggaaagtgaggaaatgttacttgggggaaatgtatagtgactgaaagtttggcgacacttacggtaacatggaagatagaaaatacaccaaattacccgaatgacctaaggagattttcaggaagagaattgaagaattgaagaattgctgcctggttgttcttactacaataaaatgcaagaggagagagaaactaaagaaagaactgttaaatatctagcaaacaggaattgctaggttaacagtttcttcttcctcacctctccttttagcaaaagtggcttcctgtgaagatcaaatttggagcagggtcatgaaacacagcccggagataagccaggggtgtgactatggagctctttgttaagacttcaggcagtttttttttttttttttttgagatttgtgagttaagttttatttggggcaaaatgaggactgcagcctggaaggcagcacctcagatagctctgagagactgctccaaaaaggcggtcaggtaaagacctcaggtagttttaaggtgttgcttcctacatactttcaagtgtacgaaagacctgcagaccataaggatgttctcagacagcagtttgggatacactaaggtagagacaggtgaaatgagattcgtgggtatgacttttgctaaatggagttggttataaattgattggtaagaagcctacatttaaaaaaaaaattataatcagcttaggccaaaagagacattcaggccttcgaatcctcaaagggcaagaagcagtctacgaggagacttccctagtaaaaaatctgcctgccaaggcaggggacacaggtcggatccctggtctgggaagatcccacatgccaccagacagctaagcctgtgcaccacaacttctgggcccactttctagagccggttctccacatcaagagaagctccagcaatgagaagcctgtgcaccgcaacaaagagtagcctccgct

SEQ ID NO: 27193 - DNA, 628 bp, Bovine  19866881111225
  misc_feature (1)..(1): n is a, c, g, or t
ntggcgctggcgccggcgccggaggggccgggcgggtggaggctggagccacccggcgctgagtgactcaccgcgccgagagctggcgaacctcgacccgggactcgcatgcgggcagagcgggaaccctcgcggcggccctgcgctgagtgcgcctgtcctcgcctcgccgcacctcaccgcaactcgcagcctgtcactcttgaccgacccagttcccccctgggcagcagctcgagcttccaggttgtgacaccagggaaaaagtgcacacatccaatgaaaacaataatttatttaaataatctcttcatattgtaaaatcaacattaagagcatgttgttttcataataaataaccccaaaatacctttcatttcaagaacaaagactttaggataagataaatccaaatcagtagcttaaactgagaaaatctttcaagggaaaaagaaaacggaggggtgctgaggtcactgctaaaccgcagttttcacaagtgggggtttacaaaaaaatgtctgaaaagatgagtatgtttatacaaataaatcagtgggaaaatctgcacagacacgtttatttacaaacgctatgtccaagtccaggctaatactcctgaataggt

SEQ ID NO: 27194 - DNA, 1281 bp, Bovine  19866881358262
  misc_feature (1)..(1): n is a, c, g, or t
ntgaagttcagtttgtattatcaaactggtatttatagggtttttaaaatacaagacattcctctactgaaatcagtctttgagaatctttcactatagtgtcttatagattacaacaataacactctttgtgtgtccaactctttgtgaccccatggtctgtagcctaccaggctcctctgttcatgggattttccaggcaatagtactggagtggattgccatttccttctccaggggatcttcccaacccagggatcgaacctgggtctcccgcattgtagacagatgctttaccgtctgagccaccagggaagactctaaaatacaagacattcctctactgaaatgaatctttgactgagaatctttcactatagtgtcttatagattacaacaataacacaggaaaactatgtaaataatgaaccagaaagaaaaccttgattattattacatttttgataatatagttttttgtttatgttaagagtgataaaaacagtaagttctgagtcctataaagttattgcagccttatttctggtttgaaaaatactctgttaggaaactaaactccatgatattaccttgaagagtggaattgagcagatttttaaaaaatcttgttttaaactgaaaccctatttctgaggcatttggaagaagcctcagttgcagtggtggtcatatagttttggggctggggatgaaggttataggagggctagtccttgtctaacagacatgagacctgttcccttatgattctttagaagactgtgatgcactatgaggctaggagacgtggggagggtgaagggagacgggggctggaggggaagaagacaggagatgagagaggaggggagagagagagagagagagaagctacattggcataccatggaaaaggctgcgtctattttgctgctaccacattgatgagtagctagatgtgctagcaaaacatcaaggtatctgagtgtggttcactgtgggaagtttcagtagcaaaactttcttctgtttgagctccatggaatgatgattctgcctcggaaacaaattagaatgttcagttttactctgtgtaataatcaggaacttcataggtattataagatctaatttaaaggttgctaagaaatttacaaaataggattttagttaaaagtttttataatagtgctatagtcaggtaagtaaattgaaaaaggaaactaattgcttttatatctacattttatgttaatactttgcctggggtaagtaaagctt

SEQ ID NO: 27195 - DNA, 997 bp, Bovine  19866881368782
  misc_feature (1)..(1): n is a, c, g, or t
ncgtgctttgtctggtattcctgacaggtattcattgcttaataacatattgttcctttggaaactgaaacgtgaaactaagatctgtaatgtatgttgaaagacactatagtttaattgaaacctgcctgcaaacttttgaaaccgattatggtaaagacacaattttgaagtattttgtttctaaatggacataataccaccatttaatgtttgttaaagcaatatgtaatctgaaaaagtggttgtacattaaatatttcttttaccatccactattgttttggctctttgcgaaattaaggtaataataagtatattttgttgagaataagtagatttttaaacagtgatgctgcatgttcatattatgtatttctagtaaaaatgatatgactaatataaattaaagattagatacagttattccactcaatccttctccactctgaattatcgtcactactcattgggcttctgattgtagtcattaggtatttatttttatattccttttattgggatctatcaccattttttttttctgtttatgtttcagtcgacctcttcaggatggagatattatcaacattgatgtcacggtgagtaaatcatataaaaaacagtctttgatcaacttcagaattgctggtagcaacaggaagaagagtggattgaaaacgtgaactgcgccgatggaagtgctgtttacttctagacccagacgcaagcagctggtttccttttttgtctttaacgctgtgtttattccaagtaaacccaggcctgacttgaatttagggctggaatcagatgcactgagatcaatgttggcctaagtgaaatgtcaacccaatcctgctatgtgtcatgtttttgagaaggtgtaattgttattgatccactgtgtggttaatgcagagccctacagcactgggcagctgctgaagctagatatatatgagatgagctaaggcgaagaaagccagcatttttc

SEQ ID NO: 27196 - DNA, 2780 bp, Bovine  19866881422274
  misc_feature (1)..(1): n is a, c, g, or t
ngtcgaggacacgagtgaagcgaaaagattgagcgagagttgggccccagaagatgcaacggccaggctgctcctgcaaagatggagatgagcagttcccagaaaccaaaacccctctcccgaggtctgtgacgaattccccaaagacctgaaattgcaggaccctagaggtaatactttggaaacaaaaacacgaaagaacgcctctcggaccaatggcccggaaatccgtgtccctgggaccctcgacggcagagtgggaacagagggcagtctagcagcagcgtgtgtgaccccgagcgaagtaggtgaatgagaatgtgactgtcctggctgcgcacgaacagccctcgggcgcccaccctctgccggcagggggcatcctctcccccagggcacccctcggagttggctttctgtgtaatggaggacgcccagtggtcccgcagacacgatgcgccgagccaggcgacgccctggactcctgacccaggccagcggtggggcaggaactgaaagctaggcgcagcagacctgttcaaagagccgcttgctgtcttccggagatcggcagctgttcaaccgaggcttacagtaaataccctgcggtttacactatggcaacagagaaaggaggtgtacttaactcaaaggaagtcgtttccaccctggagcctcagtgttcctgtgtacaatgggaacgatgattacgtccttgtctgcaagggctgtcacaaggctcccaaggaaggagatggtgagactctgtgaccagatgaagtgccatggggacaccctggtgggcctagaatccaaagcaggaaggtctcagcgatgatgtggaacatacaagaccagagcagagacactgagccccctccttcccccatccgtctctagaaaactgaaagcagaaaacgggaaggagggtgccttgaggtggaggaggaattttggcggcaagaagacatgtctaattaccccaaaactcggtctgagccccgctaaactcctctccaatcattatggagagaggcatgcccctaactctgaactgctgaagagagtatcaattctcgacagtactgcctctctgactttagaccaaagggagaaaattatttggatattgtgatgcagcgatcagataatttaggtaaacccagatttgtgcctggattatcagaattaacatctcaggtctttacttgattctccaaatgcagttttaaattctgcgtcactctccctctctctctttgcttattgcctctggtcttttctcccacacgcacaagtcccttgttttccagttaaaggggaactggggtcatatttccttccaggaagatgccattttccagatctcagctgacctagacttcatgccattaatgcaggttctcacggttaataaaattcaacacacttgccaccatgaaaaagtctggtgggaccgaaggaacagagagagtcaagactatggaaattggatcttttatgtttcattttcaataggaaaacaagtttctgccttaggtcaaaacagctatcactgtgatgacagaaagattcgtcatgtggtgtgaagacaccaaaaagcaggcttcattacctatcaagaggttaagtttgtgactggagcccccaaagcagcaagctgcgccccagtggtgagccccacctcccaaggctttctaaacctgctcacccttctccatctaggggtcttttgtaaccaaaaggacggctgggaattaaatccaggcagatttgaaggccgattaccttcctcactattccgcggagagtgagctctgtggatgctggagttttaattacacacttgctttttctgaggaagaaaaccaaagatatttttcaaagtatcaacttgttttccattaggcagttgttgtaacaagttctttcagcgacctgttatgtctttaggacggggtgcttcagatggcacgcactagcacaattttgtggcttttaattactattttgttcttttggggggtttcagaggctggcgcctcggcgtcattagactgtctactgggtccaccgcaatcacgaacacctccaccaggtggcgccacaaggcaggaactgcggagtccagtaccggcgagtgtccctcaacaccgggccatggtttccaaccacgaggaaacagatacagaagaagtcgctaccagatttaaaagaaaaattgcagcgatagggtcaaataggatcctgagatgaaaataactttaaaacagtcttaagtacatgagataaaacttttctatttgcttctgtaagtttaccaagatttgtaatatcaagacaacactctcaccaaagtattatcccatttcttttttcataaaaatatggaatttagagttagaatgaacttgaaaggccatgtgatcagtctggtctagctttccaacctagagaggaaatcaccgggatcatgttttggtcgtcaattagccatcaaatacacgtaattactcaagagtctccctgtgtcagaaaagtataaagggaaatggtttcaaatatatcattagcaataatatctttgaatttatatagctcttctctcaaggaacaaagaaaatagtttaaatattaccgtattaattgttttaatatccctctgggttggttaggaagcaggtattatggttaatttaaatcagttggctatgtcaagtgtctaggggctgacaaccgtaaatgtcagacccttcgaggaaaagcggagctggaactgg

SEQ ID NO: 27197 - DNA, 1324 bp, Bovine  19866881474150
  misc_feature (1)..(1): n is a, c, g, or t
natgcttctagtaccaagatgctaaaacaaatcttccaaatcgctcagatcacttccttcattctgattctccagaggttttcagtttcatgacattcatgctgtgagacagtctgagtacacaggcatgtttcagagctcaggttcgccctgatagttgctgtaggaatcttttcaggaagcgtacttaaagggagttctctgcttgtacatttaaacttgaggtcctttgggttgagtctgctacattctggggtacacaaggaaataaattataaattttaatagtcctgtttggaacattctaccaaggaggtcaaaataatactttattcaaaaagttgagaaaagtgtgatgggcacaccatatttaagcagagtttataaaggtcttcaatttccagtgtacttcacttttaataacttattttgtggttcacttaaagcttatctaaagctattaagtgggtccaagggcagaatactttttactgatttgaaaggaccatttggttttatatgagctaacacttgggtcagcagttagatctgactgcctttcctggagaaggaaatggcaacccactccagtattcttgcctggacaatcccatggacaaaggagcctggcaggctccagtccatgggttctcaaagagtcagacacgattgagcatatacacacaacacttgggtcggcagttgaagttttaatttgtgcattttaaaagagaatctgctcattttctgggaaataataaattactgtactttattaagatttatatattcaacacatacttattgaatttctgctatgtgctaggctctgtgagctctttgctaaatgctgggatctgaccgtgacctagacagatgtgctcctatcttcataaatcacaagatttaaagaaagaagaactagagtcaaattgttttatatgtatgggcacattcctctccctctaagtgcccttgtccccacattcactttgacaaattctacatttgcattgtttgctacaagacaaatttgtgtatgtggatagttttgtaatggtatatggatggaaagctggtgtcaaaccagagattacatcttggagaatatgtatttcacatgtccctgagttgattatgctgcttaggaactgagaagatttctaataagtaaatacaactcaagttactgcgtttccctcttcattattgaaagaataattgtagacaggtcttcctccctccctcccttcttgcctgcctgccttccctccttccttttcaagtttatcacaacagcatgttccaccatcagccagcctgg

SEQ ID NO: 27198 - DNA, 957 bp, Bovine  19866881560204
  misc_feature (1)..(1): n is a, c, g, or t
ntttttatttagttctttaatattttttaatacctttaatattcaaatcatcagaagtcctgtcaattctgcttttaatataaatatatcctgaatcggttaccttctttccctctccccctgccactctagctcatttaccatcgcttatctgggccagtgccacagccaccatgtccttgtttccattctcgtgcccctgcagtttattctctacactatagccacaatgatctcatcaaaacaaatcagatcatgttactttccttctccagagtgtcccatggcttcccttcaccacagaataaaatccaaaattccttactcctgacaaggcgtactagccttctgatagttttagaataatccaacgttgttattgccctggggaccctgtattggaacatccctctgcctgaactactctaactttagttctgtgtagattggctcatcctcattcaaggctcagttcaaaactccactcttcagaaaggcctttcttgaccattctgggtacagcagggctcccaaccactcactatcaagcacatccccctgttttatcttcttcacagtactttatcactacctgaaaatattttaaaaatctatttactgtctatctccctggacatgtgaggatcttgttccctgatcagttaaaccctatgccaaaatagttcccagcacattgtagatgaaaataattacatgttgaatgaatgacctcttgtggcccttggttcaaatttttttttgtctctgagtaaatgtttaggtttaataatcagagtgctttatatatttattcgttagccctctttaaacaaaatatatgaacaaaaagcattttattaacttctgaactcttatctcttcttcatcttgaaaggtatcgtggcaaggatgggttaagtattctcaaagcatcatatagacacagaatgaaaaaaa

SEQ ID NO: 27199 - DNA, 1673 bp, Bovine  19866881623181
  misc_feature (1)..(1): n is a, c, g, or t
nttacatacttgctattggacaaatataaatgtgacaaaattttttaaatggtgaaaataaaaaatttaaatatttattttaaaaaatgtgttatacatgtaatatagcattaataatgcttgaaagaaaaaccaagcagtccaacaaattgtaccactcttacaaagcaacctttgaagttatacatgccctttcaattgatatacatgttttatgatatacatgatatacaatttgatatacatgtttttatgttaactaattatgatatacatatttttgtatcatcctttttttgattttaagtggtacagatgttttagatgctatattattttcatactttgtgaaatttttaacagttttgtactaatccactgagtgaattatatgaatttcttaatatcaagctttaagggaatttatgttgaatttacacacactgtaccagtgtgccctttgagcaaataattcaagactgtttagcatgttgctgtatcaccctgtttgtaactggacatactctctctttttctataggaaaaatccttcatacagttcattgccaccagaaggtattttcacaaacacccttggccttctgattctggtgtttggggctctcattttttggatagtcaccagaccacaatggaaacgtcctaaagaaccaaattctgtccttcttcagccaaacggaggtgctccagagggagtggaaagttccatggcaatgaactttggcaacgtggacaaatcagattcagagttaaacagtgaagcagcagcaaggaaaagaaacatcacccttgatgaggctggacagagatccaccatgtaaaatggggtagcaatgtagccatataactccagtgtaaaaaactagctctccagtttagcttctcctacttacccgtgagatgattgaggtccacagagtcaatatttattctaatcaaaaaataggatgtcttgaaagtgtttatattgattgaggcttataaacttacccaagttgagagggagatgatcagtgtaaatattaataacagtagatataaattgtgcttatattacctttttctcgttgaggaccaacgcatttagcacagtgccttgcatagaacaaatgatcaaaatgtgtctacagttggtaaatctgataaactggcagtttccctggcctcttatcatgtagtcattttctgtgtattctgggaatccagttataaagttttggaatcagatcatgactatctgggacagagttaatgctccacaggtatcatgactagagcccagaaaaaaatgtaggaaaggaactggctcccttttccctgtacctgccctttgctccctccccggctggtttgtccttagattggccttggagagcaggatttattttagggcactttggagcagtgacaagactgtaggtagctgaaggtctcctctggtcagaccagaagtttttccaagttgacttaatcccaaggcttccttgggtttgatgtactttatgatccagattccaaacctaattatgatgagaatatacctgaatacataagcagtataaactgctctacaaaccttaaagaacactttctcccaagtttctggtgtttttaaacatggaacttactaagtgccagtactatcctaagca

SEQ ID NO: 27200 - DNA, 850 bp, Bovine  19866881648371
  misc_feature (1)..(1): n is a, c, g, or t
ngctactggactggaactgggtttgggggtttctttttttgtgtgtgttttcaagttgtgctttcagcagtaccttccaatcaatgctgacaattccacagttcccagcaatgtataacagcttctgagaccccaaggaagctcaatcaaactcataattatggctgtgagacaaggtaaacacatccaatgtttaatttaattttgtgaactgcaagagtatctgtggtatcaggggaactggatgagtgacttttctgaccatgagagaaaagtttagtttaaacctctgtttcactcatggtaaatccaataatgataaaagaatataatgtggagaaatcagccttgtctatatcttgtccagctgactttttaaacagggatatcaatttttcctggaggataaaaatttcccttcactttcttaggttaccaactcagagttaattgctctatgccaacggcgataaaagaggtgtagtgatctgtttaactacagtcagatgaaacaacttctcaattattcatttattcaattcaatactgctgaggggaagaaagcctatgacacactaaccatacttaaatattcagaattcactctgaatcacactgaatatcacaactaaaaaaagtgaattaaaccacctatgtatctgacatattagtacaaattatgaaaatttattctaagttgcaatgtaacaaaagtcattttaaagctgtttttgtacagcaattacacaaacacctaagctgtcaaagttggaaatttccacatgtcattgataaagttaattgtctaataaaataaaactcttaagttatgaaatttaaagtctgagca

SEQ ID NO: 27201 - DNA, 948 bp, Bovine  19866881698375
  misc_feature (1)..(1): n is a, c, g, or t
ntggaaaacagttgttggctttcaaaaatattactaattgtacttaaaccattccttttcaattagagggaatccttgaatttgtgcattcctgcatccaaagactcggagaaggaaatagcaacccactccagtgttcttgcctggagaatcccagggacgggggagcctggtgggctgccgtctatggggtcgcacagagtcagacacgactgaagcgacttagcagcagcagcagtagcatccaaagactactgcttaaaataaaaatctgaaaaaaattaagtaaaattccatgacttagaaaatcaggtgccatttgagatcctttaattagagatgtgaccatttggaaatcagttctgttgatagaattcatatagaaatagtaataaaactatttccatgtgcatttttattcctttagaagagtgtgtacttaaaaatagtgctcctctgccctcttggggaatgtattcttagtcatgaaatatagtttaaatgtatcaagaattttaatttatctagacaaaacttttgtggaggaaaactatctctcatgaaagggaattcaattaagagaacagtcacaggatgaaattccttgagagagatctctctcttaactctaaaccacacctgaaacatgaactgtaacacaataattttcaagttcataaactcctttatatgtctctctcctcctccccaaatattccatatgaagggcttcaaatcccaaatgtgctcagacttaaataagtgagctgctgtcttagagagtttttagttagaaaaaatcagaacagaagagctaatactcgggagagttctctttagcagatttcaacaaaaagaaggcagatttcatcctgtgtaatatccaaggcaagaagaccttcatgctcagaaataggtcacaacccatgatggctggtgttaaggagt

SEQ ID NO: 27202 - DNA, 1198 bp, Bovine  19866881772450
  misc_feature (1)..(1): n is a, c, g, or t
nagtagctatgttgtgagatatggcagtgagaagtttgttttcttagaaaagtaatcttcacagtggttttatgtgagagagcctgtccttttcccctgtaagtggaggcagggttttctgaaggcgataaattgccccattctatcgtgccacaagtcagctgggaatgaaaagcagaacaacagaattgcagccttaatagatgccagcaacacaaaggtggtgagcttaataacagagccttagagagagggaggaagattgattgattgactgaaagcttagagcagagaacagaacgagagaaagaacactgtgtaatgcttttcaaagagaacttatctaagaaccccaggagggagagagaagagaaagaaagtatagaacaaatcgtaccttgcagtaccccaaacctgccctggctcattacagtggggcagggagcactgaaaggtgtcctccacaggctgacacagactttgacatggggagaaaatccattcaagcaggcaggaagtggtatccaatggctttgagaagttagaagattctctctctctcctgtggagtatagtgactttccttggcaaagcttttcccctcttgttgctctgtcatcttttggatgtttccctcatctttgtgaccaggatggttcgttctcccacccgtgtccctgctagtagaaaagagggaaagggtagacacaccccttactcttaaaggcttaacccagaagctgcacacaatattttggctcatgtcccattggcagaacctagtcatgtggctacaccacgtggccacacctaactgcgaaaggaagctggacattctggaaggtcacctgcccagataaaatcagatgttctctctgagaggtttcttcaccacctctagcctgaggtcttcttggccgcagactttcctccacatttaattttcaaaatgcccccaagaacctgtctgggagatctatcctcggaagacagaagatggagaggcaaacagtgggcaaagatggagtcctcttgaacaaaaatggggtgctaagcacatagattttgtttaaaaactcctaaaagggaggtgtctataacgccatcaggcaggcaaagccacctcatcttgttagggccctgcttctatcaatacccgaaaagtgctaaaaactgctgtaaactcaagagaagatag

SEQ ID NO: 27203 - DNA, 1845 bp, Bovine  19866880347403
  misc_feature (1)..(1): n is a, c, g, or t
ncagcacagtaaattgtagcaaactgagaaggagccgagggctcactacttccgtctaaatgttctttccgtatgattataagcagagggaatgaatactgtaataatgcttatctttcctaatgttttccttctcctgcttttatgtggtagggtgcaaattagggggcattcgtgtgtgctaagtcacttcagtcatgtccagctttttgcaaccccctaaactgtagtcccggagaaggcaatggcaccccactccagtactctagcctggaaaatcccatggacggaggagcttggtaggcttcagtccatgggatcactaagagtcggacacaactgagcgacttccctttcacttttcactttcatacactggagaaggaaatggcaacccactccactgttcttgcctggagaatcccagggacgggggaatctggtgggcttccgtctatagggtcacacacagtcggacacgactgaagcgacttagcagcagcacactgtagtccaccaagctttgctgttcatgagattctccaggcaagaatcctagagtggattgccatgtcctcttccaggcaatcttcctgacccaggaactgaacctgtgtctcttttgtctccttcattggaaggtgggttctttaccactagtatcacctatgaagcccacagtttagggtatatagatttaaattaaaaaatgataattaatgataattatttggctgcttatttttattttttttaatttatttatttttaattaaaggataattgctttacagtattgttttggtttataccaaacatcaacatcgttacttatttttagtttcttactaataaatgtgcattcagtatgtatgtcactgctttgtgctgatctattcaccctcaaaatatatatgttgaagccctaaccctattaggtcagaagatcacaatatttgagacagagtctttaaggaggtaattaagctagtgagggcactaaggtgatccttaatcgattcaactcttgtgaaatgttaatttcatcggatggagactttattcttttccttgcaaaagtaaacctctgagagtcaagggaggacagtgacacccagaaatctcgccttaaaaaggctatcctaattttactcaaaatttcctagtctagacctgttactctacttaagtaccttgtgtgatcttttaggaagctctttacattatgttttactgaatctttgtgtctgtcactcttcaaaaattgttagctcatgtaaaataaagaccctatccctaagcacttagcacaacaaactgtagcatgtggcatgtgtaggtacttgataaatgctcatgaatacactgaaacttctttgtaatgctgtctgagtacctattctatgtaactgactgccttggtggtaaaagtcataacatgatcttttaagcacctcaataattaaatttgcttggatggtctccaaggaaagattaattcatccagtgttatagtgaaattccacaatggtaattctggttcttggttgtagagatcatccttagtacctaaagctaattaacatagcaatacaaatcttaatccatgcagtttacaaatagaaaacccaattggagtgatgtgatattaattagacaaaaataataagtttggattgacatcctggtgatcatatgaattatgaatatggggggaaatgcaaagtgggaagtgaaggggttcctatccacacaattactcaagacactctgagggttattttcatgatgctttatatgacatagaaagagtattattattattattttcacaaatactataca

SEQ ID NO: 27204 - DNA, 953 bp, Bovine  19866880387254
  misc_feature (1)..(1): n is a, c, g, or t
nttaatctctcattctgtccctcacttttcctctatctattcatgctgattaatctttttaaaacctctcatgtattatgcagtttttctccttagaaacatttccgcaattcctgtgacccagcagtggttctcatcctgcctgtatgtagaatcactcagggaactttaaataaagtgtcgctgactgagccccacctcacgccagataaattagagctaaggcaaaactatttttgaaatccccaggtaattcttgtgtgtagccaagagtttagaatccctgggttaaggttttcatttcttttctggcctcaggacactatagggaattttagcctcactcctctttcaatctgatctcttgttaatccttttccttatttaacccattgtggattatgtgattattttattttattattttttttttggatgcctcacaatgcctctgaaattggaaaaaagatcctatgtttgcataatactttatatctttacatataaattttatgtattatccacaagaaacctctgcagagagaggcagaaaatgtaatcctactttaacagatggggagtgcagaggttcagatagattcaaaggcctctgtgcaaggatttgaccattgaaatcactcctatgtaacaggacttgggatttggctatcctgacatttctcccttaagggatttattcatttgcttattcattcacatcttctattctatttgttcatttgtttggtcatcagatatttgctgagtgcatgctttgattcaggattttagtgtttcaccaagatatggtatttcatatctgcagtggtctcacactagcagtgaagtataattggaaacaaagaaccatcatgataagcataagttgctaagggacagagaaaagagaactgtgagactccagtgagtctagtcttgaaaaatgtgctgat

SEQ ID NO: 27205 - DNA, 1625 bp, Bovine  19866880405096
  misc_feature (1)..(1): n is a, c, g, or t
nttgaaaacaatgttatttaatgcctatttataatacacacacattgatgccttataataaattacaccttaattttaatggattacctgtaaatttaagtgaggactagatgtattttggcatctcaaaggagttttattgtttcttcaggtaagagttcaacttagagttgaattatatcagagagataattctagcaaaatcatgctggcctgaaatcaaattagcttctaaaaatagcttagtttattctgtaattttaaataaatctgttaatttatttttatcaatttcttaatttactcaataaatattttgacttaaactctgattatgcaaaaataagggaaaagggatctgctgtcatggaactcataataccaagtcaagacatgaaattatagttttgctaaaatatttattgttgaaatcttttgttatcaggaaagaagaacagaaggagaggggaatatatcttcttccaatttgtcctgagatggaatttatatgtgaaaagctgttaaaggtaagaagcatgaaaaaaatataatggcttcttaaaaaggatataaatgcagtcttctgcaaattttcgctcttttgattatgtacttcttgaaaatatcctgtgtagattctcatggaggcctgtccacaaccatgaagaattatctattttcaagatttgctgtctttctaccccttctaaaaaagtgcttcagtggttaacctcttcattcaaaaactaatatatcccagtattccctggaaagcaacttcctttattggcataattccctggatatgttttaagagccttgactaagttgttttgccttttagtttgcagtgtgcttttgaatgatcaatatgcattatggaacaatgcttattcatcatttttcccaaccaggaaagcacattgcaattctggtgagaacatttaagcatacataataatactcacctaatgcaacctttcattactcttcatttttcaacccccaaactcaaagactttcagtttgtttttctattatttttttttcattctttccaggtaaatttctcaatttaataaataataattggaaacaaatcataaacatttatcttcctgtcaaaatcattgtaaaaatgagcagaaacattggaactccaattttgcaattttccagcaagccacttttttgctggcttcagatgagatcagatcagtcgctcagtggtgtttgactctttgagaccccatgaatagcagcacgccaggcctccctgtccatcaccaactcccggagttcactgagactcacgtccatcgagtcagtgatgccatccagccatctcatcctctgtcgtccccttctcctcctgcccccaatccctcccagcatcagagtcttttccaatgagtcaactcttcacatgaggtggccaaagtactggagtttcagctttagcatcattccttccaaagaaatcccagggctgatctccttcagaatggactggttggatctccttgcagtccaagggactctcaagactcttctccaacaccacagtgaaaagcatcaattcttcggtgctcagccttctttacagtccaactctcacatccata

SEQ ID NO: 27206 - DNA, 2066 bp, Bovine  19866880443882
  misc_feature (1)..(1): n is a, c, g, or t
natctccaaatatcctagacatatatcaaagcatatctgtgtatcacaataatttcaataaacatagtagttttttgtgttgtgtagtcatatttattacctaaataaatgaaagttatgattctaaagacaaaatgacattgtaataaacataaaagactactcaaacaccaagtcctaagtccttaatatgtagaaagtaacttaaaatcagaacttacagttcagtgtctttataatgattacagggaatgtatatttacttttataagtatttccataatttacatatgtatgtgacttatttcagagatctttctcatactgtaagctacatgtattaccaacattgatttatgaagcattttctgtgactttcttaatatgctaaaaatttatgacatttgcagattttattatatatgcatgcagatacatacacaaatgtacttatcacattcaatatcatgactcaattttaacatttttatgttaaatgacctttgcaagtatatatgtgtgtatatatatatatataatgattgtgattttttagtgaagttttagaactgtaatctttctgtaggagatagtagaaaatgtgcttaactggaaattctagatcaagctttaaaagtaagaaaataaatgtcaagaaaatctactgtgattgttcataaatcagtgtgtgtagaattaaaaacgtgacagtgttttaagttagacttcatgaaaaacctgtacagtcttgagagcatgtcttgacatttcaagtatatgcagcaactcattctataaaaatgccctacttctcaagacagcagctcaaatatgttgtatatctggaaaacatctgcaaggctgcttgctttcctcaaaattctgtatttcccaatgaaacacatatcaaattattcaaaacagaagatagccctaaaagacagaattaaaagtgggataaaacatcttaatgattacatgctactcaaaggtcacatattatgttaacatctttaataaaaatgtgctttagcaatggatgtctattttttgcaagcattctgattttatagtgcataaaagggaattcagtgatgtccagtttctatgtgcacctaacaatgtgagaagatggtataacatttatgtttatacaggtgcatggtgatgtctcatatagtatataattaattgttaattaatttattgaataattaatgttagtgttttaatattgacatgaattgttattacttttttataaaactatcatgaattgatatttataggtatcctattttcaaatgagaaatttatgcaaataaaatttaggttatatatttaactactaagttgcagacttagggctaaaactgacctgtcttggtcagtgttctttgactgagatagtgcattgaaaaaaatcgtttgttaaaagttgaacctttgagattctctttactgtttgtctttctactggatatcattctgttaaacaaaacttatacacaaaggtaccttctactaagtacagtcatcttctagactgaaagttatttcttcctgttttcactgagactttggtccactattatcctttctctggataacaatcatgtctaaaactgaaagaatcatgtattctcagagctgagaacactgtttcttctgtactaccttctacccttcaatcactcctgacacattcccttttttctgtttcaaattctcctattttcctttgtgtgtgacttttactttgaaacattacatttagagaaaacttgcagaaatacaagaaattcctgtacactccttacacaattcaggagttgtttcagttcagttcagttcagtcgctcagtagtgtctgattatttgtgaactcacgaatcaaagcacaccaggcctctctgtccatcaccaactcctggagttcaattagattcacatccatcgagtcagtgatgccatccagccatctcatcctctgtcgtccccttctcctcctgcccccaatccctcccagcatcagagtcttttccaatgagtcaactcttcgcatg

SEQ ID NO: 27207 - DNA, 1998 bp, Bovine  19866880566594
  misc_feature (1)..(1): n is a, c, g, or t
nttctgtgatttctaatacctatttaatgttcttccgaatgtatccttttctgccaagagagtcagacttgacatttgctacttgaaacaaacaaacagaaaaatctgactgtgtcatgcaaattcactgggggtttatttgatacgaacctagttatagtaatataattgatactctcttttaaagagtaaaaacatcatgatatagttcatgaattcctctttgttgctagaaagcctctttctttctatctttctgatcttttatgtatcttaatatattaatactatcttgtatgatgccttacctggaatgactgtactcagagacactccataattccttttgtagctcaaattcccatcagaacttacagtaatcactgtcctaaaaaagagctagttaaaactggcatgtaccaaaataagaggattggtatattagcaatgaatattttagtgtctacagttgttctacttttcactgcaatacagtgtttcttatccttcacttgtgtaatagaataaatgacatatttctgaggactgatttatttgtcttggtttgtgtgaattgattcatttcagagcattcaccagaatagttggtatcaaaataatgctgtatacaaaacatataaatgcattattgaatgaagaatgaactgaaagaccataagttctcaaagatgatgctcagagcaagaggattaaattgcataaaaatcaagtcactactctgaaatacttagtgtaataaaagcttgagagaaaaatgtaagatgaactcaatttctcagccattgctatgagtctggatgtgcatcctgctgttatgtgaacaattaccatgcctggagggaactgaatgaatgttggcacctattggcagatgaaataaaaacctaagcttattctcctatcatgaggctcacatgccatatgctaaaaactaatacattaagctggcataatgaggaagataacacattgtgttcctgcttgcttacattgcaaaaactatgacaccattatacaaattgtctgtaattcattgatcttccttttttcttgcaattctttgaattttagaagtacctaagttataaaaatataacagtcgatttgcttaaaagtagaagatacttgaactttggcctaaatctttttctctccatttttcttgaatctgccaagatatttgccattgagtgccattttctgtatgtgtctttttttcataaaacagggctgtatagaaaatctgcatctataacactgaaaatcctattttcattagatgggttattcttataattttgctttacattttaactttattactgtgttccctgcatgaaagatatgcaaaatatgtaacctggtttaggttttgggccaagggatcagtgaatatttgactatggattgataattgatacatgggatgtttggaaacttagaatgataacaaagttcattctaaacttagaatgaagctcaagtgagaatgtatgggtggggggaatgagccattgcctcaaataaagagaagcaaatttagttcttctttccaattacccttgtggatatttctgaacataaaaatagacagagcagcataaggtcacaggtatataagagaaatgcacatatgatggctagagcccaagacctcttatcaaatcatccagtcagcagtatgttctgcatctgggcaaacacagtaaagtattcaaagaatataggacacaatttttattctcaaggagcttaaaattcaaacagcatgccaacacaagcagggttatagtatggaaaataaaactgcattagattaaaattaggtgtaatctagatgggataaatcagactattgtgggactcctgaaaaatcagaagactttgtgtagaagattggatttgatttgttgaaggatgtgaagaatgtggatagtaagcaaaggtgtagagatgctagggaaagacaagccaaga

SEQ ID NO: 27208 - DNA, 1456 bp, Bovine  19866880583522
  misc_feature (1)..(1): n is a, c, g, or t
ncacccataacttcacccttaatgaggagggaaataataattacctggaaaaacctgtatgcaggtcaggaagaaacatttacaactggacatggaacaacagactggttccaaataggaaaaggagtacatcaaggctgtatactgtcactctgcttatttaacctatatgcaaatacatcttgaaaaatgctggctgtatgaagcacaagctggaataaagattgctgggagaaatatcaataacctcagatatgcagatgacatgacccttatggcagaaagtgaagaggaactaaaaagcctcttgatgaaagtgaaaggagagtgaaaaagttggcttaaaacttaacattcagaaaactaagatcatggcatctggtcccatcacttcatggcaagtagatggggaaacagtggaaatagtggcagactttaatttttggggctccaaaatcactgcagatggtgactgcaaccaggaaattaaaagacgcttgcttcttggaagaaaagctattaccaacctagacagcacattaaaaagcagagacatactttgtcaacaaatatctgtttagtcaaggctattgtttttccagtagtcatgtatggatgtgagagttggattataaagaaagctgagcaccgaagaactgatgcttttggactgtggtgttggagaagacttgagaatcccttggactgtgaggagatcaaccagtccatcctaaaggagatcaatcctgagtgttcattggaaggactgatgttgaagctgaaattccaatactttggccacctgatgggaagagctgactcatttgaaaagaccctgatgctgggaaagattgagagcaggaggagaaggggatgacagaggatgagatggttggatggcatcactgactcaatgcacatgcgtttgagtggaccctgggagttggttatggacaaggaggcctagcgtgctacggttcatgtggtcacaaagagttgaacatgactgagagactgaactgaaatgaactggaggaatactgtcctaaggttatgaatgtgaaatgtaagatgtggtaatagtttaatatattgtagttctcttaccacatggtccactcactttccatttgatgttttgttttttaaatatttccatcaaatcacacactgggttgtttgtgaaaccaatcatatttaacttctataaacttcttaatccagcaaaacttgtgttataaatttacctaaagggtcaaaaatatttcccttatcaagatgtttttcccaatcttggcctatagatttatagcagtggtccatcctaggatatcttaatcaaccatctgcacccatgaatttcacacttgtgatagctgccacatttccaaagtctggcagctaaagttcacacattttaaaactcttccaccaatcttcctaactcttagagcta

SEQ ID NO: 27209 - DNA, 2387 bp, Bovine  19866880654360
  misc_feature (1)..(1): n is a, c, g, or t
natgctggtcctttggaaagaaaaacaaaattgataaaccttttttagccaaactcatcaagaaaaaaaaaaagggagagggcctaaatcaataaaattagaaattaaaagggagaaattgtaatcaacaccacagaatacaaaggactataagagactactataagcaactatactcctataaaatggacaaacaggagaaatggacaaattctcagaagaatacaatcttacaaagctgaactagggagaaatagaaaatatgaatagtctaattacaagtactgatattgaatctgtgattaaaaaacctcccaacaaacaaaagtccaggaccagatgattttacaggtgaattcttccaaacatttagaggagtttatgcatatctttctgaaaccattctaaaaaattgcagaggcagaaacacttccaaactcattctatgaggtcaccatcatctgatgccaaacaggatgatgccaaacatcatccaaagccaaacaaagaaactgcaaaaaagagaaactactggctgatatcactaatgaacatagacacaacaatccttaacaaaatactagcaaattgaaaccaacaattcactaaaagtggcaaacccactttaaaatctgccctgcgaattgactttccaaggccagtattggtcaattgtttcagcccaaattcccttgaaattataactttagctaaggcttgtactctaatgctttgttagtgggtgaaattctaggtagtaagaggtaggtagagatgaacatacaataagaatggaaagaaaccaaatataagttttctattaaagcagtcccaccttcacaatatgtgggcttggactttagagttactgcaacttccactgaaggacagataatggagactgcctagtccttaacccaagagaaatatgagagccagcagtgtttagagatttagtgattaggcagaggaggttgctctggtcatgtccttttttggtcaaacaacagagaaggaaagtaagaattagcgaatctaagtaagtgcattctttgggcccaatagcataaattataacatctaaatatagattatgtacattactcttggaattatatttttgcttttattagtaaattactcaactcatatgcaaattgatcattgcaatcagaatcattttctacatgtattctgtatcctagaaacatacattttttaaaaaaccttataactgtgatacaagtatcattatcttcagtttagaaacactataactgaagctaaaagagatgaaataacattccattatcaggtaattggtgtttgtgattctagcctaggtctgtctgagtttagtcccctgcttattctactttaccatgcaacttaataaaaacaaatcactgcttgttcattactttgtagtataaaaaattcatgaaaataattttaccttatttaaaacttatagaatgtatggcttaattattactgttgttttatttacttgaaagctgacgttcagaatgggctaaacagtgtacccaacttcacattccaagaaatcatgaggtgaaggacatactagcactgatctgaaaattcagtaatctgccataagaataccaggaatacagaaacattttacaatttgtattacaatttatgtatcgcatttgtcacttctcattccccacttttgcctgtcaattttgttcttttttcctatgacaaaggaagatgaaactttgtgaagagctgccataatataggctttattcataaagcattcctacctatggagaagcacagaaaaatacagtaacccctattgcctaagaggaggaaatatctgtaagtcctttttaaaattactaaatcattttttctttgtgcattaagaaagtccaagatgtaacaagatggtctgtgataatagtacagatgcctgagggtttgttgtgaggtgcttaagtatgaagatgtgctacagaggcagagagaactagaatctaaactggtactaaagctattcagtaactatgagacccaggtgaagttgacaagttcttcctatctcaattgtctagtaagtaaaatgagatttcttctaggcattaaaatggacatgtttaacttgtgtcagtgaaaagtaacatttgcaatgtgttttgcaggtgcctagttcagcttccgcaacgtgtggcagttctatggtttaattgtaatagtttcactgcctgttttattgtttatatattccagaaaatggagggtgcttattcatttcaccatcatccctcatgtagtcccacacagttgggcactaataagggtaactctcagctgctaactaattaatgtgaaattgctaaatacccaca

SEQ ID NO: 27210 - DNA, 4203 bp, Bovine  19866880709646
  misc_feature (1)..(1): n is a, c, g, or t
ntaccttgcttgtttctcacttttcctttaagcagtcgtaaattgagcactgctccttgaacatcctcatttttcatggcatatgttttatccatttcttaaaatgccctccctcacaaagttcacatgagaattttctctttttgaaaatgtcagttcaaattgatgactgtgagggctttctcaacatcttccatcgggtagtaggtcctttctttttactatgtatatatttctattgtaatgtttgccttttatggatctcccacaagactgtacgctcatgacagaaggctcttgtactctttcactggtggattcccagggccagaaaagcaccatggccagaggacatattcagtgactgcttcaggagacgaaggataattgcaagctacagcagactagagaagagttagagaagacagagaaacaacatctggagggcagtgaggaagcttagggagaaccctggagggaacagagcaaaacttcagagtcaacaaaggggagtatcaggcacactccaggcgcaaagacaaactgttttctccatgtaacagttaactgagaaagacaagtgcctagatatgtatggtaactggataaggtggcttttatctaacaatttcttattagaggtctctctaaatcatttacaaattaagaatttgctagctattaacccattttctaagtttgagtgaaaatattttttatcaattttatacaaataagcctttgagtctatttgagtgcatttcagaatgcacacggactatgttgttttttttttaatctgtgtgtagtgtatgtttcttttttctaaaagtcaagcactgcttataggcagaatccatctgtgaaaaaatatagaaaaacaacaaaaaagcttttatttggttatgtgatattcacttatcccagtttgactatgttatgtcatgtgtgactaatgtcaatgcatccagccacctgccttcccaccagccactgacaagctgcagttaaataggagtgaagtacattgacagacaaaattacttttggattcactgctcaagtaaagctttgttgaatccatagcaacccaagcattatctatatctgtctggattactaaaataactcattacattacaaaatatggatcagaagggttgatattcctgaaaaaatatccccacattgggagctgaaatgcggatattcccttcttcccagactgcctgcaaagcaatgacaaaaatcaggaacagactgtccatcaagaaagcagctggaaagatcaaaacagtaaaatatgtagttggcatgttgcttttatacactagccaaatccccacagggaaaaaatgccatgtagatttcagtcaataaacaaatatctgacaagaggtcaaataaatcagtccagcctgttataatatattatatgcagagtaatgggaatagaatcatcataacactagtagcaatgtgtttggttttaaatggactgtgtatctggcatctgctaacctgaatcatatgggactttagaaaaatgttatttggtatatgaaatgctttgaggccacaaaatctgaatatacaaaattcccatcttcagttaaaacaccagtgaagatgagtagaagaaaactgagggaaaactagagcttccaaccaaagtatacagttaagtgtgaatgtcttcattatataaatatctgcatattaatttggcatttctattctttttttcccctttgcctacatgaaataaaagaaacctattcctctatcaaagtttgtctccctttccaattcctgtcattcaaagtacaattcactcctatggtatccaatgtagtcctagtcaagtttcaaactcaagataccaagtggcaactgcttaagttatattgctataccgtacagctactagcagacaaggaagaatattttgttctacctataagccctctttagaagagaaagtggatttctgcaggaacactcagagctttatttctttcacctagcacagtgcctgagtagcagacactcaataaatatttaataaatgaatataacaggaaaaaggaatcattaaatacttgaatgtgtacttactgacaagtagcctagctttattttattcaagtacccataaaagtttttgatactagaaaagtatcattgaaataaatcacatattttctccttttgtatctctgagtttaaaaaattttatatgctactatggatgtactaaaacatgtggatgtggcactttttatagtaattatgatgtcattttcaaaggtaaatttttttttctttctttcaatatacatgcatgaaatatatcacttgcatttttgttaatattcataaagtggaaagttagaaaagagtatttatgaattaattaattcacatctatcattacctcaaaatgaaaaatttttttcattttataaaattgctccagcctccaagtgctagaatggacaaggtctctaactagggacctgaatcagcttaggaagactagggtattacaccccacaccctgccccctccatggtgaagagctgtgaaataactttgctacctttctccttagccaagaaatatgcatgacttccatgaacacctatttaactcaacctgctacactgagcattgcaaataaccaaaatgtgatttctttactttcttgcaggaaacagtatcttactcttccagtgttcagtcacatttaataaagatgaatctttccaacaattcaacactcttggctctttttaaaacaaggagacagactttcctgagatattctttaaatttacaaaccgtggtattctttccattagtgatagaaaagaatattgcttgccaatcagatatcaaagccttctttcctcctctgaggcttcaggaatggggtgcaattattattgaaagggaaatggattgtttaagattggctgctacattgccctgatactgacagggtctgcaggtgtacagagttttgcccactgatataaattgaatctgaaaatagcaatttattcaccaaatcaagccaatcactgcaatgcagttttgtcttttggctcttatttccaaccaactactcttaaccactttgcaacttctattttacagtgaacatttctgttttaggagggggactaggggagctctcatggaaagcctttgtttcagcctttttgagcctttattttaaaagactgtttataattgtactacttaatctagacaaaaacgatcaacacctgttccaaattggtactccagtcccactatccttttctcttcaccaattgccatttgctttcctttacccataacaatgcaatcacattaacatcctttgtaacacaatttcaaaaggcacaccagaaattctacagtaaaactgcatcttctatatgctaacataatcaacttccaggaaataggaaagaacacaaagacatatttgaagtgatttttttttcaacagttacttgaagtaatacctaatatccaagtcaagaatttgaaacaagtaaaggaaagatagtttgcctgaggggaagcaaacagaccaaagtactctcaatttggatcaaagactggatagctaaatggaccctctcaaagatctgaatcaacacatatccctggcatcttgccaggctttccaaatctcttggatggagaggaactcacaatgtctaagcacaggttgttgtcatggctaccagcagccaacagggggaaaaaaataacttaaaaggcagttgggaaacatttaaaaacaagctggactggaaagaatgcatacttaactgcaatttttaggcaaaggctatatctttataaagactcagaaagattataaacaaataaagtaaattatgtcagtaacagacaactgtgttttaaggatgtcccatattatgaagatctctatctgaagaagaaaaaagaaacaaagtaaaagaggatgaggaggaaacttgtcagggaaaacagaagctctggttgctataactgttttcttggcccttcagaaaaacaaaacctgaatacaactgctagtccatgtactgctctaaattctttatcagaaaatcagcaaaatgtgatttttatattttacctttaatcagtatattttaatgtaaagggatgatagca

SEQ ID NO: 27211 - DNA, 1033 bp, Bovine  19866880715805
  misc_feature (1)..(1): n is a, c, g, or t
nctttaaaatctattacttctgccttaaaaacatggacttactgccttccttcctcgtctccttgctttttcatcttttcttgtgtttagcaccatgtggaagagaagtatacaacaagcattgcaaaaggagtttattttccttatacaacaagaatctaggactagggcagtgaccctaagataccatcaacacttctgccaatgtctactatggggtctacaatttttgaaatgtgacttttctcctcaattgcagcagagcatctgtactcccatgcatctcaaagactttccagaatatgagagagaaaggggaaaaataaaaggaaaaggaaaatgacagctaaacctgtctcatttaatccaagaataaacagctctcctgggaatcctgtctaatattgttccatttacaacttgttggccacaaataatatcagttaagccacacttagatgggcaacagcctgggaaatcaagtatttagatgggcacattaccacaccaaactgaattggatttctgttagtagaaaaaaagggaggatggtggagaatgaattttgagtgcacaaccagcactgtctagtacccattctcccttttatcaaaattctgatctttgatttgcttagttatgtgcaacaaatggaggtaattggaatatttaatgtttagcccaaatcagataaatggctgtgattcttaagacagaaaaaaaaaagaattttggtcatgaatttaacattaatgtatatagatcatatgtccaatatttaaagggattacattagaatatatgtggcattcagattattatatttatttaatattaaatcagcattctgccctaatttattagaaggaaactaagatccatttatctaacttcccagcaaaagcttttgaatattatattcttaacccaaatgtccttattatattttcctcaggcgtttagcgattttgttacatttaacagcagcaataattcttattccataaaaaaggaattttacaagcaggacaaa

SEQ ID NO: 27212 - DNA, 1405 bp, Bovine  19866880791041
  misc_feature (1)..(1): n is a, c, g, or t
nttgtcttagtaagagaaagtaagactgtggaatgatatttgggtatctaaatatctaaaatagctaattgcttacctctaaataatatttttacccctttgaggagactgcagagtacaatgctaagttactgaacagcatatgatttgatatttttatatgaatcataaaatgtaaaagacaatgcagaggtatggagttgctatgagatctacaaaaatgtaaaaagctgagaaacatgcaatatgtaaaattgcatgcaaactgaaagttaggaaggaaaaataatttaagccatgccattcaaaaatataaccaaaatatattagcatggaaaatatataaaactattgtctttatttgattacttgaattttgttattgccaaaacgttaagcctttcaaaatcatttataaaaataaatctgtaggggtcaaataaagaacactgagataaacattttctgactttaccaagtattaccattttttgaaaaaaacaaatattagcttttattttttgcacttttatttttcaaatcaagtatttaaagtttgcagttacttttgtaattttccaaataaataatggtggatttcaattaatttgattttgatttataaagtttatagtatgtattcacataaacacaattggtaggttgctaaagtacatgatgttatttaaataatagattagctaaagttaatatcactctcaaaatagctttcctaggctgatttactgtcataatacaaatgccaaaatgtaatgagtgattcaaatttcagtgatacaatatgacatctgacagttaataatgggtttctgaaagtgctgctaaaatgtaatatgcagtacaaatttagcatggctaaactcaatattagtctatgaagataacagtacaactaggcaaattaggtaattttaccatgacaaaatactataattagttttataattacatttatttacatggtgaattttgataatagtaactcattttcaagtcatcattaaatttttatagaagataacatacaattatatgtaatgctataatcatttaaaattattggctgtggttttcatattgtcacacagaaaaaaaaatatccaaatataccagtttaccttcctttcatatattttaaaacatatttcaggaataccaaccatcttaaagaaaaacatagttgagaattatagaaataaaaatgtgttgagtgattttctgttatagtgtaaggaaagaatatcacagacatgaatctaaagtgaatcagttcagttcagttcagtcactcagtcgtgtccgactctttgtgacccgtgaaccgcagcacgccaggcctccctgtccatcaacaacttgcagaaattactcaaattcatgtcca

SEQ ID NO: 27213 - DNA, 1725 bp, Bovine  19866880813649
  misc_feature (1)..(1): n is a, c, g, or t
nttaacacaatacatagcaggtaacatacaccacacacacacatatatacacacataaagcactttcatatatatatatatccttgtccatgcttctgctcagttgtgcctgactctttgtgaccctttggactatagcctgcctggcttctctttccatgggatttccaggcaagaatactggagtgggttgtcatttccttctccaggagatcttcatgacccaaggaacaaacctacgtatcctgtgtctccggtgttgcaggcagattctttaccactgagccactggggaagattatacatatgcttataatcttacatgcacacacacagacacacacacacacatatatatatatagcattttcttcttctttcagttcagttcagctcagtctctcagtcgtgtctgactctttgcgatgccaaagagcacatgaattgcagcacgccaggcctccctgtccatcacaacctcccagagttcactcaaactcacgtccatcaagtcggtgatgccatccagccatctcatcctctgtcatccccttctcctcctgcccccaatccctcccagcatcagagtcttttccaatgagtcaactctttgcatgaggtggccaaagtattggagtttcagctttagcatcagtccttccaaagaacacctaggactgatctcctttagaatggacttcttctttagggatgttaatatttaatccagtgaaggaataaaaccttgtttcttacccccacttgccatttatctctatgggttgctgggtgtgggtgtatgtgtctgagcaatgcccagggacaacactcaggttcttctggtaaaccaacagctgcaactgctttgatgattggcttgaaaaaaaacaagcatgattccaacttgggtaggaaatctaaggggaagcactggattctaaaatcctatacttgtaggttagaactagagaccccatctgatctgaagacctcatttcatacagcaactaacaatggggaatatttcttttccagaagctgggaaagcattttgctcaaaacttagaggaagaaaaaatttcattatttttaatcaatcgatcaaaactaaggcagataataatcagaaggagaaaaatatcattaagttctggtattttaggcttttaaggtctcgtaaaagcctcaggaggtaacaagcagagtagagctgcacgcaacatctccactcatttctggaaccattttcaaggcacaatgacctggatgcactcagagttcctgtatcctcattgtgcctaaaaagaaaattcttttgttgcaaggtgatgtgagagaatgaaaagattcttagagataaccttttaatttcctaaaaacacacatcccaaattatatgaaactgtaacattaaacaaattctcccaaatttcatcttataattaaagacatttttgtgctatacttgttttaagaagtatatgttttacattaaataaaagaacaagctgcctttggaagtgagaacattccatatccccagaagaaacctgtatgttttattgttgataggaaaaggaactctgccaagcagtgaactaatgaattagagtttggcagcactccatgcctgatacaatttagttcaaatttatgaaatctaccatttccagaaatccacttctgcctaaggcctctctgtacttttcagagtaaaaagcataa

SEQ ID NO: 27214 - DNA, 1471 bp, Bovine  19866880910253
  misc_feature (1)..(1): n is a, c, g, or t
nttcattagagttattaagaaaaatatttatgtagttcttttacatagagaagtagttttcttggaaatgagaaaacgtaaaattttccatgtagaactgactataaatgagtaagttttaagcaagaactaagctgaaatagtcttacttttgacctcaccttacattgtacagctttacgaggcattaataatacattgatcagcttatttttgagagtgtggtgtttcaaattctgctataataataggattcctatcaagccaatataaaattttgaacaagtgtgaacacagtacaaaagaatacaattaacccattttatagctttaaatgtgtagatagaaatgaagaaaatttggctgggaataagacacactattttgttggtttacgtaataaaacaaaaattattggtacttgccaattattgttaagaagtactcaatggcactagaagagtcaaaatgtatgaatgcatatgtgaaaatgtgacatacataaagactaagatatttgataacaaggtgtctgtaaggattccaaatcagaaatagtttaccttttgtcaatttgctacttattgaatcttagaaataaatgtagattaatctttttttcaaggttgcatgctattttaaaaattgttacattttaatttcataaaatatcaaaaatctctagtattatctccacccaggattgttcacagttttagagataatattatgcattattcatttttatacttctggctctttttcaagtagtgctcattaaatatgctctttggaaatatttaaactgaatgaattcaaatagtttagaaatatgaaagttattgctcatccattaatggatatacatttctcaaaaaatccaaaataacctacctttggaaagttatgttgccctccaatctgaataatttctggtgcttccatcaagcagcctctagtttatgaagaattaatagaggctgtataatcgtaacaaaaatgttttactcatatgtgagcacagaagatctaaatttatctctgtggtttttgtctgatctctttctgaacactgatggaaaagcagcccatttcaaaatgtctgaaacatgacattccaagccttataagattttgttcctctgcattactgtatcattatctgtcaaaattggaattattttctaaacagcaacattttcttatttatcaatatttctcttgaaatgattttgatttttttcaaacaacctggtttcctcttttcttagtgttacactgtatttgaagcagattgtataacatccccagaaacaaatatattggattctattttttttttcttttcaggatattgagtagaaagttcactctactgtttctgatagtgactctttcatttagaggtgcagacaaaataaagtttactgggcttttggcatctgggttagtattgctataattgtattcc

SEQ ID NO: 27215 - DNA, 1625 bp, Bovine  19866880924070
  misc_feature (1)..(1): n is a, c, g, or t
naatgaagggatggagccaagcaaaaaaaaaaaaaaaaaatcacccagttttggatgtgactggtgatataagcaatgtccaatgctgtaaagagcaatattgcataagaatctggaatgttaggtccatgaatcaaggcaaattggaagtggtcaaacaggagatggcaagagtgaatattgacatttaaggaatcagagaactaaaatggactggaatgggtgaatttaactcagatgaccattatatctactactgtgggcaggaatcccttagaagaaatggagtagccatcatagtcaacaaaagagtatgaaatgcagtacttggatgcactctcaaaaatgaaagaatgatctctgttcatttccaaggcaaaccattcaatatcacagtaatccaagtctatgccctcactagtaatgttgaataagatgaagttgaacagctctatgaagaagatctacaagaccttctagaactaataaccaaaatagatgttcttttcatcaggaagtcaagaaacacatggaagaacaggcaaatttggctttggagtacagaatgaagcagggcaaaggctaacagagttttgccaacagaactcactgctcatagcaaacaccctcttccaacagtacatgagaaggctctacacatggacatcaccaaatgttcaataccaaaatcagactgattatattctttgcagacaaagggtggagaagctctatacagtcagcaaaaacaagactgcaaagctgactatggctcagaacatgaactccttattgacaaattcagacttaaattgaagaaagtaggaaaaaccacttaggccattcaggtatgacctgagtaaaatcccttacaattatacagtggaagtgagaaatagattcgagggattaaatctaatagacagagtgcctgatgaactatggacggagattcgtgacattgcacaggagaaaaagatcaagacaatccccaagaaaaagaaatgcaaaaaagcaaaatggctgtctgaggaggctttacaaatagctgtgaaatgaagagaagtgaaaagcaaaggaggaaaggaaagatgtacccatttgaatgccaagttccaaagaatagcaaggagatataagaaagccttcctcagttgatcaatgcaaagaaatagaggaaaacaatataatggaaaagactagagatctcttcaagaaaattagagatagcaacgcaacatttcattcaaagatgggctcaataaaggacagaaatggtatgggggcattttagttagggactatttatatatttttattttgtaaagaaattaaaagtgatattctgctcaattctgtcttacatactttctgtttgtattgaattctcataccaaggatctgtcacttcttttacataaattcattttatactcagtcacaatgaataactatcataaaaacaaatagcatgtcaacacatttatttgaccagagtcctcttgagataatgtcttaattttcatcaagatttgtagtgattactgtttctaattatgataatcaaataactcattagtgattatgtttcaaaaaggatttaaaatacaaaatgtttctagaat

SEQ ID NO: 27216 - DNA, 1000 bp, Bovine  19866880938740
  misc_feature (1)..(1): n is a, c, g, or t
nttattccagaaattcttccaggcaatgctttgttttctaaatttgttgctttggaactccagcaccaaattcacaacctggaccatgctgtctattagtggatgtctgggcagacatccagtaaagctgagtagcttcagtatcattagtgggatgatggtatttcagttcctcttcctttcattcttctttagtttactatcagtgccactgagcttaatggaccaaactgcctgctcatgcattaaaaacagagaagcacattctgtcacaggaaaaaaaaatgctatgttctaatttctatagcaaggagatccaaccagtctatcctaaaggaaatcagtcctgaatattcattggaaggactgatgctgaagctgaaactccaatactttggccacctgatgtgaagaactgactcattggaaaagaccctgatgctgggaaagagattgaagatgggaggagaaggggacaacagaggatgagatggttggatggcatcactgatacaatggacatgagtttcagtagattctgggagttagtaaaggacagagaagcctggcatgctgcagtctatggggtcataaatagtcggacagcactgagtgacagaactgaactgaactttctacagcagacactttaacacacataaagtaagaaaggaagtatgagaatatttatataatgaggagatgttaataaaaccatttgaaacattcaaatacagaatgtactgatttgtaaactgtagagtgccttcacaattaacatacattcatcataatatacaatcattcagtaatattagtcatagctactgtaatactttggtactacttatattaatattaatatactaattactaataaactgtcataaatgaccattgtgtaaaatgatattagggaatattacctagattttgcatttgaatcattatttcacatcatctctggtattttaagtagatcctgacttagaagtaaaag

SEQ ID NO: 27217 - DNA, 962 bp, Bovine  19866880994406
  misc_feature (1)..(1): n is a, c, g, or t
ntaaggctatattagaacatctttattgtcacttacctcactgcatgcctaacagatagacctttaggaatttttgagttgtggcatcatttggtacatcaaagtaataagcttggatttctaacagctcatatcctgtgatgtacttctgctacataagtccctctacatagagttaccttaaagtggctcattatttagaacctgtgtaaagaaagtatttcctctggacaagaaaaaagtttcattgtttaatgcctcccaggtgtgtgggaaaggtgaaaaactacggctcatctgatgttctgttcatgatttggtgggcttattagttccctgaacgaagactcatctgccctgcatttccatggtttaatttaatggagagattttccaataaaggtagacagaaataaatgcattagacaactcatgcaaaaggaaaaggatttaatcatcagggtttttatatctttgaaataatatgttgtttcaaataatctcaatttctctagcttaagtttattattcttttatctgattcttactgccatctggttcatgtgcaagtgtaaatcataagcaagaaaaagcagagctaattttcagtgttggcttaactaacaaaacctgtgtgatatagatagttatcattaaacatatctatgatgaaatattgatctgaaatcggttactttttcaatgtttagacatgagatgataataattaggattacttgaaaaagggtgagtgtcaatctgtagtgtgggaggctgtattgactttggaaaatgactgtaaagcaactaggattttctacacatttcttatgaatgactttttaattctttcatagcataggctttattaactgaaaatataataattaataaattacctgaactttctcttgcatgtgagtagcttcacataaatcccttgaaggtataaaatgtagcac

SEQ ID NO: 27218 - DNA, 1151 bp, Bovine  19866881003981
  misc_feature (1)..(1): n is a, c, g, or t
ntgtttgctctttaggttgacagggacacttttatgaaggcctttatctcctttagacttcttgctgtactaacttgtcttgattagagttcggccgcctccataagtttccttcgaaacatttttattgaagcttattattttcactacttttacatggttagcccttctatataaattctattctactcaatcataaaattaaataagaagccatttaaactccaaattagtcaagctatccctatttctagagctctggatcctattctcctactttttgctcaggagacatatattagataacaaaagacatttgggtttttggaatattagtgaaagtccaaattcctcaacataagtagcatatataaaagcaatcttctttttctatctgtattttttttttaaattatactttatcaaaggtgaaacactaatagccaaagtcaggtagagaaagcagaaaaatggtgtatacctccacactctaatggagggaggaggactatgattctgtttgaatagaagagtttgccaagagacaaaaccttctccagttagtataatggatatcagccaagttttcaaggaggtagacagtatgtcagtacaattttgaccacaagccaaagggataaacctggggccaaataggaaagaattcctcactactctagaggtccagaaaaagaaaggagacaatatcttgagccagaagttggaaatgggaaaggttaactagaccagctgcaacctttgaagttgagaggtccgcagagtaaaggagaatgatgacaggtgtgctgtgaaaatctgtactttgaaaactataatgcttggtgttttagagaaaaatacaccaaatataaaattacttgtagtaaagaaaaggtggatgtgagagttggaatataaagaaagctgagcgcagaagaattgatgcttttgaactgtggtattgggagaagactcttgagagtcccttggactgcaaggagatccaaccagtccatcctaaaggagatcagtcctgggttttcattggaaggactgatgttgaagctgaaactccaatactttggccacctgatgtgaagagctgatttgaaaagaccctgatgctggaaacgattgagggcaggagagtt

SEQ ID NO: 27219 - DNA, 826 bp, Bovine  19866881017058
  misc_feature (1)..(1): n is a, c, g, or t
nttgctggaagccaactataagatactatgcttatgagaaagtagggagaaagtagagaactatgcaaatgtcatggtatttattttaaaataactcaaatagattctaaaacaaattttctgtgtgctttcatatatgggcatagtgatctcagttctttaatcttttcttcaatttaggagtttttatacatcctgtcctctgttattctagtgaacatttaagacttacacctcaattatataaaattcagtgtgcatttgatatagtatcattcttgaagtgatcattttaaaatgaaaagtcaggtggaaaaaagttaatatgtattaattttttatttaaaaatatacagaaataagaaataaaaaattaacttgctttgtagagtagataaaatgctttatgtgaatgagctaaaagagaaggtcatataactattagtgtactagatatggccatttttcatttgttagacagaactgacaatactttataaaagctaataacactctaatgaaggaaacgtatagagtttaatgatgaagcgtgacctttttgagcttaatggatagagttgaaccttggcattaagctcaaaatcatttgaatgtgtaaaacatggtgttaatatctaattttgaatgaattttggacttcccacaaatcccttacaccactttctgagccatttcatcaacagcttgctagactgcatccagttcaccatctgggaagtgtcacttgctacaaaataaacctgctccctggatgacagcaggatacctaagcatctgctgtttcataagctgcacagaacaccca

SEQ ID NO: 27220 - DNA, 1791 bp, Bovine  19866881044018
  misc_feature (1)..(1): n is a, c, g, or t
ntgataattaagtgttaatgcttagcaccctaatgatatctgttaaataacttacattttggagccaaatcctggcaaatggaattctattaaaaataacaaaatgcactgaatataaaaataaatgatgctaatctgccattaaaccacatatattttctgatttgcatctcatatgagagaaatctcctattctctctttcctaccaaatatgcgaaaccagtataattagccatgcctatttcagagtttttaatgcttgtggagatttataaatactcaaagggaaagcaaaataataaaaagtagagatgaaggtgaatatcattttagaatatccattttaaaactattcatttgaaagtacattttctaaattttcaaaaaaattctcaacttggaaaatatatcaaaattgtagctttcaaaactttaatactttctatgagtcctcattctctggcctcatattttcacagtctatactatatagagagtaaatatttccaacttttccagtatcatctggatttttcaatttttaaaactcattttaaattcctaaaatgcatattcttaatctttaattattactacatctattgtgacatatacatttaagagcgtgactagacattcttaattaggttctgtacaatgttaaatattaagagacaaatagaaattgttactgttctttcagaatgaataagaggggaaatgtgttctgtaagtgtgaggtcatacttctacaaaggcaataaacaaagtgttcatgtgttgcttccttttggaagtggccaagttgcttcctgatgcaaagagccaactcagcggaaaagattttgatctcagccaactcagctgagaaagactgagggcaggagcagaaggaagcaacagaggatgaaatggttggatggcatcattgacataatggacgtgagtttgagcaaactctgggagatagtgaaggacagggaagcttggcctgctgcagtccctggggtgacaaagggtcagacacaactgagtggctgaagaacaataaaactgcttcctatgttgaaatgaaacaccacaatatcttattcaatgagtgatttttggtttctgatctgcactctgaactcaacaatcaaaggaggaaaatatctcatctaagggtccatttctgaaatcctgttttttctttttcttactttctcttagacatcccacttttcactgttttgttatctatatggttaaatatgcacaaactcactgactagagttctctgaaagaaaacaaaatgtctcatgaaattcattttagagagagacatgtatgaatgttgatagtagtaaaggaaaagtcacctacttagtggagcaaataaaaatgaggactagaaaccctcattggatttaattgcaaaaaactccttaatggcaatataaaagggtaatatttgagtatctggagctatgtcacactgcaatgggctgaagtgtcaattggagtaaattaaatcacaaggaaattaaaaatttgaaaattaataagtaatttccacaaaacatgactaataagggagaaagagatgtagggtattaactagtgagagacgttataattgagaactattttttaaatagagtgtatatttgtttaaatgtgtttagatgtgaaagaagtattcaggataaattagttgaagattagcaggaaaggagaaaggaacgatgaaggtccctgaagattcaagtaggagaagatgaaactcaaaacataaatggagatactg

SEQ ID NO: 27221 - DNA, 1169 bp, Bovine  19866881086555
  misc_feature (1)..(1): n is a, c, g, or t
nctattactatggtaagcactttatatgtatttgtcaccaagaactgtgaaagcgttccactgtatttataatgagcaatcattttccctagattaatgctcttgggacaataacacaatcagcataactgttagataaatattctaagtgaaacattaatccattttgcatgaaagtcagccttgttataattaaatttgtcctaacagctttagaaatctgtagatcattttagtcttcaaatacctcccttttatttttctcttactcatgctctctttgactgtaataattttcttgtcaccatcaaatccatctaaagatccccaccccttccctggatctcacgaatagatagtataacctgaatcttcaggtcttcagatctttgtaccttttctcatattctgtggcactcaagtgggaacaatggttttcacatccatgcaagttaaactgttcagtaatatacatatttctgctgctttgaattgtcaacatcattctggaattttaaggaaaaatcactttcatttagttatttgcagtctgtgtgatcagggtttattttaaaagtatgtatagacataacaaagaagtaaaaatcataatccacatggtggaagaaaagtatttgtttcacatctaattaacaaagaattagttaacacaaaaattaaaatatactaaatattttttagctacatactaataggaaaatggacaaaagttacaaacaaacatatcaaaacatgacacaaatggacaataaatatatgcaaatatactaagccttaggtatcaaaaaatttataattaaaactacactgaaacagtattctgtaggactaatttggcaagagttccaatttgtaagactataaaagtctggcacacttatggtgctcaggatctctcatatactgcttgtgggttaaaactgatataattactctggaaaataatttagtgacatcttgtaaacaagtaaatgcttgtgcatctggtccaggaaacaagggaaaaacactagagaagcattgtttttaatgcaatactaatagaaaccattaatgtttattgaaagaatggttaaataattttacaaaaacagggactaaaaaataaaccaatttggaaactgtgtgtgtgtatgtgtgatgtgtgt

SEQ ID NO: 27222 - DNA, 2295 bp, Bovine  19866881215354
  misc_feature (1)..(1): n is a, c, g, or t
nctgtcaaaactccctgtcttcggtccagatcaaagaaaggaggcattcggtccaagctgataaacaatatctgcatttttcccactgtctttcatctgtggcactaatagttgttaagtataacccacgtcgggtgttttcagaaactgaccaggctcaattacaggctggttgaaaattggtgggttgtcattttcatcctcaagcttaacccttaccagagcagtctgatttaaactgggcttcccagaatcagaggcaacgattttaaagctgaattctttggtgccctcatagtccaacaaagaggaggtctctaacaaatattggttgtcatatactgccttcaaatgaaacgggacctctctttcaataaaacagatcactttgccattcacatctgtgtccttatctgaaactgtaattagggcaatctttgtattgacaggatctttctcagacaaatacacggtgccattgatgggacttataatgtacctgaggtctatgttcggagggttatcatttacatcagtgacattgatggtaaccgttgctctagcaggagtagagctgccatcactagccagtactgtcactttgtgaatagctgtctcctctcggtctaaggacctctgaactgtaatgagcccagtagtattatttaaagcaaagagtcttttggttgcaggcgcaacctgggcaccaaaaatgtaccggatttcagcattactgcctatatctgcatcagtggcatggagctgaattacggaggtgcccacgggagcattctctggaatgtgcacctccacctgaccctctttaaacactggcttgttgtcatttacatcacttactgtgacctgcaggatggcggtgctggacttttgtggggtgcctccatcctctactttgattttcatcacgtaggtatctttctgttctctgtccaagttttgctgaacaatcaattgcggccacttttctccttccggagtttccacgatatccagtccaaaaacactctgcccatttaacaattcataatgctgtacaccattgaagcctgtgtcaggatctgttgctgatggaattggaaagcggctgttgatcaaagtgttttctgggatggaaatattgatgacaggagatggaaacatgggggcattatcattggtatccttgacaattatttttattttgatcagcctgaaaaaatcattggggaggatcaccacctcaagttcaaagaaacactcattctcctcagcataagaggctccagcacagagtttttctctgtctattctattggaggttgtgaaaatttccccagtgctactggatactttcaccaaaggggcatccccagctttagaaaccagtctgtagacaaggctggcactggtccctgtggcagcattgatgtgagaaatgttcagatcctttggtatgtttcctatgggtacattttcaggcaattcctctctaatagtgtaaataagttcttgagctattgcggaatccagccttaaacaggcaatcagagcagccaacaggtaaaaatccctcaggtccatgataatgtatttattttctttttcctggacttagggtttaaaggtctccactgaggaatgaggcacaaattgcaaaaggaagcgtgcatggactggaggatgcattacatctcatcgcttattggagacagccactgtcaacacaatcgtatagacaacattattcttcagtaaacaaaagcacacagtcatgaaatatcacaacacattttccaccgcatattagtaaacatggcagtttgctctgccactgtttgcaagttaactctgtgaataaaaacaccaaatagcccctgcttgttgcatttgcccagagaaaataaaattatctacttttgaattaagggcaactgctatttttacctgcattcacccacactgttggtaggacactgtttaattcaaaacatgcgtccttggtttcctcttcccccctcccccctcttacccatctcctggcttctaacccacctcccttagttttttcaggagctagtgaaaaacaccaagtatttagctatggttcctgctaattgctttgtcacatgtcaaatgtgatgtgttttcttctctgccagactgagtcatctctttcttctaaacaatctttttttcttccctcccagtttttcagctgccttctgaatacaattttactgggaagcaagcattcggacatgctgctgcagcatcagaagcagatgtcaccggcca

SEQ ID NO: 27223 - DNA, 758 bp, Bovine  19866881220691
  misc_feature (1)..(1): n is a, c, g, or t
nccgtaagagacattaacataatccttgttttctagatcagaggctttcaaaggaaggtctatgaaaagcataagtcaaaagaggagttcctggggatttattattgaaactgaagtcatggtaaatcaaacttgcaaatagtgaaaataattttttacctttctacttagagtagctgcatagagagaataatcaaaaaaccactggtttcagtgtttatgaaatcattggtgtcattaagcagaaaattttgagtacagtcatagaagaaagtcacattgcaagaggtttgggagagaaagaaagaggacctggtagataaagcatattgatcatttaaaaaatatgtttgtgaaatgaatataaagacaactgcagaatactggaggttaaaataatttattagcttgttaaaatgggatggaatttgaatcgttgtgggtaatagtgtaatggaagcagtataaagtgaacattccataaaaataccctaaaatagagtaatgaacagtgagaacacaaattggctctgtaagtaggtgtaaagccgagtaatgtaggttaatcttggaaagtaggagagacactgtactcaggctatttcttttaaagttaccaaagggacatagaaagtgactgtgaaatggagcaagatcttatggttcttgtcccctatgccctccgcctgtcttttgtctgtggaaaaactttagccaaagaataagtttatcagagaagtagaaagcagaaacaaagg

SEQ ID NO: 27224 - DNA, 732 bp, Bovine  19866881241733
  misc_feature (1)..(1): n is a, c, g, or t
nggaagagctgatctgtagagctttgtaagcaattagaaaggcttaggcttttactttgattgacatggagatctattagctaggttaaaagggagaagtaaaacaatttgatttacattttttaaaggtcacactgactgttggtaaagggagcaggtggagcagggagatgaattaggaaactatagcagcaatctattcaagaatttgatttcaatgaaagaggttaggagcagcccaatttttaatgggatttgaagactaactcaacagtattttgtataaattagatctacagtatgaaagaagtagtctaggtttttctgttgaaattgggaagaatggtgttttcattaatgtaggtacgttagattgcaccagaagaaggtttggcagtatgtgtgagatcaggaatttaggactgggcttgttaactttgagataacccagggaaatgttaattatgagatatccactaatatcaggcaaatgttaaatgaacagatagatatataaattcaagtgcttgcttgtgagtgggtatgtaaatctgagttgattgtattgaaagctttacaacaaatgaaatatatttttgcatgcatattcagtcacgttcaactctttgtgaccccatggactatagcctgcaagcctcctctgtccataggatttttctaggtaaggttactggagtgggttgccattttctactccaagatgcatctcta

SEQ ID NO: 27225 - DNA, 907 bp, Bovine  19866881252037
  misc_feature (1)..(1): n is a, c, g, or t
nttcagttttgctcagtgatggtaggaatgcagtcatttttgcctgtgttttaagcaaaatatgcagaacaagaatggaaggaaatatatccaagtggatttgatcgccaggaaaatacaggaaaaattaactgtagtcttattgtcactaatcctcaagactcttatcacaactttctgaaaattcctgagctctagcattaatctccttgaaagggagacactcaatttacagtgtattttgcatgtccctaaacaagtcttgaatgatgaatttcactgtctgactgaggtggtttacctcagcacataatttcttatattaataaccttccccacaggagctgaatgaccttctataaatacaatccctcattcaatcaaaaaattaaaacctgtgaccacctcacaattcatcattttttttcacaggcaattgttgaagcagaaacaaaacacaaatccctaatcctcaacccatgtaatataaaatcatgcagccttctgcacttatgtaccatggatatattgaaaattacgtagccttttgtgtttcaaatcaattctattgagtggatttctgtttatagtgagccacagttttcagggcaaaataagagctccttttccaaaatcaatggcatcctaaaacaatagcttcctgaatgtttgtatattttcaagtagtctttaaaaaaatgcatctttatatgactgcctcaacaattatggtaaatttagattatagggttattcttggaatctgcaagacctttatttacataaaactatcagaatgaattttagagttcagtaatgaatgctttctctttgggtaagattgattaaagtttgtactgaatttcactctgcattaaaagcctaaaaaatatacccaactaactaa

SEQ ID NO: 27226 - DNA, 819 bp, Bovine  19866881312185
  misc_feature (1)..(1): n is a, c, g, or t
ntttttttccagtcagatggaaggactactgtgaagagaggaatgatagagagcttccaaataaaaaaatcgttattgtcccaatcacattttttttcctagagaaaaatgatgtctttacttatttttggcagatagtcaacattatccaccagctttggtgactgtcagtgcagcaggtcggcagatggattggatgctggggatcatttaacagacacgagttcaggaagaataggcagctgctctgagacatacccacaccaggtgaggacgtcagtggagagaacaatgacttcatgggtctttcttcttggcaaaaactgttatttggcatggaagggacaatttcaatatgctgattgatgactgactgtaccatagaaacacatacatattacagaggaaagtttttatcaatggatttccaatgcattaatacaaatttctcaatggacacatttgttcaaaaaaatttgatctcttagatttgcactggaaactctaaggtatcatcactgggatcagtgtgacaacatgagggtgcagatgatttttttataatcgtaactgtttaatccctcttaatttcctatttatggtgcagagcttgaacatatgaaaatgcagatacaatttatcatttcttttgtgtgatcaattcctaattattactggtttttagattatttttattatacactgtaaacagctttaggaaaagcatattaaattaaaaaatgtgtgtgtgtgtgtgtgtgtgtgttcgtgctcagtcttgtccaactctttgtgaccccatggactgtcacccatgtg

SEQ ID NO: 27227 - DNA, 906 bp, Bovine  19866881348815
  misc_feature (1)..(1): n is a, c, g, or t
nattaatgaggctttgctcaagcaacataacatgccgtcttttgtaattttaaaatctttcaatgtcttactgctcttgtgaaatggctttatagtaaggtaataatccaaggaagaaaccaatggagaagttataaagcatggaatattggtatttgaagtgtactttctgagggtttttatttctatgcatgcccatagcaactgggtcaaaaggggtacataaaactacataacatccatgaaccacttaaagaaagtgttgtaatgtgcagaaagctacaatttgtggtcttcataaaggtagttttgtactgctgttccttggtgagtaatgacctataactgtatccagtttatctgtattatattagagagcttagtagtaattgcttataagacaatttataactggatgtgaggaaatatatgaccttattcatgtatgtatttatttatttagcaaaattgagttcatactcatgtacccagcaccctggcacactcaatgctcagttcacagaagtttgctctgctgttacacatttagaggaaagctgctgcataattttgacataggatgctattgcttaatttttaactaaattaccaaaatttctatagaactataaaattattttccttttactccaaacgtcattaagtattatgttgataaaagaagcataaaattcagcttaatgtagccccttcaaaaactttatgattcttttgggaatatatctttatctccatctcaagctctgcatttatcaattgtccactaaaaaaagccttgaaagtcattgcctagaaggaaagtatgcaattttcaggtatcctcaggaaatgaacaatatacagagttgctaaatatttttagtaaccaaagatatttatatcgat

SEQ ID NO: 27228 - DNA, 1299 bp, Bovine  19866881548182
  misc_feature (1)..(1): n is a, c, g, or t
ntctcagtaatactactttgactgtgtttggttttttctgtagtaggccattaagataaattggagaattacacatagtttggggataatatgtaaatatagattttttaaagtcagacactggtaattttgattgatggtattatttattatcaggataagttttagaaagctaattaaacctaataatgctcattgattttattggcagcctattcattcaaagataaaatataagtggaaaaaacaaataatcataactgtttatgtgaaggaaaatcaggtttgggaataaaagaactgaatcacaaattagctgtagcccccatacatactacctgaatgtcaaacaacaagtaatgtttgtttagaggaatataaactagaactatgtcttgccatagcatagcctacctagcacattttctccagaacactccagaaacttccctacaaggacgattctgaaacctggacaggagtctaggaatacttgctcctgtagtattgtagtgatttctgaacttcaaaatatacttgcatttatcattatttactgcattgtgctctttcatcttattaaaaactttaggaaaactcaatttatccatattttcagtggaagtattacaaaaatattatgctgtaggtggacaggtttagaagttactttgcaagcttgaaaagttcatatagatggaggaggtataattacagagatgccacatgttggccacaagattttttttttttttttttttggtttttcatcttatgcaacttcatccaatgctcatattctgaatatacagcaacaaagatgccttccttaaccatatggctagatgcttatgatctgttttctgaatattttttccctggatgtaaggtcaaatggaggtttttttaaaaaaaaatccaagcctatttaatgtctaatacaggtgacagtgaattataaagaatttaaaagtgttatataacaaacagattagtatcaaatgaatgccctgtgatttttgcataagaggcattttagctattttgagcagtaactgatggaatgagatgtaagcaatctctggcaaggtgagaagctggacaggccaaggcttagaatcctttttcagagctttgtcagagccaggcattctggggacaatacagtgaatcacagctatatgattaatcaaatcagttctctattgtaaaaagacaaagagatgatgcccacattggcatcagatttggaattggatgcttgtagatgaagaatttgtgtagactgtgccttccaat

SEQ ID NO: 27229 - DNA, 1501 bp, Bovine  19866881604028
  misc_feature (1)..(1): n is a, c, g, or t
nctctcaaaaacatgaatgatttagaaatgatactggaattacttgagcctggtggtctattatattcagttccagatagagttctagtctgcttctgaaaaataactgatatgagttttaaaaagcaagttagtgagaaattgtgaaatatctgataagctgaaatgggatgcccaaaatacaaaattaaaagtcaaaagtacagagagtaagaccctttcgacgaaaaacatcccttttaagtgaatacagtgaaaacgggatacagagaaatcattataggatagaaaacatttcttcgtatagcgtgttactaaaacaaaatagtatttcttgtatattctaaactagcaatagattatttgcttttttatgtgttatataaagaggttttttttgtcattttatgtttctgttaaatttttattcttttctactttacatttctcttaattcaatacaccaattctttttaaattggttccataaaccaagatatgccttgagcaagatgccaaagtacatgtgtgtattcattgtgtgtctttttacttttaaggtcacaacaaggccaaatgagactggtatttcttttgtcattcatacaaaatgatttcctgtggcgattcagttattttcagagtgaactaaatttttcatcagtgcctattatagtgtaaatatattttctagcaaaaggtaaatcaccagtaactgcaaataaaaacatcatagaagaggaaaccgggtaagcaaaggaagtagatatttaaggattctccgcccacccaccaccccccgctgccaacaaactgacttaattgtatgattttatcaacacatattgaaggttctaaggcatttctaagtataaaaatgcacagcttcggtaggtgaaaaactcaccattttacaaatagaaaatatatttaatcaagtgtttaagggtattgtgagaaatggcataaagtagttttaaaatgttgtgtggaagggacagctgattctgttaaagaagaaagttgaaaaagggacctaggactggggcagagggccatacatacacgaggactagcagggtaagtgtggccatgacagcagatatgagagcccacagagcagttccagcagcctgtgatcagctctacttgggcaagtatcaggaatgcggtgaaagtaggatgttcgctttatctcagccacttaaaaagaaagagaaataattatgtatgcatttagaaagaagacatcactttattgccttagtcctctaattagcgtctcaggtttattcttcctaggaatttaaaatgtacaaccttctcatcctcccttgctcatttctaaattataattttgaaagaggttcctccaaataaagtgagttttaatgtaccattaatgataattattttttcacaatgactaatagaagactttattattattgtttcccttggtgtgaaaaaagggggttgttcttgtttaaagaatatgaag

SEQ ID NO: 27230 - DNA, 1153 bp, Bovine  19866881675755
  misc_feature (1)..(1): n is a, c, g, or t
ntgtagtgtacaaaagtccttttaataaggacaagttttgtgttaacactgttcagcaaatatagatattaagatgcatccctatacatatcactaaattcccattcaacataaatcactagcatgggaagaaaaaaaatctatcaattattaccagtaatcattttattaataaactgtcaaaataacccactgaaacattattttggttatttacaatctaaactatatccgctaattcttgagccaaattttttttgtgtatataaaaacttaatttgaaatcaaaatagaaagatattgctacattgaatttctttatctattcttcactctatttgaaataatacctcgaattatcagtttttcattgggaaattttttcctataattttttaataacaatgttttgtgtagtgccttacaatgaatcttaagagttcattttatgaagtagtaatagaatatactgcattgtgaatactacctacagaataacgatattatagtaacgggtgatatcaagtgtttacacttataattattcatatattgtaacacaatagggagattattttaagccacattttaccatatttagcctacagttacaaaagacaatttgtttggattatgtaaaaatgtggctattttgcagaaataaaactgaatataaataccagggtagttgctattttttagttgaaaacaaatgttttattttctgtaaggttcctttaataataaaagacaaaacagaaaaagaattaagcacatccacttatcttagagtagtgaagtggggaaagggacaaggcaatgatcattctctaaaaattacatgggcaataataattgaaagattcatttgcatttaaataatgaacaatgtgcttatttgactatgtctacagaagctgcctagtaatattagaatacaagcatagaatgattaggagcataatatcattttctttttacattttgactataaaagcaatataaagaaacctgtcagctgtgaactgatattgcatttttatattattagaatattagcatatgcaaaacaagcaaaccacgttaaatctcctaaacctccccagtaccaattgcccaccattttaatggagcagcaccacatgtcaagcac

SEQ ID NO: 27231 - DNA, 931 bp, Bovine  19866881803406
  misc_feature (1)..(1): n is a, c, g, or t
natgaaaggggccctaaaagtcattttatgaattgtagagatttagaggaagttgagctcattcaagtcagaggtaagaaagtttaaagattgaaagatattttaaatgaaccttgaacagtgattgacaattggtagtcttttatgtgtgggtgtgtgtttttcttcttttagtactccttttgagagtcactgaaatcctttttagtattcttggtatagatctatttctctcccatatttccttttcttccctgtttactcccccatagttatgaacattctgtatcaccctttagaatcaatgttcttgaactatagcaatataagatggtgatatgatgctgaggctcagcagagagattatatattgaaatcattttcaaatcagatatcttacattagaagaaggctgaaagaataaatgttttgtcacaacttgtcataaatgtgattacagattgccacctgctttggataacaagtgattttctagagaagttgtctacaacatggttgcctttatcagtatgttttcttctctcctggcattgtatttgtcatttctaatacaagcttttgctatctattgcagtaaagcaaacaatttgttttctgcttgaaatagtagggatgtgaccccaagctccaaaagacagttctgcctctttttctttttccatgaatgtattggaaggagtgtggtttctgactatttcatacctatctatatttcctctctatattgattgcaatatttttgctaacaaattgggttataaatataactccagacagcagatatgttctaagtttgattatagcagaataactatattttgtgacaggtcagaagaaaagaaaaaaaaatcctgatatttagataaagtgggtcttagaacttccacatgtttaaaaggctgtgaaggca

SEQ ID NO: 27232 - DNA, 842 bp, Bovine  19866880389079
  misc_feature (1)..(1): n is a, c, g, or t
nctcaaccccgcaggaccaagtacagcatgttcgagcccgagggcgtcctggccaacgtgctgggcctgctgctggccacctttgccacggtcatactctacatcctgacccgcgccgactggaagcggcccctccaggcggaagagcaagcgctctccatggacttcaagacgctgacggagggcgacagccccagctcccagtgacgggcgccccatcctggcccctcctgttccgggggcccaggcaggtgtccgtcccgcaaccgccgctgagggtccgggcagggctgggcacagcggaggtaggggggaagtcctctctgagcgcagatttttgggattcaggccccctccgcttcccgctcctcgctgctgctgctgtcgttgttagtcctgagcacgcgttccggccccccccgcccctgttgccacccgacttcctccccaagatggagcagctttgggaaaggctctgggcctaaatgggtacgagagttgggggcgctcccttctcgaggccgcagcgaagctgagacttgctttgtgtgaccccgaactcctgccaggagtcttgcggcccgaaggaccggctctctgaaagggcccagcctttggcagcggagctagtgacattatatgtgaaatatgctgtgtcagggccaggttccccaggagaggggagggactccctgggactctctggacccaggctttggcacagctgcgttctggagccttccctttctttaaccctttagccccgaggcggctttgccttgggggccgtagactgggacagacttgccgtagccgcttcagagggcagcccagagaagagg

SEQ ID NO: 27233 - DNA, 1013 bp, Bovine  19866880420199
  misc_feature (1)..(1): n is a, c, g, or t
ntagaaactagcttttctgtatctaaaaggaacaaagtagcatcctaaaatgacacagtagcacattgttaaaagaattcctgttttgaggtattatcatgtttcttggacattggaatattatactctgcatttcttcatgcaaattttggtataataaagtaaaataattaaatgcactaattctctattcctgcattgaggtttggaagagaagagaggtcttttctttttcagatttgcaaatcagatttagtgtggggggactaatttttcacttcctgattgcctatctgacatctttaatctaatctagtgattgttactgtcaagaagcaagggagctgctgttatttagaatgccagtgctgaatcattatgaaaaaccttgtccatgttattacttatgtatattttccacaaacatgaatcttcactgaattggaattgaagcaaactaaacctcaattaacattttcagaaaaccaggaagaaactaaaacacattgccaaaatgttaattgccacactctgcagtctctccttttcttatccgaagcagatttaaggcatagaaacgtcttagtgatttgttcttttataataaattctgtgaaaataagtttctgcggagataagattagtgacctgggggttgaagctgtaatcctctacatagtaccaaaaattaacaataaacaagtaaatttagtatactcataaagcaaacaaatattccattctttctgaatttctcttacataggatatactaacagaataatgatcatattaatattttatgatatactcatacataatgcagttaaaactagtgatctgatatcttcctttatttattatcacatgcaaatttggagaaagagtatatgttacagaggcaacaagcataagctaaaggttaaatgagccctggttctctcattttagcatgcttctctggtggctcagtggtaaagaatccgcctgccaatgcaggaggtgcaggttcaa

SEQ ID NO: 27234 - DNA, 1084 bp, Bovine  19866880502684
  misc_feature (1)..(1): n is a, c, g, or t
ncaccccccagctacaagaaaccagcctaatgcttagctctccttatcactgtttcccagagggtgcttgagaaagagacattctgccctcgtcatgaagcttcgacacaggtattctggttacccccatttcacaaaagggtaaaccaaggctcagagtggttgttacttatacacagtattgctggtaagttaccaagccagaatttgaacccaggactgtattgcccctaagccctcactctgccacacagccctgacatccacaggccacaccccctttccaagggctcacggtatttttttttatatttaaatatgtatttatttggctgcaccgagtcttagttgtggcacgcaggatctttagacgcgacctaagaactcttagccgcagcatgtgggatctagtttcctgaccagggattgaacccaggccccctgcattggagcatggagtcttagcccctggaccaccagggaagtcctggactcacagaatttgtttcggcatgaagttacacccctctccccacttggcatgttcccgatttgctgggacaagccatccaaggaactgtcctcagtgagaaggctggggaggtctgcagctaaagggggctggccattctcaaatcattgggcttcccttgcggctcagctggtaaagaatccacctgcaatgcgggagacctgggttcaatccctgggttgggaggatcccctggaaaagggaaaggactcccactccagtgttcttgcctgggtcgcaaggagtcggacacaactgagtgactcactttcaggttttcactttcattctcaaagccacgggacacgcagcgttgtccccgaggcaccaggagggggcgcccgtgcctagcctgccatgggcctgccctctgtggctgtcccatccctgcccacaggtcagtcacccacctgttcatctgggcctggagctgctctagcctggagcctagctcccgaggccagcagtctgagtctccctgagggttttgggggctctgatttggcctggggggcacctgctgcagcaactcaggccagaggccagatgcgt

SEQ ID NO: 27235 - DNA, 1052 bp, Bovine  19866880566679
  misc_feature (1)..(1): n is a, c, g, or t
nacatcctttgggaatgacttctttcttgcctcctacactcataatccttcaatgccagtcaacttactgatactggatataaactaataacattaaaagaaatctaacaaaatgacccaggaatacatacttttgcacttaagtatcatttaacatattaaatcttctttcctgaaaaatctttaagagataaaagttcacttaataaagacacagtttgatacctaacaacttgatctgactgtaccatacatactgcgagatcatgttaaagtcaatccacaacctatactatagtgaatattttaagaagttggagaggtaaacatggagagtaccatggagaggttaacatctaaatcagcagttaaaaataggtatgaaaaatacaaatcaagatttcaaacaaaaaataagtacccttactgaactatgaaactttcattattctaaaattacaatatctccatctggtaatctgacatgaacaagctgataaatgcaatcagaacaacagtatattctcgcaaaaccagaaatttcctgaaagcctggaaaaatatgtccacaacagatggatcatttagaaaataaatacatcaatctgtcaaaaggagcactagtctaatttcctaaatgaaaatcagtgggagctctactttccaagagtctgtgacattagaaaggccaaagaggaaaaacccagagatgcacataaacagatttgctatgagctagagtgcatactgtcaggtttcctgtcaaacatactcaatgtaggtaaagtccttaccagttaacttcttcacaggttggagccgaacactgatagactgatgtgtgagtaagggggaggatggaagagagcgagacatgccctccataatccgaatgtgctgcataccttcactcacgggaagtggtgggacggcgtagtctggctcaaaagcacagtcgctttctgtggagatgccacctgtgaaacaggagaagacaggacaaaagagctggtgagaagaggttcatctcctaaaatttttctctattaaaa

SEQ ID NO: 27236 - DNA, 547 bp, Bovine  19866880604118
  misc_feature (1)..(1): n is a, c, g, or t
nacattgaagggaaggatatgcgtttggcatatcaaacaccccccaccctgctccattcgaagttagtaaagggtccggccactcctgccaccgaaccagggctccagatcatgccccaacccaccgcacacactcactctggccctcgaacttgcggatgatggtgtccaggtaagtgttttggggtgcgacgtggcccctgcggaccggcatctttcggccgcggcctctgcccggagccagcagcgctccggctccctgcttctccgcctgtcctctggctcagctgcgtccggctccggtgggcgccgcccccggggagggccgcagggcttcatgccccgcccgcccgcctgcgtctacacctctgctgccctccccggccggccgctcgccctgcgtccttccctccttggccgcccgggagctgtccgcgccgcggtgctgaaaggagccgcgcggcagcggcggcggggcggggtccgcggggcgggggcaacttttccgggactcagtggggcaggggcggggccctgactcttcagg

SEQ ID NO: 27237 - DNA, 1914 bp, Bovine  19866880640589
  misc_feature (1)..(1): n is a, c, g, or t
ntgatggggtcatacggcatgtacttgatgcataaggggcttctcagaaatgtcaaagacttctcacaatactttccagaaagaataaaactgcaagcaggactattctcataaacattggaataacatttctcctcttggactttctgacaggtttccatccatttctctcttctctcccatttggggagctggacatggttcaaaaaattccctttatagagcacctaattttgtaagttgcatatgttgtagctgcttgaaaatttactccacccacactccctattcacatacacacataaataagtttatacacttatatatatatataaccttggatcctgtttttgaggaagaaatgaattattttctacacatagctttctttctggtgtgctgatattaacagtagtaatgtagaatcttccaaagtgtgacaaaatgaatggtttcagtttcaaggtggaattttttaccacttaatataaaacattctggcaatgtctaccaatgtctattatcaagagtagggctctgcaaactctttctgtaaggaaccagagaggaactattttaggttttatatcacaaccactatccatcacaaccactcaactctctctttgtaggactaacacagccgtagacaatgtgtgtatcaatgagtgtggctgtgttccagtaaaattttatttacaaaagcagacagcagggctggacttggcccaagcttgtagttcactgattccctatctagaggataattatttatggcttctcctgttaggctgggtaagagctgaacctcccaatagtagtgtttttctaacagatggcctggaggttcacagctctattgactttccttatgtagatgtagttacacaataataaataactgaaggtcaccacatcacacagctctggagccatgcagtgcctggcctgtgtggccatatgcagcagcactgaatgtatttaaagtgtttttctgctgttccaatctgagaccagattgaagaagtgaagtgaaagtcgctcattcatgtctgactctttgcgaccccatggactgtagcctgccaggctcctctgtccatggaattcttcagacaagaatactggagtaagtagctgttcccttccccaggggatcttcccaacccggggatcgaacccaggtctcctgcattacaggtggattctttaccgtctgaactatcaggggcaaaggaatatgatgtgtgttcagttatttaaacatccaacatatttgttcagacactgtgacaacagccaataatatatcaattaagatccttgtccttaaggagcttgtggtttagtaaggtgtttgctagagctgcccaaacaaagtaccacaaactaagtggcttaaaaaaaaacaaatttgagacttccctggtggtccagtggttagcagccttgcaacacaaggggacgcaggtttgatccctggtctgggaactaacattccacatgccatggagcaacttagcccatgcatggcaactactgagcccacacgccccaactagagagtctgtgcaacacactgaaaggtcccgtgtggcacatcaaagatggaagatctcaagtgctgcaactaagacccagtgcagcccaaaaaccaaataggaaaatcatcactaactctgagtgttactcactcagtcgtgtcagactctctgcgatcaaacttgggtcttctgcattgaaggcagattctttactgtctaagccacgagggaagccctgtcactattattttaaaacacacacacacacacagaaagttattatctcagagttctggaggttagaagtctgaaatcaagttaagagctgggccacgcttcctcgaatgggaatccttcctagacttcctag

SEQ ID NO: 27238 - DNA, 1172 bp, Bovine  19866880642652
  misc_feature (1)..(1): n is a, c, g, or t
ntaattagtcagttcttattctccagtaaatatcttaccttcaagaccaacaatctaataacaaaaaacatactttttatcagatgtttcacattttaaaatctttactgtttttatatttttcctacatcttaaggtattaaatgtgaggaaacatgtaaaaagtggcaacattagggagagttggattttccctatttctttaactgtttttcaaagatcattgttcccttcctgaaaattccactcagtaatgactccaaagtttttctcaacaaatgttcttctctaagaccaatgtctgaaagctgaagtttaatattcaagttatttaaacactcaaagtattatttcccagagtaaagtaagccttttaccttttttatcctcacagtaatagaatacaatagacttcccaaaacactaagacaaatgctgagaataggaaacttttaaatagataacaaatgatagcttacatttattggggttcttattctttacaggcacagcgctaagagttttaaacatgttatttaatcctcataactctttgatgcaagtggtagtcgtaagggaattgggacttaaggaggtttataacttgcttagagttacaaagtctagtcattgccagtgcgaggattcatttcatatctggtagactctggagcctgtgctcttaatcacaatgctatcttatatcagagacaatataatataaaaatctttactataataatagcaatacaatagcgttattgtgcttagttcagtacactggggtgttaggaatgggaaacagttccgtataaacactaattgccagatagtggttgccaaggcctgcagggaatggaaaatgggcagttgctgttcagtgggcatgagaagtttgagtcacagaagataaaaagtttctaggaatctgctgtacaacattgtgcttattgttaatcatctcatatgattcagttcagttcagttcagtcgctcagtcatgtccgactctttgcgaccccatgaatcgcagcacgccaggcctccctgtccatcaccaactcccagagttcactcagactcacgtccatcgagtcagtgatgccatccagccatctcatcctctgtcatccccttttcctcctgcccccaatccctcccagcatcagagt

SEQ ID NO: 27239 - DNA, 1184 bp, Bovine  19866880672064
  misc_feature (1)..(1): n is a, c, g, or t
ntggaagatgaaacaggggttttcagtttctcctaggtggtttgttttaagggcttcctccgaaaggtggagagggtatcaaggtcagggaatgaaggggatttggtctcagtcaggtggtggccgagctcagaaatgaaccctgctccctagttctcaggacgccagtttcccatcttcacaggcgggctccagtggaagcgaaacccgtccattcacgttcagatatgctccgagtgccacgaggcggccttgtccaagccgcatcccccctcggggcgtctcccctgttcctcccagcaaagagaggagggggcagccagattaattccaagggctgttcatcactaacattttctcaactctgactccccagtacaactctctgctaagcaacatgagcaggatttactccactgccaaggtctgcttccccaacaagactgccccctgctggtccctggacccaggtaacgggcctgagtctcctgtctgtcttccaggccttcctgaccttccccgccacccctcggctccctgaggatggcacatttctgcagaggggggcggtaaacccaaaggcctgaacctctgatcaggaccagagtgcctgatgcccccacaccctgctcctccaggccgactgacttctggaatctccagcctccagccccgaccccgccctcacgtgtgcttttccttccccatcacaactggccttcatcgtcgccacctggttttcccttaatgggccctctcatccccccaagagtcctccacaggccttagaccccgccgtagctttccttacaaacctcctctactgctgacttcgaggcagcagtctctgaactgaccctgcccacctgtgtctcagagctcaccaatatcctggcttcctcgcgaagctacaccctgctgctgtatgcctgggagggctggcacaacgccgcgggcatcccactgaagcccctataccaggacttcactgccctcagcaacgaggcctacaagcaggatggtgagcacacccaccagcctctgtgtgggcactaccctcccgtcttctgtctccactgagccccgaaacacacagagcagccattacgatgactccctacacggtccaaggtctcacagatggtggaggccaaacgggcttagccccatcagcctcatgctgc

SEQ ID NO: 27240 - DNA, 933 bp, Bovine  19866880675036
  misc_feature (1)..(1): n is a, c, g, or t
nctcctccttgggcagggccgccttgtctacgttcagcagcttactcagcatgcgcttcacgtccgagtcctggaagttggcgatcttaaacatgcgggcccgcgtgccaaagtacagtgtgtgctgggacttctccacgtccttgtacagctggaaggacggtcaccatgtttgtcgtgtgagggtgaaggagagggtgagggtgtcacatggaactccagggcccagcccccacaacctccttccaaagcccctttaaagggtttggagtcattgaaactttgccaaaagcaagaagggagggaacctgcccgctacaggcaagcaggtgatatttacaagaggaaagaagctagaggttctagcccagacagctttcagggctccaggaggcctggagcctgacgtctgttccgacatgtgctttggggcttccctctctcatctagctctggaagagtggcaaaaggtgtgattccttggccccccagcacccctgcactgtgactcctgagaagaacaaagggagaaggggcaggggcggaagtggtgccacaccatctcctcttgatttttctttgtgatgttggtgacatagttccaggcggccgccatgaactggttccatacaacctgggctgttcgctcgtaaaactccaggaaggcctttgccacagtctcattgtagagctggtctgcagagaaggagatgggcgtcaattgtcctgggagaggcctgcccctgcctggtccctgggtctgatcccacgctccttcgggtcccagtcccacctgagtcctggtcaccctgagccacggcacaacagaagagcacgaggagggaagggccagggcaagtccatcttgttcccacgaccaaacgaacagcagagccggaggaggctgggcccaatcacggtccagctccatat

SEQ ID NO: 27241 - DNA, 1032 bp, Bovine  19866880699975
  misc_feature (1)..(1): n is a, c, g, or t
nactgttagtaattcacagctatttacatttcacaagaactcgtgttccattctaagagatcaggctcatcaattatttgcatttggtaacacgttaattatacaaataattagccttgagatgagacatcaacatgaaagtataatgaatagttttgctaattgctcttttctgttatggacagtccttgatccaaattattaccacctccaatgttcagcctgctaaactctaactttcacttcatggaaaagtccaaatcagtgatgacaattagatttctctgtcatgccaaccctgacctgttgattaggactctccagagcactgtgttgaaaagcattctgggggaacgaggcgatctgggcctcaggggcatcacaggatgatagatgagtctgttcacaaaggtgagcctaagttgacaataggtgagccagaggagctgccatctctagcctgagcattgagaaacttacttctgccttggacatcagttgttgttgttgttcatagcttcttactttctgttcccttgaacaatcctacaagtgagctgtattcttggctaggaatataaaaatgaatccgtcatggattgtcttctaataagaaaggcgtaaatggccatacaaatcaaaaagtactgagtgctctaaaagtaacagatacagtgacacaaagaatcagaggagaaaatggagcatttatagaaacagggaggctggggcagagtgtctcttttgagttgatccttaaaggataactagaaatggggggggggtgccaaagtgagaaaggctcagcattttttccttttttgggggtagatgtgaatcacttgctgtaacagtaaagaaggaaatgtgaaacaggggcgggtacaaggggaaagagttcaatgtggttggaatgtaggaaaataaaggaaggtaaagttgggaaacaagggtgggcccgggttgtgaagggcctgggaacaccaggttaggaattctctagaacaatgtctttcacaatagtccacagga

SEQ ID NO: 27242 - DNA, 1673 bp, Bovine  19866880722451
  misc_feature (1)..(1): n is a, c, g, or t
ntgcatatggtgactgcagcctgaaattaaaagatgcttactccttggaaggaaagttatgaccaacctagacagcagattgaaaagcagagacattactttgccaacaaaggtctgtctagtcaaggctatggttttcccagtagttatgtatggatgtgagagttggactataaagaaagctgagcgtcaaagaattgatgcatttgaactgtggtgttggagaagactcttgagagtcccttggactgcaaggagatccaaccagtccatcctaaaggagatcagtcttgggtgttcattggaaggaatgatattgaagttgaaactccagtactttggccacctgatgtgaagagctgactcatctgaaaagaccctgatgctgggaaagatcaaaggtgggaggaaaaggggacgacagaggatgagatggctggattgcatcaccgactcaatgtacatgaatttgggtcaactctgggagttggccatggacagggaggcctggtgtgctgcagtccatggggtcgcaaagagtcagacacgactgagctactgaactgaactgatcacttctttgttcactcattaattcactgttaaacaatatatttactgagtgctgactgtgtgccaggaactctatcaatcattaggaagaccaaggtgagcatgataggaaggttcttgtcctcatggagctcactcacattctagaagggaaagtggacagtaaacaagtattcacagataatacattgataaaagattaaaagtaagaagattgctatgaccagtaaagccaggaaggactttcttagataagtgacatgaggaagtctcaggaggtggctgttaggctgagaccggaaggagtgagagattatgctgtgtgatgacagagggaaagcatgctccagacggagggacctattaagtgcaaagaatcaggagtagaagagagcttagcaaattctaggaactggcacatgatcatttatgaccagaatactgtgactaacagggagaatgaatgaacttcattagagagggagacagaagctatctttgtataataatatagggttttgaagaatctggctttgattttattctaatcacaaaaagaagccactgaaggattttttaggaggaggttacacggtctgacttgtattttttaagaatcactttgggtgctggtggagaatggattgacagggagaccaattaagacgctaaaccagtccatgtgagagcctagggtgcagtcagtagaggtggaaataagtggacacttacaagcaaaatttgggttgtagaaccaactggatatgctgatggccacagtgaatacatgtcttacagttgtgggttcttatggttgggcgaacagaaggctattagtgttgattttatgaaatgtggagctccagctgcttttgaaagtctagagacagccaaggaagttgctccaaacacaaaaaaacaaaatgtgctgtcatatcccactaagctggcaggaactcctgaatgctgtgccatggatcttggtttgacaatctaggagagcctgcgggattcccatcttttcattcagccagtgttgcttcagagactcatttaacaggacaaatgagccctctatttcctatgctacttttcagtac

SEQ ID NO: 27243 - DNA, 1927 bp, Bovine  19866880766561
  misc_feature (1)..(1): n is a, c, g, or t
ncagttcacactcaactttgtggagttcaacctggagaagcaccgctcgggctccaccacagagattgagatcatcgcaccccacaaggtggtggagcggacccagaacgtcacccgagaaggtcacccagggtgcggcctgcaggccagggtgggtggggctgtgctgggccctacagtccctcctcaggcccgggctctggactcctccagggctgggtgaacagagggagctgcctgcccagcctggtgtctggtctgagctccaggcctcttgtcctgctagagtctgattcttcagacctaaaggcccaccctgagactcccaccctgactcccagcccccggacccaggggagggtaggtcagcagtgccacatcctaggcctggagaagctgggagggggaactggcaggacaccttgggacccgcccaaggctctgccagtcccagagaaggagaagcagagagaggaggtgtgagggccatactgagaagagggtggggagccccagccctgctcctgcccctggccttcgaggtgacagccagcccctaggacaggatgcttccgcagtccaggcagtggggaggaaacctggcatcttcaactcccttggcacgggtccctggggaacagtcaggaatgcctcagcccctccttggccagcccagggcaaactgccctgggttctctgttccagctgaccacactgtccctcctcctggggcctgatgccccagtccccagctgacctctccagagggaagtgcagagagcactgcctaaggttcaggggccctgccactgtctgctctgtgaccttgggcaagagacctgcgccttttctgggccccagggtcccatctggaggaatgacttgaaccacatggtctctgaggactcatttgacattgagggtgctggccctaggaggcactgagaggtgcctaggccagggctgagcaagggggtgcagggcaaggtcaggggcctcctccagctcccctgggactttgcttcctgagggaatggagcagctctttgcctcccacctcctttcacctgaagcatcctctgtgctggagcacgtgggctggaaactccttgtgacccagccactcaccaagtacaagagccctggggcagaaaagaccccaggctgtagggctggacccttggacatcaggcggggcgcggggggccagtgacctgggaagcccacctagctgtgcatctggggacctttcaaggttggtgacggggtgatgggggctgtcgggctggagagttgtgcatggtccctgccccagcccctcttggctttactaacccaccccatattgtccctaaggaggggaggagcctgccagagctcagagcatggcccagagcagggaagtcacaccggcctcaaccagaactcaaagggcctagagggctgtgagcccatacctggactcctttgtcctgacagccctgcacctccaaggtcattggggaggcccctcatgctggccccagaggcggtgggagactcaggagatctgtggtggaggaggtggcaccctgaccagaagcccccaggatggggacacgtcttctgaccccaccgtccgaattctgaccgcctccctccctctccatgtgctctgctgtttcctcctggttggtcttgagcagccaggggtggacatggccatgatgacccaagctctccgtgcgcattcagtcccctttagttgagcccccacgtggactaagaggggcatgcgggatgagggagctgccgctgtaagtcagtggagataactgtgctgtcaggacatttacagggagccgggagaaaatcaaaaaacatgggtcaggtctgtgcagggtcagaggaaacttcccagggaggccaaacaggagctaggccaagg

SEQ ID NO: 27244 - DNA, 1673 bp, Bovine  19866880773038
  misc_feature (1)..(1): n is a, c, g, or t
natctttttctggaagatcaagtaggtaggagacaatctgaaacaagaagttgtgtcagctcgaagttcaggtggaaaactatacactgatactgtgaacctgtgaggtttgggagatatctggataacccagggccaccctcttgcacaccacaggaatcagaacaatttgtcctcacaaaaaaatgcaaagctgccaagatgagcatgcattctccaggtacagtctacatgtttcccttgaatgcaattaacttatacagcccgtgatttaaaaaaaatacatatttatcacatttgagttaaaaaaaagcaatccttctccctcctaataaaactaccagaaaaaaaataaaactaacagaaaaaaaaatcaataagcaaaaaccagaaaataaatatggagaaaactgagggcctgtactttttcagagtagagctgttatcttctttttttttccctcttggaattacaaggactgtttggggaccgtaaaaggagaatgtctgctaacagcaaaggcaagtgacagctttgttttcaggactctgactataaggagcactaaacaaccttccacagatagtcaaagttccaattttacttaatattcccttggggacatatcaggtcagtggaagaggtggctgtctcactgaagcatcccatgcagtgtgaaccagcttgtcctggctagtgaaagctgactcttgaattttcggagttttgcaagctggttgttaaacaaagatgtttattaaaaactaaataacagggagggatttaaaaacaattaaatagcaatgatgggaattccctggtggcccgctggttaagactctgctctcattgccagggcccaggtttgatccctggtcagggaactaagatcccacaaaccaagcagcagaggaaaaaaaaaaaaattaaataataatgaaagaaattacatcaataggttaaaatataaaacctcataacttcctaattattaaattacattttactattatgtatgctcatgaggttatttatattgactgtgtctgcatggtggcagttttacataaaggtgtactcctgtgcatctctttgaaactctgtgttcagtgttggtagcttgaaatcagtcatggtgggggtatttgctgctgttgttcagttgctaaatcgtgtctcacgctttgtgaccccatggactgcagcatgccaggcttccctgtctttcactatctcctggagtttgctcaaactctatactctggaaattggcaaattctgcagatcaggatttgatttagtgcaaaagctcaaagagggttccagtttaatgaatataatttgtatgagggcaaaatgtagtttgacagtgaatcacacaccagatttaaagacaaaattattgggaaaagagcaaacgggtagtggcatttatcaaaccacggttgagttgtaaccacagggttgggtgtggatataaatttagcaaaaattgacaaaagcattcaattaagagtattacacaattcattattatttgtaaactgtgtgtgacatgtttttttatatcagtaaatttataataaatttaagtctgtttgtacacacacacacacacacacacacacacacaaaacattcctactgctctctactcccctctccaaggctg

SEQ ID NO: 27245 - DNA, 1304 bp, Bovine  19866880867347
  misc_feature (1)..(1): n is a, c, g, or t
nccgggtgggatgaacccctccctcttctgtaggcctgttgctcttggctcatacttgttctgaggctctagagatcattctgtaatctgtctgttggggatttggggggctcctgtgggtaggacagaaccctagtcatgtttttatcctgtggctagcacagtgcctggcagcagaacggcccagcaccctcaccacctgtccccgcatccagcccaggtccaccccgtgacatcgtccgtcctaatgccttgcatctgcctgtctggtgcctctcgctcttcgaggcacttcctccagcatctcctctgctcctctggaccgcccatgggggcggccagggcagatatggttaaagccattttagagatggggacaccggggtgcagagagggccatgccagtcaagtggcccacagtgggagtggacaccgaagagagagaagcctgaggtgctgtcccagggagctgggtggtcctgacccctggtctctgccactctgcagctccatggccagcctgagaggaagaggttgggcaaggagcctttggtgtctcttctgcctgctgttccctgggtaggggtgggtaggggcagttcccaagcaagtgggaaacaggaaggagattctggtagaaggtggtcccgaggatcctggagatagtgaggggagccacaggctggggtggcaggggtctctgcatactcccttccctcagccagcacatccagccttgttccaggcacccccccctgcaggatccctgaagctgggcgaggtcaaggttaagaggtcctcagggaggctcctcagaagagagcagggagccaggccctggagattcccccacccctctggctggcaggaaagaatgacatctttggagagcccgtcagcctccatgcccggccgggcaagtccagcgcagatgtacgggccctgacctactgtgacctgcacaagatccagcgggcagacctgctggaggtgctggacatgtaccctgccttcgcagacagcttctggagtaagctggaagtcaccttcaacctgcgggacgtgagtctgggatgggtggcccggttgggggggtggccctcggccagcctgtaatgggccatggccagtcagcctgctgagcgcttgggctgcttggctggagaggacccgtctgaccgcttcccttcttttcaacccccgctcttcatcctttgtcataatcacttctgtgcctcccatggccaacataatgctaagtatgaagatagctaccaattacggagcaccaactatgtggtaag

SEQ ID NO: 27246 - DNA, 1109 bp, Bovine  19866880874547
  misc_feature (1)..(1): n is a, c, g, or t
nctcctctctgggcctaggcatgtctcagtgacacccgctgccaaaagctgggttggatttgtatttaccttcaggaggagaaggttcagctagtcctcatacaatgagatgactctgacatggaaagttcttaacggccctcctacagcccctggcagtttgtgtgtgttagggtatggagccttcagcctgaatcgtgaatacaagactccatatctttttttgttgtcattcagctaatgatttcaagtaaatctataactgctctttgtctcagtttccttatcttactcagggatgccaataagctattattactacagacttttaaatctacacatatagtaaacataaatgctaacatcaatgcctcttgcctgcagtacctatttttcttctccctgtcccatggtttccaggctctgataaacagattccatgtagaatctatggcaccacctatcagtgaccaggtgaaaaccaggtctttaggttgatcagctgtgggcacatgtaggcccacgttgagaaagcaaaaatctgggatcctcagcttatgagccctccactgagggatggcactctcctgatgactctagaaccctaccaagactctggtgaagtctacgtgcagggcagagtcagcggccatcgggagaaacctccttcttcccctcaccttataaaacatgtccccctcttccatcagcttgctcagcaggatgatcatgatgtctggtttggaggtggccatcgcccatgtggctggacctgtagtgtacaggatgcatgatgggtaaaaaactcatacaatgtaagggtggtaggaagctaggtgaaaaaaacaccctgggggggggatttctgctgagagaacaacttgctccacaacactggcctcgtcttttagaactgggagtgtctcagcgcctcccactgccaagaagccgcgttggatttgtattcaccttaaaataagaatctctgaacggtcagagtctgcaccatcggagggcagcagagcctgcatgttgtattcaggcaggcgatgcttagtctggcgttactttaaataaggaacttgggagaaaagggtttacattaaatg

SEQ ID NO: 27247 - DNA, 1208 bp, Bovine  19866880901648
  misc_feature (1)..(1): n is a, c, g, or t
nactgtgcaaatttaaacaaataagaaaacagagcttaaaattgcaagttccagccagactggctagaccctagatgatattaagatgcatgcattttctgagttctttgaatttaacacgtgcatctgacaaaaatctcactcctccttcctattatctaattcttatcctctctgtctctgggtgcttagaaaactatttagtgataattcttaagtctgcattattttattttccataagactgattacaacacaattataattttttaaatatgccttataaacatatgtttgttgagtctaacatatggtatttctctggttattttattcctgatgctttgttacagtatcagattgtttcatgtactacttcatgctgaataaattagagagattaatctttattctcaggcctgcttcctattttaatctagaggaaaagctcagtttgtatttataagttttatttatgaattatggtaccaaacacatgcaagagaaatattgggtcaaatttgttatcttagataaatcagggcaatttccaagttaacagcttttgttttcacttcaagaagttgaggagtggggtgacagaagacagtgttagagaataaccatacagtaaccatgaccaacttagtgaccaaacacacacacacaaccatgactgctgctcttgctgctgctcaacctgtctgcgtgctcatctttctttcttaggtggttgcctatcactattgccaagcagataatgcctacacctgcctggtgcctgagttcgtccacaatgttgctgccctgctctgccgctcccctcagctggcagcctatcgggagcagcttctccgagagcctcacctccagagcatgctgagccttcggtcctgtgttcaagaccccatggcctccttccggaggggagtgctggagcccctggagaatctccacaaaggtacagatgaggtgcagagcaggtggaaggtggaggctctggagcccaagttcacctgggggcatgttatagaaatgattatttttatcacactgccaaaagttaaatgttcctacagggtacagttaacaaataaaagattttactcagaggaaaaaaaaaaaaataagaaattcctccaagaattggtaattccttctctctgcataaaaattctcattctcatttccaaatacaatgcattctt

SEQ ID NO: 27248 - DNA, 1777 bp, Bovine  19866880904418
  misc_feature (1)..(1): n is a, c, g, or t
ncactccagtattcttgcctggagacccccatggagggaggagcctggtaggctacagtctatggggcctcaaagagtcagacacgattgagcgacttcactttcactttcttcatagaatctagaaaaatggcactgatgagcctatttgtaggacaggaatagagacacagatacagaggatgggcttgtggacacaggggatggggaaggagagggtgggatggaccgggcgaggagcactgacaggtgtccactaccatgtgtaaacagatagctaaggggaagctgccgttcagcacagagacctcggcttggtgctctgtgatgacccagagcggtgggattggggagtgaggggggaggctcaagagggaggagacatatgtaacacatatggctgattcacactgttgtacagcagaaactagcctaacactgaaaagcaattatactccaattaaaaagaattggtaaataaaggaaaaaactcctaattctgactccaaaatccagggtttttttgcattatactatgctgtttctctatatcatatcagtattaaatttgaatctgattatcagcgatatcactgatgaccagaactgagtggacttggctgactcgctaggctagcttccttctccttcacctctcctgtgcttcccttcagaaatggcatgactggccagagagagagagaagagcttctcagacactcaggtgctttctagactaacagacttacctgttcaggtctaagattacttaacattttgtctcaaaagaggctttcacgaatatgaccgatgccgatttataatacagggtaagtacagactcaacttcaatgctgaagtttctgagaaaaattctattaagataacttgttctcacgttgacgtaatctctcatcatattttattctactgagaaagctttgacattttgaaaagttattttaaaaattttctaaaaatgtaatcaattcacaaaagcctcaagggaagaacagacaaaattaacccagcaccatatggtaaaacaactgtagacaccaagaacagcccagaaacgatttctgtgcctcagaacctaaggcttttgtcagatcaatatgatgaaagaaagccacactctgtatgtaccaacagtaaattacgggcatatgaacaagaaggcatgttggcctgcgctgtgggacatggagggaatgaatactttacgcggcgttcatcttcctaaataaatgtttctttgtttaggagatcagctggcttccaagagattttctaaagcagaaaccacggaaataatccagtgagaaaggaccactgcaactgtagctgagccaaggggaaaaaaatgagctaaaccatacatttagcaacagattcagttctctaagccctgaagtggctgtcccagggcagcaagagacaggaagatcgtcccaagcttctcaaaacattcccaagtatactgacatctggaatttactttgaaatttgtaaaaaaacaaaaacaaaaacaaaaagatgtgtggttgaagagaagggcagaatggatagatttatggtagaaataataaaacattaatgacataatcaaggcaagttatggagtgtttattgtgaaacttgtctttttgggggtatatctgaaaatactgctaataaaatgttgaaagaaaaagcagctaaaggaaaaacatttccagtagagtacacaaatacgaatagttttggaaagcagtttttttttttctttttaaga

SEQ ID NO: 27249 - DNA, 1088 bp, Bovine  19866880945944
  misc_feature (1)..(1): n is a, c, g, or t
nccagcctggccccatctgagcgtctctaaaactgatggtctctgtgggtttttcaattcctcaattgtttactgagcacctgctgtgcaccaggcctcagaggacactgacaagagtttcaacagaaaggacctaaggggagaagtttctctagggcccacttgctcggatcatggctgggtcccatcgggaccaccccaccccgccagggatgctgtctctctgctcttgtttctctccccccaccccgaggcccacaggctgcctaccttatagcagtgccggagtttgggatctgagccccagccctgcggacaggcaccggtgaggctgggcgtggggtctagcccaggcagctcaggcgtcacgggcgtgcccaggctctggcggcagatgtagcgagcccggaacgatgtgcagttcttcacctcccacagccccatggcactgcctgtggccagggccacgcagcccccacggctgtaccctggaggagggaggaggggacccacacactgagccctgccccacatccccgaggggcacctccatggcccccgcatggggagccagcttggccatctctgcagggacatgtgctgtggggttgggggtggcagggctggagagagcaggaaggaaatggaggcagaagcctcactctgtgttggctcctgtgagatcttaggcaagttgcttaacctctcagagcctgtttcatcatctactccatctttgaaaaggcttaaaaaagataacaggggacttccttaaaaaagataacagtggattcacggttaagaatcttccttccaaagggatatgggatcggtccctggttggagaactaagattccacatgctgtcgggaatgtgtactgcaaccactgagcccgcgaggaagacccagcacagccaaaaaaataaaaaaataaaagatttataaaaaaaattttttttaagataataaatgtgaaatagcataataggaagcacttgttctatgcccactattccaagggctttacatatattaacccatgcaagccgcatgtcagccccgtgaggaaagaaccattatccccat

SEQ ID NO: 27250 - DNA, 2735 bp, Bovine  19866880982460
  misc_feature (1)..(1): n is a, c, g, or t
ngatggaggagcctggtgggctgcagtcctggggtcgctaagagttggatacgacttttcactttcatgcattggagaaggaaatgggaacccactccagtgttcttgcctggagaatcccagggacgggggagcttagtgggctgccgtctatggggttgcacagagtgcgactgaagtgacttagcagtagcagtagcattgcaaatagtattccattgtatacctatagctccttttatctgtccatccgcagttgatggacattgagggtttgtttttttgttttttttttagctattctgaatactgctgctatgagcattctagtgcaagtctttgagtagatacatgttttcacttctcttgaatagacatctaggattggaattgctagatcatagggtaaatttatgtttaacttgtaaagaaactgccaaagtgttttccaaagtgtctgcgccacccacagtgtctgagggttcctgtttctgtgcctcctctctgccgtttggtattgtcttacctcttatcatggttattctagcagatgtgaaatgctgccttgttgtggttttaatttgcattttcctagtgactaatgatggtgagcttattttgtgtgctttttagctattcatatatcttctttggtaaaatatctctttttttgatgggtcctctgtctccctattattgagttgtaagaatttgttgtatattctgtatacagatctttatcagagatatgtttgcaaaatattttcactccgttgcttatcgttttgttttcttattggtatattttgaaacataaaactttttaaattttttattccttttttgaagtatagttgatttacagtgtttctggtgtacagcaaaagtatttcagttatacatatatatttgtatacattatttttcagattcttttccatcataggttattacaagatacttaatatagtcccctgtgctatacagtgggtccttattggttatctattttttatctaatagtgcctatctgtttatcctaagtttcaaatttttccctccccccttttccctttggtaaccataagtttgtttctgtatctgtaagcctatttctgttttgcaaataagttcatttgtatcactttttagattccacatgtaagtggtagcatatggtacttgtctttctctgacttcacgtagtgtgatcatctctaggtcctttcgtgttactgcagtggcattatttcattcttttctatagctgagtaatagtccattgtgtgtgtataccacatcttttttacccttttatctgaaacacaaaaattttgatgacatcagtttatctgatttttcttttttggtgcctttttttaaatcactttaatagataggaaactgtttatatcatatatcataacagtgatttttcttagttattggggtttattttaatttggatattgaaaattatttacttacatacttaaatgttgtctcctatcttcatttctgtctccccttccccatgttaaaacataaatgaaagggataatattagtctaaattgttattcctataaaccttgattattatgttttcatctatcacaatggtcatctcataacactggcttttctggctagcagagattttccggttcttaagctaatcatgcttcttcaatagctctgtcctgggattaggattagattagggtttatactgtcagagtaacatttactgtgttgaacaagatacttcattagagaattatttcttgtcagtattgaatgtaattcaaactgaccactaggtaacctacaaggcaaatcataggtcagaagtagtttgtattgggttgttttctctatctggaaaccatggtttcacgtcctcacacagggaggaaggtaaaccacatttctcaggatttctcagttattttcaaatcttaataggttatacattgaaagtgtttccagaatgtagaaagacaaaattactttcacctgctaactattggatgtgtgtaaacatttgataagatcagagtttccagtagtttatgtgattagatttctaaatctgtttttgaagtaaattttcttagctcaggagggtcctctcttctcattttagctctagagatacatgttttggacttcccccgtggcccagtgcgtaaacaatctccctgcaaagcaggagatgcaggttcgatccctgggtcggagataccctggaggaggaaatgacaacccactctagtattcttgcctgaaaagtcccatggagagaggagcctggcaggctacagtccataagggtcacaaagagtcagacatgactgagcagctaagcacacaaagcgaacacatgttttcctttacgttctaacatgtacatagacgtggttccccaaagtgggggaagatcagatgctcaaatctcctaggtgaacaggaataattgaggatttcaaatacgagatgaccttgaaatagggggaaatgttagtatattatacttactaaattgttctaagcttatgaatgagatgggggtgatgaatgccgataataaaatactttttttcaaacccagcttttaaatttcccttcttgtttaaactttatctcagtgtgactgatgtaattatttattttagagatttaatgatgaataatgatatgaaaataccatttgcatcacttaaaaaaaaccta

SEQ ID NO: 27251 - DNA, 3423 bp, Bovine  19866881109779
  misc_feature (1)..(1): n is a, c, g, or t
nttttttttttttgtagatttctcaaaattttttacctaggcagtcatgctatctgatacatgaccctgtactagttattactcttctcttggcctgtttcctgcttgatatatggacttgttatgagactattactgagtaatggagtgatataagttaaaaggatgtttggaataattttaggcaaaattcctttgtttatgaaatatgtaaaagcccattggttttaagtttatcactgtgctgtgttttgtttctctgagtactttttaagaataagcttttaataacatataaactggaaaattcacaaattatatcaaaagcctttagcatgataattcattaatgagttatcatgctaaaggcttttgatttataagttttatttgtggtcatttatgcaacttgaaaacttaaggcagttctgtagaacaggtatggcctttggctaaagaatttctttaataacttgaaatttaatatttcctaatcatctgcactgaatataagacttagtgaagactgaaatttttattgaatcataattgctcctaacattactttagtgtccatatacttggtatccttgtgctttctcagtgcaacttttgaatgcttaattaccaggtacctagcataattgaatttttttcggtgatattagcagtttattttctctgcccatatctctatcacattattttagtaatttttattctgaagcaggacaaagtgagtggtaggaaaaagaaagatagaaaatgaaggttgaatagtttggggtgccagtagatactctcttgcatgcataccaggtcgcttcagtcatgtctcactgtttttgatcctatggactatagcccgcgaggctcttctgtccatgggaatctccaggaaagaataatggagtgagttgccatgcccttttccaggggatcttcccaacccagggatagaacccatgtctcttccatctcctgcgttggcaggtgggttctttaccactacagcacctgggaagccccaggtaccgtcttacatgcttggtaaattggatttcaatttttttacttccttactggttataaaattgttcatccattccttttactgtgtagctttttcgtggttcccactgaaatgggccaagtgtatttccatgctccattgatgtcttaacttggacttacttgggccagtaaagtgttagtgaacagaggtcttaaatacactcttctgatttaacttggtctcatgcagccctgtgatcttccatgggaagagcatgccccacgtattcgctgaaacatatttttatagttttttctctatagctacaatgagttcaagcacaatttatagggcagagaagatagaggaaaaatatttttaagcagaaaagtaaactaggacatccatactggactaattgcagtattattccttaaggagtattattagagtctaaaattatcagccaagatttaacattggaaaatttcaagtgaaaagaagtatttcactaaatccagtgcattcttctagatacatatatatttttaaaaaacctaattgcgatttttctttaactagggaactattaccctgatgatatacctctttgtttgtaaacatgtaaaatactacgtgcaagtgcccgtgctcagtcgtgtctctttgtggccccatggactgtagcccgccaggctccctcgtccatggaattttccaggcaagaatactggagtgggctgccatttcctactccaggggatctttctgacccagggatcgaacctgcatctcctgcattggcaggcagattctttaccattgtgccacctgggaagtgtaaaatactataattccatataaattacagtaaaatactataattccatataaattatagtaaaatactataattccttataaatcagtctagacatgagactgaaagcccccagattagaaatctgttaagaaagagacttgacaaataggtctaggagatatagtattcatctgatcacagctccagagagaaagagaaaagaaccattggaagaaaagaattagtcaacatagctaaaggaaggacctagtgactaatgagaaataaaaagttaagacctattccggtaaaagttctgaaatccaaagataaggaataagtcctagatttctaccaacagaagttttggggaaagataagagggatctggactatggtaataatagaagaagtgaagagaacatgacagatttgaattctatttgagactgataatctgcagaatagctattgcatttgttgcaaagggatgtgatggaaagaaatgaatgattactagacttttggtttgagtaaatacagaagacatgtaatatttttaattgagacaattgtaaccattttattgtgtacaattcagtggactttagtgcatttacagtgttttgcaaacatcactgctatataatccatcaccccagaaggaaacctgtacctgttaagcattcagtccccattcctgtagtcgttcttggaaacctaatctcctttctgtctggatttgctttttctgaatatttcatataaatggaatcatacaacacatagcattttttagtctggcttctttcacttagtatactgttttcaaagttttatctgtgttgtagcatgaatcaagccttcattatttttattgctgaataatatttcgtcataatatgtcacattttctttattgattcaccagctaatgatgtttgagttatttcagttttgggctattttgaataatgctgctgtgaatgccctggtttttccttgaaaacctgtttcattgcctttatgtatacacttagaagggggttggactggattagatggtaattctgtgactaactttttgaggaactgcaaaaatgttttagacagcagctataatgtctcatattcccaccagcagtgtatgaaggttctagtttttccacatccttaccaacacttccctgttgttgttttaacagcatcacactgagtgtgaagtgatattgcatgtaatactgtgtgcttgttttttaaaaaaatttcccctcagttttattgagatatgatagacaaataaaaattgtatatatttaaggtgcgcaacatgatgtttaatgaatacgtacattgtgaaatgattgccacagtcaagctgattaagatatccatcacctcacatgttgaccctttttgtgtgtatgtgtgagaatatttgagagctactctcttagcatattttaagtatacaatatattattatttgctgtagtcatggtgtacattaggtctccagaacttactcatctaataactgaaagtttttaccctttgaccaacatctcccttttgcctctacccc

SEQ ID NO: 27252 - DNA, 1343 bp, Bovine  19866881142729
  misc_feature (1)..(1): n is a, c, g, or t
ncatcaactcttcagcactcagccttctttatgggccaactctcacatctgtacatgactactggaaaaaccatagctttgactatttggacctttgttggcaaagtgatgtctctgctttttaatatactgtctaggtttgtcatagcttttcttccaaggagcaagcatcttttaattttgtggatgcaggcaccatctgcagtgattttggagcccaagaatataaaatctgtcactgtttccactatttccccatctatttgccatgaagtgatgggactgggtgccatgatcttagttttctgaatgttgtgtttgaagccagacttttcactttcctctttcaccctcatcaaaaggctctttagttcctctttactttctgccgttagaatggtattttctgcttatctaaggttgttgatatttctctcagcaatcttgatttcagcccttggtttgttattttcaaaaatgatgccatatattcaataaatagctaagccttttaaataattctgaacagtgtttgttttaataaataatttaaataagaacaccaccacccccaatactgaatagtaactataataagttaaacagacaccaaatgatagaataaaccaagctaaaactaaaaagagtcagctggagaggtcagtaaagtccaactaaatatgggcctctttttccctatttctttacgatgagtggtggagctcctgttgggggcagggggagccccagcctgtagtattgtttcctggagcctcagaggtctctgttaccctaaaggctggggaaggaaatgctgatgggctgaaagtggaggagcccgtattagcaactgcatgcaggaccgaggcagattttgtgggatgaacagaattcttgtgggctgagtgttttttgaaacttctctccaagaatgcctgcgacttaaacatttctttactaaaaggggaggaggaatagaatgatttgcaatgttgagaaaaaaatgtttttcccctctagttctccccctccctccaccttctctcatagaggagcagaagaaaccagtggcaaggtaggtactttctaattttaatcttgaaacagccaagcaatctttccatgtaaatcaaacactagtcctctccaagttacagttttgctaagaaggggacatggggacagagctaagtttggacttccagtcctagaaacagcaagaatctggccataccccccagccctacccagggaccagttttcttgttatttgtacatgtgaatgatcttttgttgttgttttctgatgttgatgcggtttctgcttggagggtcctgaaggg

SEQ ID NO: 27253 - DNA, 944 bp, Bovine  19866881160977
  misc_feature (1)..(1): n is a, c, g, or t
ncagaagccccagagcagactctgccctttcctgtctgtgctccgggataagcaaggaagttcatgctagtcacttcagttgggttttccctgggaggagggctgagccgagcagtcaactgtgacccctgggccaggctctccaagaagggtcgtccctgcactggctgggccagctactcagtgttgcagagcctcgccctcttttcccaccatgtcattgctgctaatggtcaaggtcaaatatatggccacatggaatgggccaggtcctctcaggctcctttgtggatgtgattttttttttaagaatgcaaacatgcaggtgccttcccgagaggcttggactggtgtctccaaccagaaacagataagctaatcagagtatgaactcaagaggagggatgtcagcagactgtgtaacagctggaaaacgtccacgtaccggcctttaggacaacccaggggatcagaactcgggatccctgctctttaaaagaacgttctccccttgggttgataatgcggtgtgttatgaaacttgtggagctaaagcttggacttgctggagtcgaagatggatcatttgatgtggttcctgtgtatgtgatgacccctgtcagtgaccttccagccttcctccccgagcgtgaatttgtagcatgattgtacaaatctctctgtagaaaatggaggtttcttgttctctgaagtgttaagctctagccaatcagtttctgtcccctttagcctagtgtgtccgaacttaatttctcgctatgtatttaaactttttctctgtatcataggttttgtggcatcccacggtcaggtggagaggaagctgccccttacagaactgtactgtaaccattttttagagaaacattattttcacaggactgattatacacagggcttgtaaaaaaatttttaacactgtg

SEQ ID NO: 27254 - DNA, 1806 bp, Bovine  19866881262488
  misc_feature (1)..(1): n is a, c, g, or t
ntaagggcaatttatgatgttgattagaaacagatgcttgtttgtcggtgtcccccagaagtagaacctcaggaaggctggagtcacagtgtgagggacaggttccactcatgtctccccagaagtcagctcttacagtccttggccccaggagatgggttttgtttggcatttttgtttttctttgttcagcattttgtttttctttttctctctctccgcttgtctggctctggctttgtctgtctctctttgtccctttctttctctgaaaccctcagttgctctctgtctgttttctcatagacgttagtgcaatacaaagtttgcagcaggtaataaatgcagaagacaataattcaaaacctaagttgatacacttacgaacacaaaccaactaggagaagaaacagcatttgctaggagagcaatattaaccctctttgtaaataaaggaatacccaagcctcccgtgattcagagtggctcttagctctttcttgcacatgggtctcaggtccaggtttcacagcagaactgtggtcagaggagggccacttccacctctccagtcgatgacctcagccttgatgtggtcatggatctgctctgattgtacatacatgaaagccatgagggccaggaaataaatgtctcagtctcctaacagggtggcgggagatagccactggttctggcttcattgagcctgtccaggtcgaccgggtagaatacttgctgagttatttgtgctctgttggtcagcagggtatgtgctatgttatcacgggaggtggaggaagaatacttggaaggtagcaagtgagaggaagcctaccggcttccaccgtaggatggttgtcactctttgggtaatcattggtgttagcactctcggtttcctgtcctcacaggcgcggtgtggctttattcacctccttccaagtcatgagcaggggtttagatgaaccaggggacagtaggtttccctgtgacatgaaaaggaggtaactgacctgaatctgactgttgcttctttctcaccaacaggtctacgacattgcatttagccgggcggggggcggcagggacatgttcgcctccgtgggtgccgatggctccgtgcggatgtttgacctccgtcacctagaacacagcaccatcatttatgaagacccacagcatcacccactgctgcgcctctgctggaacaagcaggaccccaactacctggccaccatggccatggatggaatggaggtgagaaccccacttcaggctcacctaggccttgcgactctgctccagcccggctttgtggatccaggaaagcggttctcagctgacggcagttttctccccagaggatttttggatccacctggagacgttttggattgtcccaactttggagggggtggggggtgcaggaagggggtggtgctcctagagtctggaagttgggggcctgtggtgcccaggaccactccccacaacacacagcacagcgttatcccaccccaatgtcagtagtgccgaaactgagaaaacctgatctagaataagggtgtgtgtcaagaacttggagtacatagagagctggactctgagccaagaacagcagtatctaaaaagtcaaccatatcattcatgcttctggtgccgagtagacgaacaggcagttttccctctgtcatctgggcagagtcttctagccttagtgagtagacggggaaatggccactgtatagcctattgtttcatagaagcagtcagctgtgggtgcacatgatgccgtgatgaatt

SEQ ID NO: 27255 - DNA, 1257 bp, Bovine  19866881349001
  misc_feature (1)..(1): n is a, c, g, or t
nacaatcaaacatgacagagaaatctgtggtcctacaccacatatttcaagaaaagacccacaaggaacctagacttcccactcaattcaggctgtaatgaggtcaaagtggtgtccaagaacacttagcagagagccagacattcattacccaccaccacctctgccattgtcaacagagacaccaattaggaagccttgacttccactccaaccgtgtggaaatgagctgcccttcccctccgcacagtggacctcctactctgtggaatctgcagaacagtaatgagacaatattacccttcccccacccccgccccgagggtgatactggtctaagactagtggggaacgggaactcccacccttgcctggcagcagtaagaagtccagtgtggaatctggactactgtccccacccaagaggtatcagagaaagccagcccaaagagaaggttagtaggatccagagtctcataatataatatccaaaatgtccaggtttccactgaaaatcactcagcatatcaagaacctggaagatctcaaactaagtgaaaatagataagcaatagatgccaacactgagatgaccaaaatgttagagttatatgacaaagatggtaaagcaaccaacataaaaatgcttcaaaacacaattacaatagggcaaaaaaaggaagaaagctcctaagacccagaggagtgcatgataacatcccatgctttgagcagattctgtgcccattgctttgttaactgcttcttgcacattctttcattgaagcctccggtggtctcagggtaaaggctttagctccattttctggataaaactaagattcagagaagtcacttgaccaaggtccaacagttaatacccaggagggtttgaaggctgcgattcaaacccaggactatctgactcaaaggtcgatactcttaagccctgcccctctgctcagagcttcccatctggataagtgttatactatgtgggagttggtgatggacagggaggcctggcgtgctgcggttcatggggtcgcaaagagtcggacacaactaagtgactgatctgatctctgatgtggaatatgtctatttccttaaaacccccacttacccatgattgttcagaaggaatatgtatagaaagaagcgctgagagagcctgttcctgaaagactgcccccgccccaggccctccctgcctccaggagcacagctggagcccagagagagcttatgggggag

SEQ ID NO: 27256 - DNA, 2507 bp, Bovine  19866881382796
  misc_feature (1)..(1): n is a, c, g, or t
nctcctcctcctcttcccctccagttgtgacccaagtctgggcaccatcttacgtagattcctctaacatgtccccagtggcctgtccacttccattcttcctctacctcctcccccaccctccatccagtctctatcctacagctggagggacctttggctttgttttggttttggctacagcttataggatcttacttccccgaccagggattgaatctgggcccctagcagtgagaacatgaagtcttcacccccagaccaccagggaatcccctgaagggaactttaaaaatgcagatctaatcatgtcctccccctgaatggaaccttccaggggctttatatgactctttgaatccaacctccaaggctccttgtgagctgggcccacagcccttccgtggctttcctggcctccctgtgttccagctgccccatccccttcctgccctgaaacctctgtactttttgtcctttctgtcccagatcctttctgtcccatttccagcccagctcactccttagcaaagccagtatccttccctaaggaaaaccttgcctccccctcccccaatgacagtttctcagagacccggtgtttccgctccgtcgcacttatcagcatcagggtccactgttaagttctaagacttggggtttgaacccagagagtctcacactagtgcctgtgctctaatcatgatggatcccagggatactcaggggatgaaaaccatcaggacttggttttcatatggttgggctaggagggggcagggtgaaggaagccacccaggttacttgctcgggcagccagctggttgatgccaaacggttccctccagaaaacttgggaggaggagcagtttgtgagaaagccatgtggagtctgaggggctgggggactaccatattcagtgctggcttccaccctagattgagcaacacaaagcccagggccatgtcatcatccagaccacctgacccccatgcccagcggagtgcctgaattggaataggggtgtgatcattgtagagtccatgcgtttatgtgaccacggggctcagagcttcggtcattgctaatcgagctaggttcttttttgtcatgtggtcaaactgcttctgccggtctaactccctctgagtaaccaggacaggctggctgaagccagctgatgaaagtggctacattatttatgtctggaacaagagggctgtaagggcatcgacacccagacaaagagtcctctgagtctgaaaggagcatctgtgcccttccaacaatggacatgagattaataagagaataaaagcaattatactaagagaagtccccaaatggcaaagcaacaaagggttatatcacagcacatttattcatcttctatacacaggtcggggattaagaatcatgttacacgaagcaaaggacaggcagaagttcgtcagtgatgttcaatatctgcgggacatgcagcacaaggtggactcagaataccaggtaatagcaggaagtgagaattctcttccaccagcagtatgaggagagaatcggggaaacggtactggtatatgagaagcagtaacaggtttccaaaagccaaaccccacgcttgggacttccctggcagtccagtagttaagacttcgccttctaatgcagggggtgcaggtttgatccctgctctgggaactaaaatcccacatgtttcaaagccaaaaaaaaaaaagtaaaacagaagcagtatattaatgcatatacgtggaatctagaacaatggtactgatgagcctatctgcagggcagcaatgagacacagacatacaaaacagacttgtggacacaggcgaggaaggagagggtgggacgaattgagagcagagcacggaaacatacacactgccacgtgtgaaatagatagccggtgggaagttgcctgtagatcacaaggagctcaacctggtgctctgggacaacctagagaaatggggatgaggaggtaggagggaggttcaagagggtggtggggagcagcgatatatgtatgcttacggctgattcagcctgttgtacagcagaaaccagcacaacattgtaaaacagttatcctctaattaaaaatatatttaaaaaaaccagaagcaatattgtaacaaattcagtaaagactttaaaaatggtccataacaacaacaacaaaaaaaatctgtaaaaaaaaaaaatctcaaaaacccatacttaacagctgtgtgaccaatgaaaagctacttctcagagtctgtttcctcatctgtacaatggggataattgtacccgccccccccccccattatatcctcatggaaatgaaataacatttttaaagtatttagcccagggcttggcacacaaaccttatcaacaaatgatatcagggcttaaattggataaaccagcaatcaacaaaaaaaaagacattaaggagttaacgggtcaccctaccattttcaaacaacacacc

SEQ ID NO: 27257 - DNA, 1527 bp, Bovine  19866881392615
  misc_feature (1)..(1): n is a, c, g, or t
ntaaggacaaagattatattcataggtttactctttgatctcttttcttctttttaccttttattatcatttattctggtgacttgggggtggcgatgttgtagactaaacagggtaatattgcgtaatgcagagaagagtttaacctatagttaactagtctgaatgtccaaatttgtactgggcttgataagttatattaccgagatgatgattttatctaaatgtaaagtttcctaagattctaaaaactataatagcctctgcttctttctgttaatctgggcttcaggggagtcacagcctgtaaagtatgagatgggatgttcaggaacagtaccagtttgcaaagacagttgggaataaaagaacatcgtgcactgagggaagttcaaagagtttggtaatggctagagaacagcaagtagggggaagaggcaggatataaaagtagaaaagttggcagaggcaaaatcacaaaaggcataatcattattcatgatgatcaatctgacctttctcctgtaagtggggggaagaaaatgacaggcattaagcaggggaggagcacgatctgactagtgttccgagaagataaatttggaatgcatatataactggcactatggggtcacaggctaaaggcaaagagatagctgcagtaagtccagaggaaagaatgcctgaataaatgcactaattaagaatacagaggaaaagctagattcatggactatttgggacttagaacaaagactgtatccatttaaaagagttggttctaaccactggcattaattttctttctctttttcttctttaaatccattcccatcaggcatttgcccacactacttcaaaaaatttacacttaccaagatcccctataaagtccactgctaaatccaatggtcagttctcagttttatttttggactgattgacaacatgtgatgctgttaatcattctggagctttctcttcacttaactttcaagagcccacactttcctacctctgtggctccttcttcgtcagtcttcctggctttattctttctcatctccctcatctctaaatggtgtactgccccagggctcatttttctgatttgtactctttgctgtgtaattcccttgctcatctcaaacagatccatggttttatgtttcatctatacactgatgacttccaaatttatatctctagcctggacctcatccatgaactaaatccatatttatggagttacctaccctacatctctactatgaatatcagaaggacatctcaagatttaatgttttaatattcctccataaacctgctcttctcacaaccctcttcatctctgtaaagagcaacttcactcttttagttgctcaagtcaaaaaccttggaatcatccttaacccatctttttctctcacactgcacatacaagccaacagtaaatcctgtcagccatacattcataacatatcaaaactacctctcaccctttgctactggtccaagccatcttca

SEQ ID NO: 27258 - DNA, 1215 bp, Bovine  19866881485089
  misc_feature (1)..(1): n is a, c, g, or t
ncacgcccagggggcaggaaaggctccagaaagatctagaaactgccatcagtgatctttatagatcattgatccctgtccttgatgccacctggccagcgccctgcccttctccccaactctgcctgtcgaagaactgcttcaggttcatatccatgaccagggagctgttgtcctgaaaatcagacccaggttaagtctagagatgacggtggcagtgatcttagtcttggctaggtggggcaacagaggcctcacagaagctgaactatcagattctctttcccctgggatggttccttcctcacaaggccagctgccccttttctgggcgaggttgacagagcggaggggagtatctctgacagtttgtgtccttgtttgtaaacgatagtctgagtttcctagccagcaaacctgatacctgcccagctctgccgtagccaagtggaggagccacagtgcagcggggcaagaggtagacagggcagaagaggacagggttcttgcctgggatggaacaggcctgaaaattggggccaaaatgtaaagaaaaaattctgctggatcagcaagattctttaatatcgtagttaccgatttgttcctaagctaattgacagtgaccctgtaaatgacaacccccacccaaccctcagactacctggtgtgcatttgagcactaagagacacttcctgaagggcctagctggactgaaccaaatggggacgtttctccactgatcccagagaggccagaaggaagatggaggctgaaggagctagggaatcattctgggctcttccggaatgacagcctgcctatttccttccttacaaatcagatgcaaccaaagcccccggacgccccccacctgcaccccaccccactcaggcgctaacagttctctgagaccgcgaccaggccctcagctcctggtgattcctgtgattcagaataactccagttcctgtgtttacgtttcgtcaagcagacagtttgcagcagccttagaggacctgaacgaggccatcaagctgtgtccaaacaaccgtgagatccagcggcttctgctgcgggtggaggaggagtgtcgacagatgcagcagcagccgccggtgcaacagcagcctccgcagcagcagctcccagaggaagcagagcctgaaccccagcacgaagacatctactccgtacaggacaactcgaggagg

SEQ ID NO: 27259 - DNA, 933 bp, Bovine  19866881523473
  misc_feature (1)..(1): n is a, c, g, or t
naaacaatccttccctctgcagagccaaagggagcagatgccaggcagctgcagcttaagtgcccgtgacagattaaaggaaaatgtgcagctggaaacagctgctgtctctggggctccaccctgagggaagccagaggacatactgaggggaaggggctggccgggaacaacggccgtggcgtcctgagacccggagctgtgggaggggcgtgagggttcaggccccatcagtgcagcctcccagcacagcgcagctgtccccccagagtctctcgttccaagccacacgtgtgtgaccgctgtggagggcaacagaagtagcggcccagtggtgccagtggacagaaattacagactaacagccgcctgccaatgcaagagacgtaagggacttggcttcaatccctgggtcgagacggtctcctggaggaaggcgtggcaatccactccagtgtttcagcctggaaaatcccatggacagaggagcctggtgggctacatgcagtccgtggggtcgcagagtcagacatgactgaagcagcttagcacgcaatcatagtgatgactatcacacatattctagtgctctccttgaaggaattccttcacaatgttcgaaaagggtgtgaactcagaccttttcgggggaattaaccctgaaatggagttttaacaagaaaaataacttcttggtaaaggaaatttaaaccatactacatccattgcctaaagtaaaaaaacatacaattaaaaaaaaaaaacacaactcttgtaaaaattatgaagagaggaaaaagatcagtggttgctaggtgttggggaaaatgggaaagggtgaataggtggagcacagaggatttgaggggcagttaaaacacttcatatgatactataagcgtagataataggttattacacattgtccacaca

SEQ ID NO: 27260 - DNA, 701 bp, Bovine  19866881594728
  misc_feature (1)..(1): n is a, c, g, or t
ncccagcggggcccgcagaaccttgatgtgcagccccgggggtgggccggtatccacccctgcgggcagccctcactcagcctctgagaacacagtgggaggaggggtacaggggcctctgatgctgagcctgaggaggcctctcctaggagaagcaggggaggacctgccaaaggccaggaggctgggcagggccttcaggtgcaggaggggcagactctggcgggggccgattttgctcacctgactggttgtcactgaggaagaagccctgttggtggtcttgactgcctggagcctgttggggtgatgactggagaccaccgcctgccttgtggggaacaagagcatcaagtaacggggaccacagccgggactgggcctctctcccctcccccaccctcgtggcaatgaggggagggtggttgcaggcggctgggcacccccagcatgctcccagcagctcctctcctgcgtggactggcagggatgcccaggggcttggagccaggcagaccccagggagtcctgcgagaggctgccttgagcagcagcgtgggggtgggggaggcaggggagctttctctttccttttcctcagggctctgggacccccgccctcagcctgggccaacgtgacaattccccctgaggggtggaagtctggaagtcccaatcccttcgggggtgccccatccatg

SEQ ID NO: 27261 - DNA, 1047 bp, Bovine  19866881666244
  misc_feature (1)..(1): n is a, c, g, or t
ntccctgcacacctgttgccaggttaaacaaccaccgagcatgcgtcaatggcattgcgtgggccccacactcatcctgccacatctgtactgcaggtaattactggaggcgggtgatgggaagggagggaaggggaggttttcctctggtctctttagcatcgtaatcctcactctatcccaaggaaggtttgagagatttacacagagtgatgccactgagaacctccctacactagcacagctgagacagtctgaactcccagatgatctcataccctcagcgacaccagagaatctgtgtactgtctccatcatatacagttacaggctcatgttgcccactgtgtgcccccagaatcctggcttgcacaggaggtgcatccaggagtatgagaaggggcagtctccttggctgtaacctctgccccgccgcccccggcccctgcactgagctctgggtgccttgacgggccctaaagaacctgactggatatgcagcatgtggtatgtagttcccatttcaccatctgctagaccccaagagtaccccttaaaaatgtggtggccgtcagagttcttttatcatagaaataatgtctggtattaaaaattaaacaacactgaaacaggccgaggtgtatgaaacaggaggatgaaaggcatcttccctccttcctttcccgtttctaccttagcaatgtagtttggtggtttggggccaattcagcatgaatttgaaagcatgaagcttttcctgtggggagcctgctcatgcctgtccatgttgaggagcagccagaggcccaggcccacccacttcctccgagcctcgctgtggcctgacttcttcactgtggccctcgctgatgtatgcatgtccatagcatgggggaaaatcgcattaaataactgaatcatcagagaggcatctttaacgactcgggtactttaagtggctgaagatgccatgtgtgggatcccattccagctttcttccctgatgtccacctcaaaggagatgaggtgtcggtctgagtccctctg

SEQ ID NO: 27262 - DNA, 898 bp, Bovine  19866881895123
  misc_feature (1)..(1): n is a, c, g, or t
ngaccgggaggagagggatggttttttgggtaattcgagcgccttacatttattgcgcactttatttctaatctaatgctgccgctgatctgacaggagataccagtccatggcccggaggttggggacccctggtttaaatcactccagaaatacttgttccccactcttctctcttttcctcaggtggctttagtctttgccagagcctgaatccccacccagaagcatttcagacagcttcacatgcacctgggggctccccatagaccttgttctgcttgggggctcctgcctgcccaggggagggctgggggactccgggtggctctctgtgggcaggaggaaggcttgggactggggtcatctgcctctggcccccggccaatgctggttctggtagagtgcgtgggagaaactcctttctttctgctcatttccatgcaataggccttcagcctttctacattccatctatgatgccctgagacccagcccctggtgcctgggcacagggcactgaatccaggctccaagcccagccggcactggtggggcgaaaaccggctcagctctggccacctggcctccgggacggctcgctgaatccatgaatgaacgggccactctccagagagtggtgtcaggccttctcacaacctcttcttgtcagatcagagatggcttgctcccaggtgtcctggcggagctggcctggcccagcgggcagcactgcgaggccgcaggggtgaggagccggccagccgcaccacatggctctcctggaacagagctggccgggccctgccaagctgcctggagcactagggcaggagtctgtggcagggacaaggtcaagaactgcatctggagggagaggcagttcccgagaaaggcg

SEQ ID NO: 27263 - DNA, 1199 bp, Bovine  19866880200765
  misc_feature (1)..(1): n is a, c, g, or t
nactctgatgctgggagggattgagggcaagaggagaaggggatgacagaggatgagatggctggatggcatcactgacttgatggacttgagtctgagtcaactccgggagttgatgatgtacagggaggcctggtgtgctgcaattcatggggtcgcaaagagttagacacgactgagcgactgatctgatctgatttgtagttttaggttttggggaactctgtaatctgccccgggaaagtgcttgcttccctttcagccaaaggcgccttgtttgtacttctttacctgctctaaccctttgctctgcagagagcttcccaagactcagttttccaaaggagactttggcaaggcttgggataccctactcaatgtctgcagacaagaggagtgagacaggacaagaatttgaggctctgactttcctaggatgtttaggaaagagaattctggcaacaacacacaggaacacagccgagtgctcaagtttcagtagttttggaaaaaacacttgattgaaaaggtgcagagatgaggaagcacaaaggtgagctggagccatgagtaattgcagttttcactgtgacagtcatctcaggttctctccttttgtagccagcagtttgggtaatagacacggtattcgagccacaatggatgaggtaagggcccatttccaattaaaaaaaaaaaagctattcccaagggttgggtcgacttaaaggcttggtacaggctgttggtgccaatgcaaactcttgggactaaagctgttaccttctaggccccatcaaaaaatatattcagcgttgaagttttttgaagtgttcaattatgattctctatgaagtgcttctttgaatagcccatgtgcagagtgtgagttaatggggctgaggtaaactagcaggggattttcttgcttttccatctgaagaaacagagacccatccctcccctcctaattcttacaatactgactctcaggaccgccccttagcagagaatgccttagactgagcttggaatgtatgtgtccatgtaaaaagtattacttggtacattttcagaattctcattcttaagtgaagttcggttcctttcagcttgttttatttcttttttgaagtcctaagttaaaagaaccccattagagcagcatgggaaatagatgggggaaacagtgaaagcag

SEQ ID NO: 27264 - DNA, 1661 bp, Bovine  19866880397150
  misc_feature (1)..(1): n is a, c, g, or t
nacctaccctgcataatgcataagatatcttattataaatattactgcaaattgccatctggacgcttagggaacttgcgggacatttaaaagggaagcgggcatgtgcccagcatcacatcagtgagcagagtcttcgcttcggttgttgctgctgctgttttatctaccaggaacctgagcaggtgggtcccaccctcctcacctaaagccacccaagagctgcccatcctgagagtggctacttgcccagtccctctccctccccaaatccctgccatgctcctcctctgtgacagcctcaggtacctgtgtcacaggagcccatcctgcctcccaagaacacaaagggtaccatcacctactgctgacctggtcatcagcagagacttctctcttccccttgagtcgatacaaagaaccagttttcactcaaccacagttcaatattcaaagctcccctaaaaaggggataagagcttacagtgtaacccaaagaggggaccattcgttgagtgcgccttcctacaccagtaagtccttctcttataccactatgacaaatccatccatttgggtaatcttaactgaacatctattactatgatccaggtatgatactatctgctaaggcacagacatgaatagaatacatccccctgttgttaggacattcacagaccaaaagcaagatgctcacacaaatagagcactacaaaacaaattagatcggaggtccactttattctaggtgcagtccgaggagatgagaactgtatgcaacaaattcacgttcaaggtcagtggggatgcaaaagattctgtgatcagttctgctcccacagggaaagggtcaaagatggctgcacagaggaggagatgcctgagatgggtcttgagggatgaataggagtttgctaggcagacaaggagaaagggcattctgggaagaagggctgacgtgtgcaaaggctgcagtcaggtagctgcagcacacagagggaactgcaggtgggtgaacaacatgaatactttaagggtgagacgcagcctcgagttgtgcggcatgggccgggggagggggggggaaggcaggtacgtgtgttcttcctttaagaggtcagtgtgtttccacttcatctgtgatgaatgattctcacagagtctttgtgaaggtggaagtagatggaatttttctcgttctttcacagcagaataactggttcccttgcaggcccctcttctcaacctctgttaataacccacccctcaccagagtaaaatattgactctaggataccactgcattcaaaccttatggatcttcctagcaaccaagagatcaccgtcaaactcactccatcctgagatacagatgtgaaagaaaggactctgccaacaaggacttctgaagccctatttctcccctgaagactatacactggttactgaaaatcctgatggtttttctatgcagagagcaagtgacccaattagacctgcttcgtagagagttgcaggttggaggcgcttgggagctgcatgctgtgtgtccatgagagacatcacaaggcaacgacagactaagcccagttgtattcccaaagtaaaatatcttgttgccttccttcatgcctggcaagtgtgccgagcacaaggca

SEQ ID NO: 27265 - DNA, 2925 bp, Bovine  19866880410650
  misc_feature (1)..(1): n is a, c, g, or t
nacccctgaagaaatgtagggacctggcccctggcagccctggcccaggaaccaagtgaagtatttccctgacaggtgccaagcatcgtagaccctttgggattgccactggagtggatatcatagatggagaacaccaggctggccaaggcaatggatgtcaaaatatgcaggactatatgacaagccttatcgcccaacttaagcttcttttagcttttgcagccagtttcacagacacgcaccatccacagtggggtccagaggaccccagtgaatagtgagatctcaaggaaagtgagtccgctgagcggagcaggaaggagtacagcctctagacacagtgatccaagtgaatgctgcctccactgcttcctaacctcctacacctcaggttcctcttctgtgaaatgggataacagcagtccctcctattgctttaggttgtcatcaagatgaaataagtccatctttaaaagtgctgccaacaaacctgggaacatgtaaagtgcctcataggtgtctgttattttgtgtgtctggatttcattcccagagtgaataagccttcataataaccagaacgatagctcacacgtatccagtgcttttgacatgcaggcagtgaactaagccctctaattggattactgtacttatttctcacacaaacacccacggcggtgtctgctattcctgtgcccattgtacaaagcagacgagaggaacgttcagtaaatgacacctagtcggctgactccagaacccaaactcctcaacacgatacgccagtggcatgaaaagcacccagagtctcctaaaaaaggttgatgtggggcttccctggtggctcagtggtaaagaatctgcttgccaatgcaggagacacaggttcgatccctgatccaggaagattccatatcccagggagcaactaagcccgtgcaccacaactactgagcctgcacgcctacagcccctgctctgcaacaagagaagccaccgcaatgagaaccccacacaacaacgggaagaggagcccctgctctctccacctagagaaaagccttcacggcaacgaagacccagcatataaagtaataaatataaaaattatattataaaaaaaggctgatgtggggccctatctcacaccaagtattgagcccagatgcacctgctcttgagaggcctccagggcagactgagccttcaggaataaaagcaaggggtatccaggggggctggtgctgtcaaggctgggtcacatggcctcaatatccccccaagaataggaggctgcccaccataggcaactgtgccctctgcctaccctctctgaaggcagcaacccctcaaaggagttacatggtcagtggccgtcaattttctttctgcaaccttgccatctgttgctgctgctgctgctgctaagtcgcttcagtcgtgtctgactctgtgcgaccccatagacggcagcccatcaggctccaccatccctgggattctccaggcaagaacactggagtgggttgccatttccttctccaatgcatgaaagtgaaaagtgaaagtgaagtcactcagtcgtgtccgactcttagcgaccccatggactgcagcctaccaggctcctccgtccatgggattttccaggcaagagtactggagtgggatgccattgccttctccgtgccatctgttactctgcctaaattaagctaatactaagatcgagggcaggaggagagggggacgacagaggatgagatggttggatggcattaccaactcaatggacatgggtttgggtggactctgggagttggtgatggacaggcaggcctggtgtgctgcggttcatggggtcacaaagagttggacatgactgagcgactgaactgaactgacagatcaccctactccacttattttgttttcttttttgtaatttttttacgatagctctttatttcttttggccacatagtgcagcatagtgcacacagtccctagttcccagaccagggactgaaactgcaccctgcttctttggaagcatggagtcttaacctgtggactatcagggaaatccccgctcttccaattcttgaagctaacatttcttaaaaaaaaaaaaaaattaaaattaaaaaaactccaaccagaaatactactaaataaaaatcatcagctatttaactctatatgcacacttacttaacaatttgcatatagaaatcaagactgctaaaaattaattaccaggttctgaatacttcaaacatgtatgggaattatttagagtaaatgaacttcacagaacaacaaaacagtaacaaatcaagctgtcggtgtttatttaatcaccaggacgcatcttgtttttgaaaaacagcagactcaggattgaatggggataaagatggtgatggagcgtgccacttccatgtaaatgctgcctctccaatatgctctttccagcacccctgaggctgtggagactgacaggcacccacacctgtactgggcagggcggtgcggctccactttctagaggaaataatcggagaccagaataataagtagtattcgagaggccctttaatacggtgcagggaagccacgcaggggagggggtagtggcagagggctgagagggagcgacaaccctgaccaggggcagaagcctccttgtcaaggtgctaatggtttctacagactgtgctccaagtttctctctccccagcgcatgcctggtgataagactctgcaatccccacaagatgccaaagccctgccacctccgtttctatcaaatacctgcaggactcatgtggattcaagcaagacagtatgcccaacaagtacccatggaaggttaattgcatctttcctgcccattcataaaaccaatcaagtgtc

SEQ ID NO: 27266 - DNA, 1331 bp, Bovine  19866880417885
  misc_feature (1)..(1): n is a, c, g, or t
nccctcctccaccaccgttcatgcccaaaatgagacactaggagcaaaccggtaagtccaacatagctaatttacacatcctgatcatttgacatgaatgcactaagatgcgtccactagagcagctgtgaaaagagtcgtcataaaatcacaggccgcaaaatgttatcagtcagtgtccctttctcacaacttgtattcagtgccttcccccattccccggcttctctgggatgctgaaggcaaggaccctcactctgcattttcaccaagaaattgatttcccttcaaaagagggatggaggagaggaagaaaatggagaaggggagagaagaactgaagggggaaaagggaagaaaagagtattttattacataaagcatcatcccaacagggggatgacaactgagacagtgacatcacccaacctgcagaataatgtactattattctaattcaccactgaggtaactgatacagagatcagtttgatatgaattaattcatgaggaaattgatgttgagtaacctgtccgtggtcacacagctgataagtctggatttcaatctaggtgagtctcacaacaaaggagatacttggagccaccacaccactcatgagaagagcttatgatgggggataaaagtaacgattaccgtgccaggcagcagcacacagaacccctctgtccaccctccctgagaatcatgtcacccataggacccccatgaagacccgccttctgtgaagaaaacatggtgccaacagaagtcaaagcgaaatgcttggatatgtgtataaacttatatgatttttataatgaacacaaaagtcaaagtttccttccaagtcaatgctgatgtccagtgaacttaactttctctctttctctctctgacataagaaacaacgcggaatgcctgagccttgtggttccttctgtgagtgggttttgtgacgcatgtatacggtgtcactgggcatgttcaggatacctggtggtgccatgggacaaggcaaggcagcacgagcaacagacctgagaagagtcacagctctcaacagagggacaagacaccatgcacagagaagtcttaaccttctcgtccattaacatggccagaatttactaaaatgttgtaatagtgaaagctcttgggttctatttaactgtaattgacagaaattattcatcagacatttatgaacgaagaagacagaatcacttgagaccagttccataaccttggaaaataagaggatataaaaagcacaataaaaatcaaatatttctaggaaaaaggtatacttaaaagagttctaagaatt

SEQ ID NO: 27267 - DNA, 1697 bp, Bovine  19866880430242
  misc_feature (1)..(1): n is a, c, g, or t
ncatgagctcagggaaatctagatccacaaacagtgtacagggcaagaggcaggctgcattaaatacactggcatgaggctcccaaaccttcatgggattgaactgaaggccagaggacatcaggtgaggtggtctgtccaagtgactcggagtacagcttgcctcagatcccaaatctgccacatcctcactgtgtgaggctctgttttcctttctgtaaaatggcataatagtacccaccacatagggtcattgtgagggctgggctgatgcacacaaaacactcagcacacaatcaataactacatggataagaggcatagagcagcagcccaaggaagaccagcagtcgtgttagcatcattgggttggtaacattagttttgttctgctttttcatattcctctgtctctctgtcagtctagaagtttgtacatgcaagtaccctattcatacccatacatccatacatacatgtatggatatgagagttggcctataaagaaagttgagcactgaagaattgatgcttttgaactgtggtgttggagaagactgttgaagttgttgagagtcccttgggctgcaaggagatcaaaccagtcaatcctaaagaaaatcagtcctgaatattcattggaaggactgatgctgaagctgaagctccaatactttggccacctgatgcgaagagctgactcactggaaaagaccgtgatgctgtgaaagactgaaggaaggagaagaaggggatgacaggggatgagatggttggatggtatcaccgactcatggacatgagtttgagcaagctccaggagttgatgatggacggggaagcctggagtgctgcagtttatgggattgcaaagagctggacatgactgagcaactgaactgaactgaaccccattcactcagtggttcaacatctgctaagttctagactcactaagcaatggcaccccactccagcactcttgcctggaaaatcccatggacggaggagcctggtaggctatagtccacggggtcgctaagagttggagacgactgagcgacttcactttcacttttcactttcatgcaatggagaaggaaatggcaacccactccagtgttcttgcctggagaatcccagggacggggcagcctagtgggctgccatctatggggtcacacagagtcggacacgactgaagcgacttagcagcagcagtagcagcagcagcagactcactaagagttgcctggcccctggggaactaatgggtgaatgaaaacacagtttagcccagttcagcatttcaggccaggggattaggggaagggatgccaagctgaatcagatcaggatggtcttacaatggacccttgtgagctgcttgctatcccttggggccttcattgcctcccttggcaccaccacacctcaaatcatcacatcagtacatagctaccttttcaagtcttcccattttataccctgattatcatgcccctgatattcagtgttcacaggcacttaatcaagatgctgggctggtttattacaacatcttccagctgatatatttcctcttatctgggaactccaccatcgtgcctgttagtgtttaaaaagatcatttcgaggtatcatttcgcttgttcccgatgataattaattttaagaacttatcaagatgttaaggg

SEQ ID NO: 27268 - DNA, 1087 bp, Bovine  19866880433924
  misc_feature (1)..(1): n is a, c, g, or t
nttttcttggctctttgaaagttggataatttcagattatatcccgaaagttataaatgttaagctgtgagaattttggaatctgttatttttaccccatttttgttgcttctttgttttagtgaatacttttcttggatgggcttgaattgcaaattctattttgagggcagcagctttggtcttaatgcagattctttgtttttagcttagctgctctgaatctgttctgtgcctgagtcactcaggggttatacagagataagaggaaacagagtttatagatccctgatctggccctttccctttgaggatccttcctctctttagcacctatgagtgcccaggctcacttttctgattccccagggtttcatttgtttgtttcctgcaaccccacctgtctctgtgcacgcagttcagctccacactaatagccttggagatggggatttgtgtaactctctggctcctcctccaagctagcattccctcctcaccagttagtctgctaacgttcactttctggcaccttcaggcagttggcttttctattacgtccagtattagcaggtttttctcttcaggagaaagggagctgtctttgtcatatcagaagcggaagtcttctttcagaattccatcaggacactgaagagtagaaggatccaatgttagtgtctcaggctccagactggcatagtcctctacttgatataaactcaccagtaaatttccttgtttctaacactactaagggcaataggatcagatcacttctttttctacagaatgtcaagactcactggccttctgaataagcagcctcaaagtaacatacctacactttgtggaaagtttttggctttcggatatgtttagaagggtatgagttaagtctggcaattaaattttcttgttccatgagtaggatacttccctggctcttgtcaccagtattctccaggaaggataatatatatggtcttatagaactcaaacatggagaaggcaatggcaacccactccagtactcttgctggaaaatcccaggacggaggagccggtaggctgcagtccctggggt

SEQ ID NO: 27269 - DNA, 2782 bp, Bovine  19866880519839
  misc_feature (1)..(1): n is a, c, g, or t
nctttatttagctctaactatgaaggttacacagcttagtaagaagcttctctacaggaacattgtgtgctcccatcagatgtgtgataccagccatggtaccagtgtcacctatctaatattttgaagtgagaatgtactttctcttccaagtcatctgtcatggagagcttgaggggtagaaaaacagcagtatgctttccttgtggttctaaccagtgggtgggcatatgaactcctttggtgtgcaccttaacccctttgctttgagttggaggacctttccttgcacagagaacatgttgactctcttattagttaattatttaagttggccccatgacccttccctctcaaggtctgaaagccactcctacattcttgtttctcggctcatgtacttctaaagtttttagaatgtatttttagaacaagtatgcttataagtaggtttttgacattttcaaatattagaattggagcatatttttttctgtatcaaatgcacaatggcagaatgtacccttaatttcaaggagactcattgaaaacttccatcttgatgcataattaccacgagtcaaagtggtcatgattagtcagtcaagcctcacaattaaaatcctctgtttgatgaacttctgaaataaaatgccattatcatctaaaacctcaataatctatgataatgaggctctcgattaattcttttgttcttcacaaaaagattaataatgttcatatttttttttaagtatcaacatctgcaagaggcaaaccatataaaccatatgtaactaatctcttccaaagggagcaagaaacagattttggcatatgttttatggacagctagtattgccctacaataattgttcatgctaattatctttcttgaattgattacgtttgcaataaattattatctttatgattattgttagtttcaggaaaatgttcaagaaataaatggtggttagtataaatgaccttgcactaagctagtatttcagataaatgccacattaagtggataattgctgtgatctgatttttacccttcacagctacttctggtctagctgctgctttagaaatcctgagcacccaggtggaattctacaagtattaagaatacatttgaacagcttagataagtcattaagtttatgtggaatattgtcctggacattatcatgactttaacttaggtggccactagtgactatagtgatgacctttatttgttccaaggtaatgatccatcatgaaagccaaggacagattatatcttcatttacctatagggcccatggctaaaaatacaatatgtgtgttttgtgctcagtcgtgtcttactctttacaacccccgtggactgtagcccaccaggttcctctgtctttggatttcccaggcaggaatactggagtgggttgccatgtccttttccaggggattgtcccaacccagggatcaaacccaggtctctcttattgcaggcagattctttatcatttgagccatgagggaagcccgatggaagagaagagattcccaaatatctaaaattcttcaagacctctgtatagacttacttgaaatatatagatagatagatagatagatagatagatagatattggtatcagctttcaccttctcacaccttctcactgccaacttcttccaaagaacatgtccccagggctctggcttttgttgccatagctctgtcattcctgggacgtcatctgtcacgtgattgtcgcaggaaatgctgctcgggtgcctccctctgggcagcttgagccggggtttagcaaggagactttgaggggcagagcaggctttgaaggagtcttcgggctccaggcactgcgaggggatagtgctccatcgtgggaaagaggaacaagaggcacagttaccattttcatcatctcagtcatttgggggatgagtctggaaagcacccagggaatccatctgacctgaaattctcagcagaaaatcacgtgctcccagacgtacaaggatgccacccggaaaacctccttcagagccacagggcccggcttccacatgggcagctggaccgagccatctcagatgctcagaggcatcagagcttcaggagaaaggcccgagggagcacaaggaagacggccctgtgttctcagcacagcgggatgcgagagtctgcctgcctggagctggatccctgcctgcaggaggaaccagtgtgaggaatccatgcttagtccacagcagctggtggcgactgcccagagccacccctggccaagatgcgggctcgagcagacctggagcatttaaggatcttaggatccaggggctgaggcatgagattgtctagcatctccacagtggttacagtgagaagatggagaggctgtggatgtgggggaatgtggatctgataagtggggatccagtccccgctcctcctgtatggcagtgactacataccatctacaaggtcaggcagcctcttctgcttggcctcccctcacatattatgtcaggcaggaattgtcaagattcccattttgtagagattagtgagacttcagttaggacaggtaggtcacattgatggtaagcaacagagatgaggttcaaaataggtctctgactcagtatcccctgctggcccttacatagactgcagagcatgaggagaaggcgggtggtctctctaatctacagggtcccctgaaagccctggctgggacatgggagcctctgcatcctgtga

SEQ ID NO: 27270 - DNA, 1308 bp, Bovine  19866880552049
  misc_feature (1)..(1): n is a, c, g, or t
ncaaaactcagaaaatcttgcaactaaagaaccaaatgagaaaaccaactgctcctgctcaaggaccctcccctctccgaccctagccttaccaatgcttagttcagcgtgctggaagaagctaatatgaaaacagaatgtaatttaaactttggtgcttcggagggtaattaaagagttgggctggactggagttgtctttggagcaagccagcaggcctctcagaaatggagacccagtgccggccctttcaaactaatctccttcagccctcctaggtgctgtttgtgcataattacttaatcagagcagcagtggatcgatgcactcagagtgtttgcaattagcgtcttctctaaaaggccttcttcagggcagaattagatgctgagctggatcgacacaaggatgccttcctgaaccgcgttgcctagggtccagcctcctctttctaccctgccatcctcatgctgctgggagccttcagttacacgtagtcttctcctccccagtagggactgggtcccttgtgctgctggttccctccagccagcagcaagtgcaccagtgctggcagggggagtgtgcaaggagcacagaagagcgggtgctgcactccagggagctcgaaagacaggaaggaagagctacaattgctccttgggctacagttttggggtgctgatcaactaggactgaaataggtgagggttgattctgcttagtatggttttaggaacaataaccagtcattctgctttaaaagaatcctggggaggcaggagagagtaactcagctctggaggatgacagcactgggctcagatgccatcctagctgagactggacaggggctttcccaatggtcagtttcctcatgtgcagaatggaggtgatgacaggaaaagtttgcagctttatgggaggattaggctagaacagatttaagtgttcagcactttgaaaccactggctctgagattatttgtgtctgtggatccaccaaatgtaaaaggatgggactccagatcatgagcatggtattttcacatgaaacgatccctgaagccagctagtaagacaagattcctctctgctgtttctcagaggttaggcaacatctccaaggtctacaaacccaagtcccctgattcgacattcacttggcctactcacaccccagatgcctgcacccgggggcactctggccccatatgcaagagagacactcttccccaagttaaagaccacacacctgaaacaaaggtcagaaccacactcccgaccctgaatacaaacaggagtat

SEQ ID NO: 27271 - DNA, 827 bp, Bovine  19866880567032
  misc_feature (1)..(1): n is a, c, g, or t
nattttataagtattaaaaggactttctcttcaaggggtgtcaatctattacttataatgagcaataaacatatcggaaaatgtgttggatgaaagaaagtggtaataaatggctttaaattaataggtatttcatccagcactaggcacggagtattgcttgcaaatcaattaaaggccaaaggagagctgaatcattgaactctctctgggtttttgctcacagaggttttcctccaaatgtagtttatctgggaaatcatgagttctcaggtctccaaggagaggcagcttaaaattcagctgggtggtttcatgatgtctcaaacaggctccataaccttcatgatatacaaccttggaatttgtgtgcacctcgtcttttctctgaggcagagattcaacatatttgaactgctgaggtggagaaagtgacttattaatgtttcttagcctacgactgtgtctgttggcaaatgttaggggcagaaatgtgacttgcgtgccctaggtaaaatggtgttcatgagccctcctttgtgactgagcaagtgtgtaagtgaagttttatttcctgcagagaagcaggtgaatcagtcagcacatccacatcactggtgtctctgccctgggtggcatgccttggggttaggaagaaattctgtcacaatcaggcgaaatatccaaaacaagcctgctctgtgatttcccatgaatgctcttgttttctgagtcctagctttccccctgtgagccctacttatgacagagggaagattcaccaatgggcaatgcttgtttcctctttaatttcccttttgtcaggg

SEQ ID NO: 27272 - DNA, 1889 bp, Bovine  19866880574145
  misc_feature (1)..(1): n is a, c, g, or t
ncgtctgactctatgtagccccatggactgtagcccaccaggcttctctgccaatgggattattgtggtaagaatactggaattggctgccgtttcctcctccagaggatcttcccaagccagggattgaacccttggctcctgtgactcctgcattggcaggcaaattctttaccactgagcctcctgggaagccccatgatccacatagctaacaacacatattgattccctacagcatgcagacccttgcatgcttttgttacagaaacaattcatgaagtaatcaagtacaaattgggtataagctaaatatctggatttactttcagcaaaattagccaacgatcctaatatttcttagtattacttggtattaattatatatagcataatatataatatatatatcagactttccaggtggcactattgataaagaacctgcttgccaatgcaggagaaaggagagactcgggttcgatccctgggtcaggaagatcccctgcggaagggtttggcaacacactccagtattgtttcctgaagaatccgatggacagagtggagcccatccatggggtcataaagagtcagacatgacttaagcaacttaacacacacacacataatatatgttacttggtaatattcttagtattatatccgtaatataccactgctgctgctgctgctaagtcgcttcagtcctgtcggactctgtgtgaccccatagatggcagcccaacaggctcccctgtccctgggattttccaggcaaaaaaactggagtgggttgccatttccttctccaatgcatgaaagtgaaaagtgaaagtgaaatcgcttagtcgtgtccagctcttagtgaccctatggactgcagcctaccaggcttctctgcccatgggattttccaggcaagagtactagcacagcagtttccaacaaatcagtcagccattcttttgctggttcctgcagagcacagttgtgaataagacatccatttcacctgagcagtcttctgagggatatgaagcagataatagcaaaaaaaaaaaaaaaagtacattacagggttattgtgtggttagactatgggaggtccatggaactggaggatcatagagagatgcacctagcctagcaggagtgacagaagatgtgtggtagaaatgacatcacagtcaagttctgagtggtgaacaggattcaagagaactcaagtgagctgggtgaggactgggaaggcacatagagagtgggttctgggttcttgacaatgagagcatgtacataagttccgaaggccagcaagagtatggcatgctttgagaacaatactggatgttagttcagtggggctggaccatcaggtgcagatagtagctgagcctgcagagctggaaatttggcttttgcactgaaggtaaggagagccattacagtgttgggaggggagggatgtgctcagacatgaatgttagaaaacgtattgagatagcagcgtgaactgccatggggggagttgctggaaatataacctaggacgaagaatggcccactccagacactcttgcctttccatgttccctgcaagtaaaagcccatctgggaaccaagctaacagttgaacaggattttcaattattctggagcaatgctataatctacttcctatgagaagaatgctgtttgccatggctgaaaatgctcaattggtagttctctgggagaaagtactcaatttgcaaaaatttaaatacccacagagtaaaaacaaaagcagctaataagaaatatgtcactgaaattgaacagaagctagaaaagtccaatttcttgttttactttatcttttcaaaagctggttccacagccattta

SEQ ID NO: 27273 - DNA, 1206 bp, Bovine  19866880606005
  misc_feature (1)..(1): n is a, c, g, or t
ntacatcttgaagaaaaaatattttttaactaaaagcacgcaggagtgggtctgtccttttcatgtctgagacaggatagacagcctggatgacagaaataaaatactgagaaagggtctcacagttcagcttttattaaaattaaaggaacataaattacaggaaactagaacacgagtcctgttaaaagaatacatgtgaggaactgttttcctcagctagcactgtaaccgatggagcaggtgacaagtgttctttcataagctctgtggttcctaccatccaagcagagaacacccgatcaagggcctgactcatgcagtgtggtgtacagggcgtcagggatcaagtctgcctgccaatggacagccacatggacacagcacccacacagacataacagattcagtgccttgaatttgctttcaaagaaagtattttacacattatgtacgaattaaacaagaagtccaacaaaggttcttattgccactgaaaaggggataaaataacttgaaatctcataaccaaaggtgacaacgtagcaccggggcactttgctgctccaaatgctccagtcccatgaattactgcttggccaatgctgaatctgtaagtcatgagccccatgacaaggggtgcacaggggctctgaggttgtgattatccactatggaagagacctctgacactcccaaatgtcagaggtgccgcgagctctcctgcttgggcaatagatacacagcatggctgaatatgaggggcttaggactctaaatagtgcaaaaacttaaaacaaaaaaaaatacattctaacctcctcgcctctctcggcaaacagaaaaactccagctaattggattatgagtttgctcagcttcccaacttgatccaccaaggtacgaatggggagcacagaggcaagtcaaatggcacctgtcccaaaaataataaagattctttacatgagactaatcgccagataaatacacaaaatagagcctggagtgtagacacagctcaagagacgagtaagttgtaagtatagtatgaacatctgcaaagcacacgctgatcacattcttagcagggtccatgaccactctttgcaagttccttgacaagatgctttctcaagagacatacatcatccagcagcaaagggcttaggcctgaagctctgaagaacaaagatataggaaaga

SEQ ID NO: 27274 - DNA, 871 bp, Bovine  19866880613002
  misc_feature (1)..(1): n is a, c, g, or t
naaaaaacacttaaatatagtattgagaagaatatagaaaaaatatttagtaacagttaagatttcttgagaattctcatttttcattctcaaattggaaaattattatcagttgggaatttggaacctgtgccttggaggtcctctcctagctttggaggcaacctactttcaaaagatggggagtcccttagccctcatatatacaggagagccctctacccacttccctgctgtctttagacatttttgctaattgtttttcaagtctgaattagaatttctcagtctattgaattcgtgctgcttaaaccacatgctatttttgtcttccagttagtgctaataatttccagaaataaaaggagaaaattctgaaggtccaaattaataaattcatgtatttcactgagcacacccatgtcccaagggtcaaccatgtttccaagccccaggatcacaaatatgattaaggcccagtcactctccttgaggaacatgcaatttgttgtggaagatagacacacagtgaactgctttgtgctgtggtgaccgtcacagttggatatgaacgtgattaacgctgggcttccctggtggctcagtggtgaagaatctgcctgcaatgcaggagacatgggttcaatccctgggtcgggaagaccccctggagaagggcatggctacccacttgagtgttcttgcctggagaatctcgtggatagagttgcttggcggaccacagtccatagggttgcaaggagtcagacacaactgaagctactgagcatgctcagatgcacgcacatgattaattcttcttcgggtagggctcccagagggcaaagaaactgcatgggaagcagtcaat

SEQ ID NO: 27275 - DNA, 1745 bp, Bovine  19866880624605
  misc_feature (1)..(1): n is a, c, g, or t
naggtctgagaggtggaggccctttaagatgcagcctgaggatgtggctgtcactataagaaggaaggtcactcagtgaccctactgcccttggatcctgctgcagttaaccagctgaaagggaaagaaaaagaggctgtgaactgctctcttcattaggaagcttttcctggtatatccttattgtattgatttaattcatttcaataaatatcttcaaggatttcctcagcaactggggaaatgatagcttgttacataataggagtatctgattaggactcaggaaacattagtcaagtctcagctttactttgtatttttctgataccctctgacagatgatgtgatttctctgagtctcgatttcttcatctgtcaaggaaagctaatgatgccaagggtgctgggaacatcttcgttcagtttctgcacttaaatgagggccgattgggggccagtgagcccttgacatgttagaatctttggcttcttttgtcacttacgagaaaccttgtgggtggatggggtatggcttgtggggagagatggcagaaaggatcagagggaaaaggggttcaggaagaagttctctgggtccttcacggggttcaggtatcatcagctggccggaaacaggttaacttagggagagggacggtaagatgcaggggccttcttggtgaggaaaagggaggaagaccagatgaggaatccctgtgatcgccattctgtgaacgtttgtacttcatttgcctttaactgaacagcccttgatgtaggtgtctcgttgcctccagtctgcagatgggagaagcagacctaacagaaggcagatgaactgggattagggtgaggtctgccagactgtgaggccctcactcccagccctgaatggccctaccttgtagcgacagaaagggatgggcttgtgttgatgaaacaatggtcagatgtaattttctgctcattagattggcaggtattctaagaaccaagcatgcttggcttggatgttgattgtgaggttcaaatgagcccatgagcgcaaggctctcctttcagccggcgttgtccgcgtgtctctgctactgtcatcgtcactgggtgtccacttccataatggctgagcaggggtggtggggccattctctgtacaggtgcgcacctggctttatccttctttgttcccgtgtgaaaggcaaggttctttctccgcagtgtagagagcaaaggtgctcttgatgctcaccaacaaagtaactcagtgtttatcagtgtcctggtgaacatggacctctctctgatcacacctccctccttctgctatgggagagtcaggaggggagtggcttacacctgctgcagatggcaagtgggatcatctccctggagctgaacttctgcttggggaaatgtcactttcctgctcttgcctcccaaatgcctgagggcggtggattgttgtggccctaaatttaaatcttgatttttttttttcctttttagtaacttatgggtcctttctgacagctacttaggtccactttgtaagcactgtcctctgtcacctgccctgcatgtgtttaggagagggggtgagggtcaggtggaggtaggtcttaatggtgctgcttagggaaccctccgatgggcgacctcctctcatggttcattgctctggataccaaaggtccctcctgttagaatcacacatttgtctgtcttctagatattaggaaatt

SEQ ID NO: 27276 - DNA, 3653 bp, Bovine  19866880661887
  misc_feature (1)..(1): n is a, c, g, or t
naagttgcttgactctaataaaagattcgtttatgttaactcaggcagaggagaatatttgtcggcagggtgcccccagtgtttgatgtttgcattccttttaagtattgcactatattatgtgattttattcagtttctatatttagtccatgttgctccttaattgtagttatgaaacaaagcatatgtgtttgtgagattcttcttaagaacttttgtgtggtttgttgcccaagctgaaagactgctccctggtggcagattctggaattgcaagcccatccttttgaggcgttagcaaaaacaatggagaaggaaatggcaacccactccagtgttcttgcctggagaatcccaggaacgggggagcctggtgggctgccgtctatggggtcgcacagagtcggacacgactgaagcgacttagcagcagcagcagcaaaaacaaaccgcttgaggaaaggagtgagttttctgtgttgtgttttcttttcttttttttttttttgcaaattcccatcccagactacctgaaacaaagtcttttggagagcgatctggaaacctgcgtgtagagtaaacccttcagataaaccttatgcccagagtggtttgaaaacccattgttccacatctaggtttcttaaccttgacactgttaactatttgggctggaaacttcctgtgagaggctgtcctgtgcagttaggatgtttagctacattcctggcctctccccattaaatgtcagtaacccctccccactcccccatctgtttcaatcaaactgtgtccagacatcggccaccgtcccctaggggcaaaatcactctctcttaagcaccactgctctgatgtgtaccatgaacatccagcccatttcagagacagcacgtgtcacaaggtcactaaaagctaagatatgtcaagtgtctttacaggaggctattaatgcaaatgtgggatgacttctgacttgtagtagaataaacatgctggctttatgacctatgttttgattctgaaacagccatagaggagagtcgttcatgaaggatgtactggcattaatgactgtacacttggacaggggcatctgatcacacccgccgagaccacccatgtactttcccaggctcacatgttggctagatgctgcaggtgcctggaacacttggaggagggagggagggacgtgtaacttcatttctcttagaagctttccgaagtagttaaattctactagcttttgagagagggctctttattgtgtgaaatatccttctgtactgcaaataccaattccaagagcgttacggatgacactttctgtgagacagagaatgcactgggcatccatgtggaccacagtctggttaaatgaacactgtgaagtctgttctgggagctagagttgaattctccagtgtacacctgttgcatccagagatcaacacctgaactgaacacctctagtgggaatcagtgagccagggcaggcccctctgtgctcttcatagcagccagagctgagccttctggtcttcttatactgggacagtgtcttgttggcagcctggtatccagggacccaccacagggtgagtccttagtattgcagaagggattgacagcttgttgtctgaaagaagagggttggcagtggccctaaagaagacctgtgtgtgtgtgcttcctgttggagttggggtttcacacagtggggctgagagcctggagcctcctgggcggctatgatgggggtttgagcagaggcagctgaggtggttggaagcaacacttccaaccttacagaaagcaaccaagtgctttctgtaaagctctctgttggtcctctgagtgaccaccaagggaagccccttgccttcagtccttgcttcttcccctgctggactggagtgttgaacttgagcaactcccactgtgtgtggctcttgtgtagagatggactgtgacctttgcatttctactgctctgggtgagcctggactacaggatcctgagcagggaggggaaggaaaccttttgtgatttctgatttctgtctactctctgctctacccccccaactcctcctccccgacccctgagactctgcagatacagctgggcgtggacacagaggcttgacctggaccaggtatgaagagcctctattcaccgctccctttcccctgatgattggtgctcctgaagcatcttcctctgacacctgtggaagtggataaacttcatgatgtacttgaacttggtcgaaggcacttctgctcaaagacagttacctaccagctctctgatgtctaaaaaacctgctttgggagtgtggttcttttgctttaatactgaatctaggacaaatcatttatctggtatgagtcattacattttggtgcgaatgcagtggagcttatttcctgagatgagattgtgctgggagaggtgggtatagatatttcactccccagaggggcaggccagcacaaggagtggaaaagaaaagctgggaggaactaacagggcacatgacttggagaccagagctgatagaagaaatttccactgttgtcagggggcaaggttttcagacaccttcctcagccacaaattgtggactttgaatagctaagcatcttccatgtcagcctgctctgctcttcaggtctgaaactctagtaagaattgttttattgtaaataatccgtgaaggtcctcatttccttgcggggcctccagtttctgctgctctatggcatgtttgttcattacttccattggacactcttcattggaaacgcagtcctgagtaagtggcaagaaggtcacaaaaatgccccttgagatcacaattattccaacccctagtggatgcaacagtgattggctgggccactgagtgaatttatttatgctgtcactcattcatggcgatgaattttatgggatgagctgaaagaagtacccaagataagatattctttagtaacctgaggaataatatgccattccaattcttgtattcaattttattttctttcattggaagaaattcttattctgagagaaatacaggagcgtacgggcatactgtgatggcctagacaggtgaacagggatcaggtggtgcaattttcttgccatagtgggtctacttcagccaccatccttgatggcagtgtttttacaaagtgctttccctggaacgctggttcatccaaacgtcctatggacaagaagtttgtctgatcacggtacgtttttgcaaacctgtgcttgccttgtggggttggctgggccctgtgtgcccactgccctggtgccccattggcaagtgaccaagcacattcctgaggttaagggcaggagacattcttcagggaagaaactggtgcaccagttttaaaaccagccctcaactaatgtggccacagaagctttttgttttcttccctcgacatctcattagaaggagcaagtttttccaaatgttgctacatgaaatggttttctcttggggttagctgttcccacatcactgtgaacgcacagttttagtaaacccgttggtgccactggcagggagtgcagggctctgggagttgtctctgctctccagaatcaagaatcaatcag

SEQ ID NO: 27277 - DNA, 1455 bp, Bovine  19866880662266
  misc_feature (1)..(1): n is a, c, g, or t
ntggcctcctacagagatcaaagcaaagactgccttccccgccagggccctcccatgatggtttctgcttgtcatcactgggtatcacctatgatctgtttcttcctggcccagccagtctcttgagatccaaatgctgtgttgttgtttttgcagctgcatcgaaaagttgtatcactgggtttggtttaattgctattactctgctgctgacaaatttatacaaggtacagcaggaaaaaagtctttgggtacttccattttccccaaagagaaaacgtagcctttttcttgcatcatttgaatttttactgctaataaatgcctgctactgctttttggtgtgatatttaagtccaaagggatattgtggagtctgcatgtacatgatttaatgtagaacgtagaattttagtgttggaagggatctctgagggtttttatttcaacctccttgttttatagaggaggaatttggggttttgactagggaagtggtcatggcacagccagaaccaggccgaggttctggtttgtattgtggcctccttgtgttcaccctcttggaatttataaaactgaatttagttccacatacgcaaacatcatccttttcagagcataatacatctgttagcttgaagtaagtgtgtgctgagtccgaaagctgcgagaagtgactttctaccatgtctgaaaccctccatggattgttctccctttacccaaaagagttcctctggatgccatgtgcaaaaatcaacttttgaatttaagattccaaggcgctgttagaagattgtggattaagtcattctgaaaatggaaaacttattctacaacaagaaaaaaaaatcaccctctattaatccttttacgggaaataatgtttgcattcacctttgatgccctcttacctttactcaccccaaattgtatgagattctttagagacctcgtaagttactccctgtgctcttataagcttcctgaggtcctcctgcggcttctaactcatggccagtgcataggaggacgccctttaaatatggttgtactgaatttaagtagactacacagggttgaggaataagtatagttaaaaataaaatgcagtttccttaagtaatgtgaggagagtttggtaactgggtagaatcagtcctatgaggcttcaccagtgaggtgagatttggtcttggttctgaaggatgggcaaaaaattcatgaagacaactctagcagagcaaaaatagcctacttaggaggaagggaatacagagaggagaggaaaaaaagcaagctgcccagagtggagacaggcagcgcattttctgtggactgttgacctaactcaccatgagtcctctcattcccacacttatagtagtgggcccctcagcagccactgtcgtaaagcatctccctgatgcatatagctgctggacccaagga

SEQ ID NO: 27278 - DNA, 930 bp, Bovine  19866880683487
  misc_feature (1)..(1): n is a, c, g, or t
ntagttctatcttttccttaatgccagtgactcagcattcacttctccctggcctgcctttggctaagctcctgccatctgccttcctctggggcatcatcacacatggtagtctgctccagcaaagctgcccactttctagactttattaccactctctgggaactcaaaacaagaattactttggctatgggcgcacaccctggggactgacccaggagagaggctgccagacacagaactactgcctgtatttgctgattcattatcagcgtcagacaatctgctgtgagaatgatgataaatgtgtggtgttcttctgaaggaatcacccactccgagattaaagcccgtgccggcagcctgcttgtctgctgcctggagtctcatcccctcccatccctttttctgtagtgcagaatacatcttgaaagaagaaagtgtgtttggttaaagataataggagacccatatccatgtgatttagaaatgtgaacagtagatgtttttattccagacagagaggcagggacaaggtgagtaactgctgaggaagcagggaggcattggagagaggagccctagtggtgaacgtgtaggtgccccctgcgaatcattcaggtgagtcatctaagtgtgtctgaggagggttgaaggaaagccatcccgacattctgtggctgtgtgatggtcaccattacctagccaccaatcctttccggtgggcaaacccttccccagcttggttttagttgtccctgtgagtaaaatgagtcatctggaccagccatcccaagtgccctcataggacttcctttccgagttcattgttcagatgggctcagtctatgaccctgtctggcctggggtccccagtttctctaaggtgttgtgcacagggtgtgtggtcaccctcctgatgtcaaccgc

SEQ ID NO: 27279 - DNA, 1921 bp, Bovine  19866880688821
  misc_feature (1)..(1): n is a, c, g, or t
nctggccagtttcggtggatctatttaattagatttcaacacggcatctgtagccccagtaaattcaaataattaagcctcatgatttcctgtgtgttataaatgtcgctaaaattgccgttgcagaacagatcatttctttggtaattgcaatttctgtcatgaattgtttcatcacttacagcgattagaactttgaaataatttcttaaaattggactcaattgaaattttttttgcattgattctccttatccgtgtttttttttttttttttttcttttctctcttaattatttgtgctagtttacttgccttccaatagagaaggacaagggccagtgctctccaggagccagatgcctgggtttggagttgagctggaagtgggcagtgtccctttagaaggggagcccttcgctgtctggtggtgttggcccctctgggagcatgcatactaaaggcctttgggaagctcagactggcctgtggtgtcctgcagtaactgaggtctttggaggtgatcgtggtggctcctcactctttttggaagtagcctgagaaccgctgtaggagggattttgtcagctgagtggggtcttcccactctgatgaccagttctagtcatttggagcatctgtccagaggctgcagtccactgaatgagttgacagtttttgaggacttgcgctgtgcttagaatagtcttaggtgctgtggatccaagaacatttatctcagtcctcctctactgaaataaagatgatggctgccttcctggtgctcagggcttcgtttggctcttatctttcctgttcatcctaatgcatgattccctctaaccagacaaatgctctgtcacctctgctcatgttgccgttattgctatctggaaacatctttaaaaccacttctgtttcagcaataaatgttctttatcttcacatctagctccccgtgccatctctacttcagaacttttctcagactccaaagctatgagcagtggctctgacctgtgaagaccctgcattgtttctgcctctctgcagggcagatgttaaattctcctttgcacggtggctatttgtggatacctttttgactgcctcagggcaggaagccaaacaacttctgtctgacttcctgcagaggtaaagagttgtgtttacttgctgcaggagtgaaataccttttagaggcttagatttggggcaaatccacaagggacaaatactgctggacttcacccagggtggtggtccgccgtggtgtggtctgacaagctgtgaattcattaggatggttttttgcattttatttattttctaaagttatttttttgtaatttattaatttaaaaatgtggtaaaataagtataagattaccactgtagcccttttaaagtgtagtttagtctccttgagtataatcacattaagaggaccagtcttcaacattcatccccaaattttttcatcttgcaaaatggagacaccaatccccacctctgtagctccttacaaccaccattccactttgtgtctaatgaatttgaccaagctcctcagtgaataaaatcatatagtatttgtctttttgtgactggcttattcacttagcatgaagaacatctgtgttctttatatggttcatttacattgtagaatgtgtcagaatttccttccttttttaaggctgaataatactcccttgtatgtgtaccacatttggttgattcatttatctgttgatgaactcttggattgcacaagtctaagactcttgagagtcccttggactgcaaggagatccaaccagtccattctgaaggagatcagccttctttggatttctttggaaggaatgatgctaaagctgaaactccagtagtttggccacctcatgcgaagagttga

SEQ ID NO: 27280 - DNA, 3482 bp, Bovine  19866880695666
  misc_feature (1)..(1): n is a, c, g, or t
ntctccagactcctggcacaaagttgccatcagaagctcctctactatcagtgatatactttacactttacactttattatccaagccttctctgggccacaggcttgctcaaggccaactgtcctaactggatttcagattaaggagagtcactattagattcttgcaatagaggaaagccaaaggaaccaaagtagtgccttcctggaggaagaggtcccatgtttggaacttccagcagtagggtctcacctccttgctgggcctcctccccatacccaaagcttctcccatagcttaccaacagtccccacctctccattccagaaccatttacccaaccatgtacatcaactttgttcagaaccttccagctctgtgtggctgaggaaaaaaatcatgtgaggagaagaaactttataagtaggtttggtctagagagttcttttttccacactctatctatccactgggagcctgtatagcacagcttacctggaggcagtaagcacggcccatcggtcttccttctaagtgttttttccttcttttcttgcttttatcctccttcttcagagcctcactcttgcccagaaaatcccatgggcagaggagcctggtaggctacagtccatggggtgggcaaagagtcaggcatgactgagtgacttcactttcactttcaaagcctcagttcctcacaactgcaggcaccagaatacatacatgtgcatcaaagccatctggttgaaagtacaggcatcaggggatcaaaagacataaggaaactttctaggcttatggtagtgctccatatcttgactgtgacgatacaattgcatacaactactacattttatcaaactaaacactgaaggaggtgaattttggcaattatacctcaatatacctgggaaaaagaaaaataccacagtaccaggctccaccacacatctatagaactgggaccaaaggagcaggaatttcagcaaacttcatcagttcagttcagtcgctcagtcgtgtccgactctttgcaaccccatgaattgcagcacgccaggcctccctgtccatcatcaactcccggagtttacccaaactcatgtccatcgagtcggtgatgccatccagccatctcatcctctgtcgtccccttctcctcctgcccccaaaccctcccagaatcagggtcttttccaatgagtcaactctttgcatgaggtggccagcgaacttcataggtgacactaatgcacagctaaatggaaagcccacaaagaaaagaactcaggccattagaatcagtcagaccaggctctgaatatacttaccagaaatataacccttagcaaggtacaagtctaaatttcctcatctgcagaaagaagataataatggataataatagtacctaccccccagggttgttaggtttcaaggctatcaagcacttagcagagagcctggactgtaataagcactgagtaaccattagcagctataatttgcattgcctatgccaatgctaccaaactatagctctgtgagtccttagttttgaggtcgagaagtcagacagggtaccttgtgccaggaagcatagcccagggcctctcctggagttattcagtggtccctattaccaacaggtcaccaaggacgaggcaacactaaagttaaattaaggcccacccacacctgtatcaccaaaacttcccctcagattcctgactactttatgagtagactcttcctgtagctgcttagcaagcccccagcacagcaagccaggcaaaaaatgaaaaggaactcaaggtccaaaaaagtcaacaggtaaagagaacagcgtcttatccagagatgcctggcttccctcaggactcctcctgtgagggagaagaacccgtgccctgaacatattcaagagagtaatcacctgtggcatgttatgttgcactttaaagcttacaaagttcttcatgtccctcaactccttggacttaagataaaacatccactgaacagtaataacagctcccatcccttgaccttttactctgggccagactctgtattcttgcctggagaatcccagggacagaggagcctggtgggcttctgtctatggggccgcacagggtcggacacgactgaaggcgacttagcagcagcagcagactctgtattcaagactttacatgtagccctctcatttaatcctcccaataaccctgtgtaaagcaactattatccctgttttaaatttgaggtacacataaatgcaacaaatttttgtatgttgactttggatcctgccaactttacttaattttattagctctgatagttttttgattgaacctttagagttttccattaacatatatagtatcacctgcaaataatggtagttttacttcttcctttctaattcggatgctttttacttctttttcttgcctaactgctttggctaggacttccaatactatgtcaaataaaggttgcgagagtgggcatctttgtcttgtctgtgatctcacctttgagtacgttagctgtggacttgacacatatggcttttattgtgccgagttacaatctctctacactcactctgttcagagttatcaacataaacggatgatgaattttgtcaaatgcttttcccgcttctattgagatgatcatatgatttttacccttcattttgttgatttgctcttccacaatgattgatttgctgatattgaaacctggaataaatctcacttgattatgccaatgatcctttaaatgtatttctgcattcagcaataatattgccgttaatattttgttgacaactcttgcatctatgttgattggggatactggtctacaattttttttctggtggcatccttgttttggtaacaggttaatgctggctccataaaatgagtttagtagagttctctcctgttaaaactaataaattcagtgaagttaagaggatataaaaatcaatacaaaaaagtctactgtgtttctatatgctaaaaattaagtataagaaagagaaataaagaaaaataccacatttataactgcatccaaaaaaaaaatccccattacctaggaataaatataatcaaggagattaaagacctatatattgaaaactacattaatgaaagaaactggagaagatacaaatgaatggaaacatattccatcctcatggactggaagaatcaatattgttaaaatgttcatactactcaaaacaatccacagattttataaactctatcaaaatttcaatggcattttcacagaaatagaataatcctaaaatgtgtatggaactaaaaaaaaaaaatatccaaagccatcttgagagataagaacaaagctgcatcatcatacgccttgatttcaaactttattacaaagcgatatcaattaaaacagtatgattagctatccctggtgg

SEQ ID NO: 27281 - DNA, 2068 bp, Bovine  19866880705612
  misc_feature (1)..(1): n is a, c, g, or t
nccaacagggtctccccagtcttgaaaactctccagcttcttagtccattctgtagagtatacttactgcatcccttgtctcaccactcaccccttctgaaccctgccttttggtcctcgggtccacagcagcagtcctgatgctgaatcctggcttcctgtcttcctcctccatggctcctctggggatggtgaccaccttcttccttctgaaaactctccttcctctccttagtggattgccagggttctccacaaattgtgcccatctctgcttccttggttttctcacctgtactatcttcacattggctggttcacattttctatttatttgatatctcttgcaccttttcccagtgacctcaccttggtcctcatctacctcctgcactgcggcatctgctcacagggggtccttcatcttctcttttcctttccaccctgctgtaccccacctccagatcagtcttttaaaatcactgcttggaggaacatctgtccctcccttttggtataatcaaactcatttactcattttcctctgaactgggtttcactctcatgtatcttgttcccaagtcttgaaatacccacttcccttctcaatccaaaaagcctccctagcctacagggatatctaatctgtgataagagtaggggtgaggggagggggtctttctcactggcgttcacagctagccagcaaacatttatggagctcttattatgtatcaggccatcccgaaatgtttcatgtacgtgagaagatggacagttgtagaaaaagctagagaaatcatttcttctctggagaaattatatatattgatatattctaaactcctctttgatggttcacccacaagctaggactgcatactctctagttgttaactgttcttgccactgccatttttacgactctcttaattcctgatcttatgattatgataaaaagagtttttatagaataaagtaaggctttgaaaactggttattaatcctacagttagtatctaccctttaaaaatttagttcgataattccaaatagtttcatagtggaggctggtgttttgtgtttattaaagggaatgctttaaaatggaatcactttgaaatgagacccaaagcatggcccgtcttgttgtaattatgccatgtataatttacaaagaagaatgtactttcatgattctggggaaatgcttacaaaacaaaactcttcattactgtacatattataacttaaagaatttcttttggaagaatttgaatttaaaacatatgctagctactggggtctctcattggggaatatttacatctcagcacatggcataattacatttgccattttcaaaagcagttgggttatgtgaactctgagaagttcaccatgagatctgatgaattttggaaatgtgtacctattgggctccccaggtggctcaagtggaaaagaatctgcctgccaatgaaggagtgcaggagatgcaggttccatccttgggttgggaaggtcccctggaggaggaaatggcaaactactccagtgttcttgccagcataatcccatggacagaggagcctagcaggctgcagtccatatgattgccaagagtcagacagaactgagcacccacaagggtaaatttatctctagtgtaatgaaaagaattatactcttgatgtgagtgagatgagtgtgaagccagctctggtgtttagttagtagttagtatggacaagtcatttcatctctttcccaatcagggctactgtcaggaataaacaaagagtgaggagataggatgaagtccctcctaagtgtcaaaggttattgttgattggatttgtgagacctactattttcaaaataaaacaataaattttattttttaagtatatacttgagcatagagaagagaaaatacagaggaaaaatatagaaaatgtagatttttgctaataaaactcaaatgggtttctaagcattgctttgaaacctgctttttttcactttgagatgttgcaaacatttcccaaatcaaccttttgagaaa

SEQ ID NO: 27282 - DNA, 1151 bp, Bovine  19866880718104
  misc_feature (1)..(1): n is a, c, g, or t
naatatccacatgtatgctttcttgaacttctcttgtgcatttcttgggctccctcagaacttggcagctggattccaagaccatgtaggcagagagagagagagggaggaaggaagaaagaaaaggagggaggaagagagaaagggaatgaggaggggaaagaggaagggagggagagtgggaggaagagagaatgagaagctctatcacattctctgacttagaagttgcagatcatcacacctcccataggttgacacaaagctccaagtgcaaggagaggacctccctgtatgagttgtatcaagatcatataataaggaagaacatattttggctgtgtttggaaaatagaatctgccacatagctttttctaagtttgttgttgttgtttgggggtatatatgtattgccttctggagctgaaacttctaccctaagcaagcatttctatcagcatagatatttctctttaaactcatcattgatatcagctgtttcctcagtgagacattttgggtaataaaaaaatcaagtatgcatctcaagcaatatgaaccaactgaaaacattttcatcccaagcaaagcataactaattcagattaattcaaggaatggtgaatataaccaaagaatttgtagtataactgtgttccatctttgtattttctaattcgcagagggatgttccctcatggttaccatattgttgtaaggttaggccagacctaccttaataaataaacattttttactaacatacttactatttttcatttttagaattatttttattcattataaaataggttattttttaatctatgaaacatattaaagaaacagtaacaatacaaaaccactagtgtgtctaccagcaacagtaagaaatagatcattgccatttactttgaagtcacctcctatcatcccttcccctctccacttcaaagtaacccctgacttctgcgcttactgccacattaattttctttacagtttggcacatatttgtatcctttaaagatatttagtttagttttgcttgcttccaaacattttcatagtttagaaatattccttcacaaaatactatgttctcaagatttatctatgctgttgtgtgtagctggattttaatcacact

SEQ ID NO: 27283 - DNA, 1690 bp, Bovine  19866880719294
  misc_feature (1)..(1): n is a, c, g, or t
ngtttctgctttggctagcctcttcattccttctggagctatttctccctcttctccaggagcatattgcacacctactgacctggagagttcatctttcagtgtcatatcattgtcccttttcatattgtttatgatattctcaaggcaagaatgctgaagtggtttgccattcccttctccagggcatcacaatttgtcagaactctccaccatgacccgtctgtttttggtggacccacatggcatggctcaaagcatcattcagttagacaaggctgtgatccatgtgatcagtttggttagttttctgtgattgtggttttcattctatctttcctcagtggatgaggataaaaggtctgtggacactcctgggactttcgttaatatgttctcatacctgagagactgagccactcgcaatgagaaaataaaatccagtttcagatctgtgaaaccaaagtccaaacagagccagaatttggccagtgagttgaagtaaaagccaacttacaagatctttttcatagccaacaataggtttccttaatggtaaacttatatgactttacccctgtaatgataagagctattatttagtatctgttttgcaccaaacactttaaatcatcatcttgcctaatcattcaaactgcaccgatgagataagctttatttccttgttttgtatgctaggaaatggcgacccagagaagatgaatcatgtgcccaagaactaggaataggctctgagtctacctggatccaaagcccttatacacctgactccagcaatgattttcaagcttagattggccaagaggtcagagatcaaacgaacgggcaaggtggaggccaagaagaaaccacactttttagctagtacaaaaacgtgctggaggaagtttggctttgttttctacaagttgactttgacctgtttgatgctgatttgcctctcagagaaagcacttaagaagaggaggagaacatatgctccaaaataaggtgagataagaagtttctgtctgttgatgaaaacatgcgcattttctagggtcaaatgcatcctcttaagaagaacgtgtcttctgaagggtttcctttagtgaattagcacactgtattgtaaacgcctctcctttagactaaagttcttgagagtaggaactaaaaacctaaaacacagcccagcgcacttaaaaatacataaggagcagaatgatgggtgaacgaggaagagagggaataatatccagccacttgctgggggagcagccaggggctcttggccctgtggccatccacctaacacattatgattccacaaacagagattgttggacaaatgaccggtttaaagatctgatccaagatgtttcaacacggcttaatggaccattagtgactatgcctcagcaattcagtgcaagaacaaagatgtttaacacggcctctaaatacaaaggacacaaacagcagttcacacaagaagagctatagatcgccaaacaaaaaagggtgcaacctctctcgtgatcaaaggaacacaaactaaactaagaatcgattttaggggatctagcaaataggccacattttaaaaaatgtttgtgtcttttaaaggaatactcaggattggaaaggatgtcagcagatggccagtatgacagattggaaagttggg

SEQ ID NO: 27284 - DNA, 1107 bp, Bovine  19866880729137
  misc_feature (1)..(1): n is a, c, g, or t
ncctccttcttattctccccagtcaagtagtataaaaagatactttttcacactgaattctttggaaagcagtttgcctatagccccttaactgacatctttataaaagtatggggttcgataaagtgggattaacctccctctaggatctataaacctgactgtagtccactttgccctgcagggcagtgcttttctcttttgtttttatctacagggggtcttcagatgacctcaaagaggctgcctgctctcgcttagacttactttcttctgtacatgtgtacatgtctccatggctcactcctggtcgagacaaatgaggcacccacttattttctaggctggtaatttgtattatctcaggtaatcttcagatgaaactacagtattcaaacaatttagctaaaatatgtataaaagagaaatgatctgtcccgtgagagccgagtatatttgatctgtggtagctaaagctgtaaagtatatcatacatgccatcatcatcttcgtaagtgggagtaaagcagttggattgcagaagtggtttccatttgattgtgccactctcttcctcagagttgctttaacattctttggagctgacataagcacctctggaaaggcaaacccctggggaatatctgaactaaattgcatcagccatttgggggcggtgggacagtggaagaaaaattcagtttcccgatcacagttggttaaaatgagagactttccaatcagttatgatgtctatgataaagagacttaatcactaaaattatgggaggatattttttgcatcatttcctggtagggaggcttaaacgttttcttggaagatgcattatacagcagaatgttctttggggggtgtgtgtgtgtgtgtgtgtgtatgtgtatgttattaacatatactgatatgtattatatccttgagtgtgctaagtcacttcagttgtgtctgactctctgccactctatggaccgtatggtgccagactcctctgtccatgggattctccaggcaggaatactggagtgggttgccatttcctcctccaggggatcttttcaatccacggatctaaccagcatcttttacat

SEQ ID NO: 27285 - DNA, 2312 bp, Bovine  19866880731060
  misc_feature (1)..(1): n is a, c, g, or t
ngaactaatgaaggatatataattttgatcattggttttagaatattgctggtattattttttatggttctcttttctgataatcatttaataaaattcttatgctttcttcctggcctattctcactatttacttaatggttacttttacaaacatttggaaatgaaatactttcaagtggtaatcttgttctcgccagcttctcagaattctacctttaatgccaatgcagttacttgcataggtttgattagactttgttccagttttcactagtaagtgactgaacaaataaatggcatacccaaggccatacctggcgagtcacacttgagaacgagtctcatttaatcagatatgacaagcccaccatgaagtaacaagggttgtactttgtttaaggaaaatcaaagccttctcacagaaaactacaggcaaatcacagaaatgacttccttacatcggtttccttatctcagaacagaagagtaaataaaagcaataaagaatatatttgaaataagaggttatgaagacttcctaagaagggtcttaagacatctccaaacagaagttaattttgtggattttgctgcttaccacacagggctttgggttttctcaccaaagttcaaggagggttgtatagattacttaacatttcttcctggagttctataaatgatcaggtcaaaacacaatgagatcagctttttggtaactaagagtaatctacagagataatttgtgacccccgtgtttcacggtttacaatgttcttccacatcctgggttaaacttcccccaaaaaacttgtaacacaatattcccttggttaccatgaacaaatttacacttgaccatcttcatctctgtgccttggaaaagacaagccagcttaggaagaggcaagtggataaacactcacatcctattcatcttcctccattacaaatagcttcaggctttagaacacacgtgtgtgcaggcatgcgctcactcacacacagatgtccagcgttgttcatggtacagccagctacagctgagaaagcccagctccacggaaggcaagcttctatctaggtttcattacagaaggcttttaaggcactgagcccagtgggaaaacattactttctccatcatgaaaacatccagataggcccgacctttgacgcccctctcagctatggaaaggaaaccacagcccctgggaagttattctccttccatccattccttggttttgtgccacatgcccggtagaatatattcatagagaaatgcttttgccagtagtggggggcctactgttcaccgtcatgacatctctgcagtctatgttttgaaatctggctttcagaagttcaaaggatttagagattatagttcaaggaagaccaaggcgcacccagggcaggcctggtcttaacactgaaacccggcccttcctacaccatagccaatttgacctctagaaagaatctaacgcatatcttggtctagcagaattattttcaaagactcccagttctttttctatcatatggaggttgaaggcagttcaatttggagttcctaaatgaaactggagtactcttgccaagcacacccatctccccagcccaaactagatcatctctgttaaaggccaggttcctggcatctggggcagaccttggccacatcaggccacccagtgccccttcagtgtgatgcccactcaccgttcttttctgccttgtgttttggaggctcgggctctgggagacatggacatggcccatcacagagggtggtgagacttctgccagtagaacaagcatggaactccaacttgcactgcaaaagacagacaaaacaaagctgtaagaacactgccaatagacccctccccagcctccttgggaaacagccagtgcccttctaaccatgattaggctcacagaagcagagacaaagcaaagggaagttcatctctgttaaaggtctcaattatagaatgttaattaacaaatggctttttatgttttcccaaatgcataagataaatgtctaaaagcactgcatggggaggcttacttttaataagtggtaaactcaaccataactgtctatgcgagtatcagaatgaaatttaacatctgcggtccacaaacacggagggctgaaggctgctccaccatggccccttacccctactacggaggctctgcctgtgtagcaagcctagaccccctcagctgctcagggagcaggggaggaagagtaacggtctacttggtaagtctggatgctgtgtgtgagg

SEQ ID NO: 27286 - DNA, 1453 bp, Bovine  19866880740324
  misc_feature (1)..(1): n is a, c, g, or t
natttcgatgcatgcagtctgcctggtagtgctccctgcatgacagctgccatcccctcccctgtggtccctgaaagaatggagcgcctcccagggagaaatcatgagaggttccattcagtgtccaagtgctcagcacaggtcatgcttttgatgcagacactcatgcaaacttataggctgcctctgcagaagacccaactctcagctgctgcccccctactcagctctcagctgctgccctcaactgcagcccctggctgcactgctcggcccgagctctctgctaagagagctcttgggggcagtgttgtgctagtgagaaaaaagcctcagccttttgcttcatttatgaggcgtctctggccaacctgaatgaatcttggattcttctcaaccctccacacaaggccctggactcaaaagttcacacctcaaggggaagttctgacctcagccttactaattaagtcacgtttgggagaaattctggagtctgtgacataagtggctggccttcctcccctgcaaacaggttttccctctttaaataaaggacactgagatagccccttaaaagtaacaccaatattggggcaaacctcctttttgagggcctttgacagtatagtaagctaaagtcttccttcaagaaagctaattgtagaacaatctgcctcctaatgtattcataaatcagacattcaactcctagaataaattcccccataattcatgttaatcattccactctcgtaacatgaatcatctgtttaaagggaacttttaccaagacaggcaagagccactggatcttgctttaaaaatctctccagagcgccaaaggttttctattattgacagaaaagttactgcatttttaacaggcactttaaatattactcatgcaatcaaagctgttttcctaactcaacttagacagttttcaaacatgtattacggttgaccttattaagtattctgtagcgccacttgcacacgatggcacacaaaagtgcagtcccagaacttctggcagcactgggaaaaagggagtcctcatatattgtcctcgaggcagcagtaaaggctctgagcatggcacagactcccgagggatgccacgggaggcagagacaggggacaggtccccagaagagctctttgcacagaagttgagtgggaaggcaaacaaagatctgggttttttgtacgctaatcaagaatttcaccaagttctctccaagagcactctccaagtgctccaaggacaagatagtatttttcagtcttattaaggtccagaaagtcatgggagtaacccaacggtgtgatgtttttaaaacggaaaatttggaataacctctcatcaagatctataaactagataataattccgtaagtagctgctgtttactgaacactaccaagtgttgtgctaaatagcgtagag

SEQ ID NO: 27287 - DNA, 1894 bp, Bovine  19866880826304
  misc_feature (1)..(1): n is a, c, g, or t
ntctgccttccacttcttcccctatctctggccagctggcctctgccttcgcctgtccacaaaccccaaactgcctctgaattctgttcgtgctccttttctaagatgaactttctgtgcttattattgttgctatcttaatatacaaccatctgtgattattgcaggaaaggccccacaatcctatccagagggtgtcatgggcagcaccctagtgtacagcttcccctgtctctcattccacatatatattttccagcccaaaaaatcttagcagtatattctgaacatctttccatgttagcaggcatatttctataccactgtttttaaaactttagagaatgtattcaataaaagcaacttgtatccatgataaaaatttcaaacaagatcaaaggtatgaaatacacagttgatctctcaggtcctctcaagggagcagggaactgtcttggatatccctacaagatatgtatatattacactttttaacttacacaaatagaagacttttgtactcattatgctttttttttttaacctagtgcaatatcttgaagttctttccagacttttgtgtatggctgttcttactctttttgtctgctgcatcatagggatgaactataatgaactataatttagttaaccagtcctctcttaatgaacattaatgttactagtttttttttttttttttttcttttacatcaaatgctttaacagtaattcttgtacgtaatgttttggagtatactcgctggtatgtaagtaaccgtgaaattgtgcttgtagagtgccgtcttagtatatagcacaaagtagctcgtagagagtacacattaaaagatactgccaaattgctgtctagaaagagtaactatttttaaggttgacaactgccttctgattagtcttcagccccccggggcgaaggagggcacagcgtgactctgggggctggagtaccagctctttccacctaactgcgtggttgatttcctgtttgtaatgggcctgtctcttcttcctgtggtagtcctttctgcttcctctgggtccagtttcccccttagggttatgcccccatatttttgctgtgatgtaagttatgctgggctggggaagggtgagtcccgtagttaaaagctgactgggccggggaagacccttgcccccagctgctgatgtcatagttcttctgagtacgagataattgggaaaaggaccctcatattttgcatagcctgtttcttatatctcactgttattgtttgcagggactgcttaatctttaacttcagaggcatgggccaaggtttatggggattttgttgtttggtaattggatgaccatgcctgggccatgagcagagctagttgagagggatattaatgggaccctattaatgaaatggcaattaaaattctttgaacaatgtgtttacatcagcatgccaaagctgagctgaaaccacccagccatggaatggaaaaaccattgaatttcacatgtttgtggagagaaatggccttttttcgattgattgaggcatttaagaccatggaatgaagtgattaaactaaagacagcaaaaaacttcgacaaagcacttgaaaaaacacaaccctctgacttagtgagggttatctggtgaaattgctgcctccagcttggcatcataagataatgatgatggtgatggtcacggtggaagtttctgccatttctgaacacttgcaaggtaccaggcaaggtgctacacacttcaaaactgtaagaggtagttattactttcttaacttacagatgaagaaacgaaaccttggagaaatttagtaacttgctccagatcacagtttgtgagggcaatgccaggattcacgaaga

SEQ ID NO: 27288 - DNA, 1027 bp, Bovine  19866880901711
  misc_feature (1)..(1): n is a, c, g, or t
ngtacatgacagagcctgaacctttcctcttctttctcttcctcttctcctgacagcttgtcatgtagtttgacttttgtctctcctggctgaaaaggtggagtgaagaatctgaaaacctttacatattaatgggtctcttccctgtaacaccccatgtccactgttcagtgtaaacccttctcagtagcaatggttgggctctaagccacttctctcagacgcgttacttcctgatatcctaattgtttctctctccctgtagggtgtacctttttttatgtgcagagaaaaataactctatctctaaaagaagcagaaaggccccataataggattagtacaccatggctggtagggccaattagagctgatcgtcttggggcaatattgattgtctttttcggattatttcagtactgtgtgtgtttaaagggaatgtgaacagctgcagctttcagagaccagtcataaacacatgtccctgtttaccaaacatgtatgggcaaccagcttattgaggagcttcagtttgggaaataaacaggagacaattttgtttattttcaatcgtttcttttccttaataacatcttgggcacattccatggttctccatcatttttagctttgaatctaaggccatttgagtttaaaacttgcatctcatgacagattcggaattttctctttcgcttcgcctgtgtggtctagactttgtggcttgaggagctggtgtagtggtgaatgtataattaattgtctcatccctttcctcccagggttggcatcaaggtgggttctctggggttggcggggggcagacagtggcctacctactacataattccttgatggggtggcttgactccagatgagcctcttcctcccttttgcctttttgtcagtcaggataggctaggttagagaaggaaatggcaacccactctggtattcttgcctgggaagtcctgttgacagaggagcttggcgggttacagttcatggggttgcagagtcggacacg

SEQ ID NO: 27289 - DNA, 1256 bp, Bovine  19866880907160
  misc_feature (1)..(1): n is a, c, g, or t
ntttgactatatggacctttattttctatcaattcttatctgccaagcagcctaagtaggggctgatcacacaattgcaggtttctgctttccatgtcctgaccaatgtcttttgcccaacttaggagttctggagaaatggagagaagagtagtcaacaaagacttcctcctttcccatccaggaagccccttcagactctcccctgcccctccttcccccaggctccttctctgtgctcctccagcctctcttccaccaggacacatatgacacaactatcgtgactgatctgtctgtctccctccaacagggagctctctgagggctgcggtagtgtgtccagctaccagcacagagctcagaagaggtactgcagtgaatgaatgaatactgccattccttctcatctcccaagcaggtggatgcactttgcagctcaaagagcccaggccactcggaacaaggaaagaatagggtaggaatgaagcccttcagcctcagcagcttttcctgctccaggcattccggctgccctaagcactgccccaggctaagtctccagggaatctgcttcataaacacttacttagcaagacatttaaaacgctattgatttctctcctccaaagcagaggtgagacagtgatagacacggtgagcagttagcaacaatgagtcccctccaccccctaagcagaagttatttccctttcagattaccagcctggcagccctgggagagatgcaacgcactaatggaagcagccgctagaaccagcaggtgctctggctccgatagcggcaattagaggcttaagctcccttttctatgagacaatgaaaaataaagctgatttcagacagtatacttgcttgcaaggcatctttccctcctattaaggaaaaaagacaggaggccacacctctctgggatccaggatcaatgtcaggccaccatggacaacacttttaaacccatcctaggtgttggacaggtaactccatgggacccagtagcagggacatgaaggtgcataaaaacagagcccttgccctgccgtggccaacctacattgaacagagcacctgtacatcatattggtcagacgatgccacactagaataacagccccatggcagcaagatcttcctctgctacagactgaatgcatgtgtccccccaaattcattaaagctctgaccctaaatatgatgatgacattagaaggtggggctttcgaaaggtcatgaag

SEQ ID NO: 27290 - DNA, 1532 bp, Bovine  19866880932276
  misc_feature (1)..(1): n is a, c, g, or t
ntgtgtatgccaagcagtgggattactgggtcatatggcagttctatttccagttttttaaggaatctccacactgttctccatagtagttgtactagtttgcattcccaccaacagtgtaagagttttcccttttctccacaccctctccagcatttattgtttgtagactttttgatagcagccattctgaccggcatgagatgatacctcaatgtggttttgatctgcacttctctgataatgagtgatgttgagcatcttttcatgtgtttgttagccatctgtatgtcttctttggagaaatgtctgtttagttctttggcccattttttggttgggtcatttatttttctggaattgagctgcaggagttgcttgtatatttttgagattaattctatgtcagttgctttgtttgctattattttctcccattctgaggagattttaaaagcatacacaaggtgaattcccatttctaattggagatcatctcaaagaattgagcgaggttgtgcctgctcaaattaaattgcattattacatgtaattccagtttttacttttcagtgcctaaaacatcgatatatatacatgtttctcttatccttagaggatgcatcattttgtgtaaaaacaagcatgagcaaaggaattagggctccattattcaggagcttgctaataaagtccttcttaaaaagcaatctttgaaagaacttaaaatacattaaactgggaggaagatgagttaaaccaattagtggtacaacctacaagaaaagacagatagatttccctattaaacccattactgttctcagtaaccagatttgaggagactttaatgtttctcttgattctaatgataatccttcatctggaaaaagaaatacattcagaacttgtacaacatttgtaaatgtgcattagtggagtagcatttataacaataatctggagcagagaggttagcttgatgaaataagcttttaaaacttctgataaaaatccacagattttccatactccagggcaaaacaaaatgttatatatgcaaagtattggtcaaaaattgctaactctggctttacttgtctttgtcaggcagtaggtaagcatttccctaaatgggaaacctagaatagatgagcagcagtgcagaaaatagcagttttaaagacggatttcatagccaaccacatttcccaggtcctcaactaataaagactaaactggaaaaaaatcttgttttcacttaaaatgagataaggcagagccctgggaacagggcagggatgtggagggtcagttcctgcacggcttatcccactgcagagacgcagactcagtgcctgcaaatcacttttgtgttttattaatgtctgagctcaaatggctggtggcagtcagggaaggcttccaggaagaggcaagactagagccaaggctcgtgtgcagggttgacttggaaaaggagaagacattccaggaaagtcttagaaataatgaggaagccaactggaatg

SEQ ID NO: 27291 - DNA, 794 bp, Bovine  19866880946292
  misc_feature (1)..(1): n is a, c, g, or t
ntcttatgtatgtagcctgtaaactggcatttcagatcgtccacggaccctgagcagtgagcatgtatgtagcaggggttggtgacccatgagtctggatgttggggcagccagctaatgtccacttgtctctctggaggtcatgatcgtggttggtggccaggcacccaaggccatccgcagcgtggagtgctatgacttcgaggaggatcgctgggaccagatcgctgagcttccctccaggagatgcagagcaggtgagccacatggtctcccagtgtgccggctgccccctagcccccactcccacactgcagatctctgctccctgtttctgaaaacattgtgcattccacagtcccttcctttcccttcccaacctgcacactttctagctgtaccttctgggatcagttcttatgtgcttagggactttaggctaatgcaaatatttgcttgacacaaacaaaattagcaatgcaaatccgagaagaaatccaatgagtcccatagcgacttccaaatatcacaagttggagatcaccttcttgttaaactatcagtatttacatgcctgcctcattcccactttgtcacttatcgaaatgtgagtcatcagccatttgagatgaccctgatgccttggtttcctgtgcctcaggtgtggtgttcatggctggccatgtgtatgctgtgggcgggttcaatggctcactgcgtgtgcggacagtggacgtgtatgatggggtgaaggaccagtggacgtccatcgccagcatgcaggagcgccggag

SEQ ID NO: 27292 - DNA, 2549 bp, Bovine  19866881011940
  misc_feature (1)..(1): n is a, c, g, or t
ngaaacctgaagtacagagggacagaaaggatacaaaaggggtttggggtttgtatctctttttaattccaattctgcacatcctcagggtaatatctgtaattgccaaaagacctgctatagtggagggcatctattaaaatagtcgatattattgagtgcctaatttcaagttggcccagttcttagtgctgagaattcaggtttctggcttaatcaagtgaagcgatggaggagccatttgctgagacaagtactacaagaggaagagcaagctgacaacactgtggtgcagggaatatataagcttcctagggctgccataataaatccccatgaactaggtggcttaaacaatagaaacatattgcctcacaattctggaggctggaggtccaagaccaaggggttggcagggtcggtgccttccaagggatacgagggacaatctgttccaggtctctctgagattcctatggtttgctgaccatctttggcattccttgacctgtagattcatcacccccgacttttaccttcatcttcacatggcattctccctgtgtcgattcccacaatctcccccctgtgcacatctatcttggtgttgaaatttgctctttttataaggacctattcatattggattaagagcttaagagttcattttaccttgattttaacctctataagatcctattcccacataaggtcccattctgaggtcccaagggcaagaatttcaatgcatccttcttgagggacacaattcaccgtctaccatggaagaaagggaaggtggtaagcccaggtctcagcagggtgagggtgagcttcctgggcacgcatgggtgtttagaccaggagaaaaatttgaatgatagatataggttaagaggatatgttcatgttatcggttcaaacagaaacagacgttagaaggtcaggtcaggttctcagtgaggggtgggtgtggctaaagccatggcatgaatgagattgccccaagaggagttatagtgcttcagagagtacgggcaccaagcaggaacccagaagtagtgctcttcagagatagataagggaggaggtgttgccaaggcggtgggagaagacctgagagggcaacattgccaagcttcagagaaaagaaggtctgaagaagagtcactgcttccattaggaaatcccagttatctatgactacacaactaacttctccaaactcgacagcttgatgcaacatcacctgttatctctcagttccatgggcaggagtctaagtggggcttggctgagcaatgctcttgtaccatgtgggaccaatgggtgtcaccgtgtggtattcacctagggggtgaactggtctggagggtccaccaatattgctccctgtcatgtcagcacctaggggtgggagatggacaggggaaatggctggacccggtgacatgtgtcctgcagagcgcccactcacggcctctgcagcgcatggtctcaagggctaggctctgtctggcttgtgcctttctatcctcctggtcccagtggaagcagtcttcagatgcaaaatgaaaatgtgggaattctacaaaaagcaggaaaaggtgtcattaaagaaaaataatatacacttaaaaacttgttaagaggatagatctcatgtgaaagggtcttaccacaataaaaagaaaggattaaatgagataaccaggtaaaatctcttagtattgagtctggcacacattaatcatccattatatggtctctatgacttaatcagttctacaaggcttgttatgaaaagcaatatacacatccatttctctctccccagaggcactctggtagctatttttataaaccagcattatcttttggaaggatggcctgggcataaaaggagttagggaataagcctgttctaactcgaaaataataaagcttttaaaatggttaagaccacagaaggggggaaaaaaatcttgaagaaaatctgcatgttcccagctaactagaggatagtatacgtttcttgaaaagaaacagctctcacaaaatcaaatcaacaaaattagaaatgaaaatgtagagatcacaacagacaacacagaaatacaaaggatcataagaaactattatcagcaactatatgcaaataaaatggacaacttggaagaaaagaacaaattattagtaaagtacaactttccaaaactgaaccaggaagaaatagaaaatcttaacagacccatcacaagcacggaaattgaaactgtaatcagaaatcttccaacaagcaaaagcccaggaccaaatggtttcacagctgaattctaccaaaaatttagagaagaactaacacctatcctactcaaactcttccagaaaattgcagagcaaggtaaacttccaaactcattctatgaggccacccttcaccctaatatcaaaacctgacaaaaatgccacaaaaaaagaaaactacaggccaatatcactgatgaacacagacgcaaaaatccttaacaaaattctagcaacagaat

SEQ ID NO: 27293 - DNA, 2560 bp, Bovine  19866881033747
  misc_feature (1)..(1): n is a, c, g, or t
natcctactcctgggcaaacatctgaaaaagatgaagactttaattcaaaaagatacatgcaccccagtgttcgtagcagcgctattcaccacggccaagacatggaaaagacccaagtgtccatgaggagatgaccaaagaacgtggtgcacatgtttttgttgttttcacaactatttgtaaggcctccacaggtgtgtatgtaaaagggaataatagtcataaaaaggaaaagcattgccatttgcagcaacatgaatgaacctaggaatatcagagtgacaaatactatatgatatcacttccacgtgggatctaaaaacttgacacaaatgaacttatctataaaacagaaacagactacagacatagaaaacaaatttatggttaccaaaggggaagcagggagggaaggatgaacagatacaggattatcccatacaggataatctgtacgggattaacagatacaaactactacacatacaaaacagataagcaacacggttttactgtatagaacagagaactatattcaatatcttgtaataatctggaatgaaaaataatctgaaatagacatatacataaaaataacttaatcacttcactctacaccagaaacacaatattataaatcaactatacttcagtatcttcaacacaaaggaaacaagaaaacaaaaccaccacaaaagatacagagcctctcgctacctggaaagtctacagcaggaggcagagaagctactgctttggaagcaggaaaaagggctacagctgagttgcagacaaagggggcaaagccccacctccagtcaggaaactgcaggggggtgtcagcccatatgcccgtccccatctggtttaccctacccgactccctcaaaggctgttctctagctcatgaccctgtcctcataacactgcttaaatcgggatgacaactgaccccagaagacatgctccatagctcaaatccccaaccaatccctccctcgaagtgcagttagctaacgatggacttttgaaccagaagatgatgctgggctgggggaagagtttttagacacgaacatactaatgaaccagaagagaatctcagttgactgagtgaagtgggagaataaactagacaagccaaagaaacgggggcaagggggcacctgtgcaaagtgccccaaaggaggggagcctgggcccctgggagtgaaggataggcacctgacacctacagtaggcatcagggaaactgccccccaagaaaggagtcccacctgggcactccacacctgaccccagagtgtccacatgccatgagacactcaggccagacccaggtttgggacccctgtcctgggctacccttcctcccagcatgtttcctgggctggcctcctgtggggctgctgccccgggtgccccctctacccacccccaagccctcagtctctgatgcttctgcctcacacaagagagcatgctccctgggagcgtgtgctctgctcccttattaatcttgctgtatcttattaaaacggcctggtgcccgcctgttgttcttctgcacagagcagtggggttcatgcgacaagcggcagctgggcgagctgtatttcacttcttttgtgttggaggaatgacctagatgctgctgctctgtaccacagactcactgactcacacttgcaggctttaaccccttccttcccatccagccccaggctcgggtggaagcagaggtctgggcacccacgggacggtgtcagccaagctgacaaggaggcagagctgggacagaacaatatgagaccacttgggactgttccagatgaccacagaaatgcccccctcccaccaatgggtgggtgtcttgggaagaccacatgcagcaggggaggtgtccctggggacccttttcatggaaagtggtgcccacggcttgagtgaagggaggtgagggactcgcggttctctccatctgtctctcttctcagctggcttccagcccaggctgtcatactcatttattcattcactctttccccctagtcattcattcactctgctggttatcttctcagtggctgctctgcacagactctgcggttgactcagaggtaaatgacaccaccataagaagcccttttacggagagtgcagatagcaaaactcccacgggcaccatcctcagccacttcccagagggaaagaggagccagggaggccacacagcagatcaccgcccagactgacctggggcactgaccaggcaactcgggtaagtgcctccacgcttacccgaactaggtaagcggaacttacctagtaaggtaaaaggaactaggaccactgccttagaagctcaggctgctgcaacagatcgccacagacgaggtggcttgaacaacagaaatttccatctcacagtcctggagactacaagtccaaggtcaaggtaccttgggtgactgagttccccagtgagcacacccctgggcttgtagatgggtgcatctcaccatgtcctcatttggaagagagagagagaagcagcaa

SEQ ID NO: 27294 - DNA, 3385 bp, Bovine  19866881044991
  misc_feature (1)..(1): n is a, c, g, or t
ntctttttagtgttgctgctgttaccccgtgttataccacgtgtatactttttttggagaatttgttttgagctacatcgcaagcctgcttacccctcagagatcagcaggctgagacaatggtggctggatccagtgccacagcatgcagtggggcgggaatgatggctctgattatatggcttccttattgtacccagttttccttggccagatggtccccaattgtggtctgccctaaagacattctttgcagtagtccatgggtgtgggtctcaggacatcagtgtttggggtcttattggaaatgtggcctctgacagaatttaccagctacggaagcctacagtatccagattataagtgcctaagctagagagagaggtgaaagagactcttaggtccctgagctctactggaaaggggactttctgtgtcaatacgcttgagcttactgcccataatgaaatatgtacatagctaagactcattaatccaattttctagctcaaaggatataaaaatcctgacaggaagaaattcccaaagggctcaggattcatcatattttatttagtttgttttcccttttaagtcctgtttatatgaaaaaccccaaggactctgttggaaaccatccatttctctgacaggagttattctagaggcagcaagggtctccccaagatagcttggcagggggaacaggcaaaggccaaatcgtttggaggcgtcttccccaagacggatgattctgatcctgggaaattagtctggggctgatgcaaaaagtctttgggggtaaaagtcaattctgaaagactcattgttccacttccaccaagaggttgcttaagcagctgtggagaagggtttgtaatgtggttatcacattcatcttgggaaagagacatcactgtgctttatggagagcagggcaaggaatttgatgctggtgtcagtaatgctcacattcacatcagagcccctctccctcctgagagcctgctctcctaacagaagtctcaaggagcccaaaggcctgcaggaaggaccagtcagagccctgagagatcattatgcttctgatactgtctcctccctgctgagtcttaatggggaaggctaacggggtctgcttagctgtgtgcacacatgtgaatgtcacaggccacagaggggcagggtcccatcccaccttcccacagtcgcacacccacgaatggccagatcaattctgggccataagtgtggtccatacctctggacacagtgggtggggagaaggaaacatatggtgggtctgctctttcatgccaccagatcaggacagcatttcagaaggccccagtcaccggaggacaagatgctgaacctgacaacacaagctttgaagggaatcccactgggtcaggggtggtgtggacagaaggagtcacagcatccacaccctggacccaagatctggagtctgaaggatgcccctgggtgaaatggctatggtccaggcagaccttactgctgctgaaatggaaggaagctgaggcgggggagggtgtggactcaggacacagatgactctgtcacaaggccacactgctttgcacaagcagatcactgaccaacacctgtgcatctgtccctggtcctcgacagtcatgagcatcgctaaggagctgttgtgctcttccatgacctctgagacagcaccatgtggacaccagcagagcagggtttccacctcacagtctgccgtgaagagtacatgaaggttccacaggcttcaagcaggagtatcacacatggtggggcttggcatcactagatggctcactcttgggcttgtttacttaggactcttcacaagggaggagtcaaagaactaataaggagtcttaagttcaaattcaagtgtatgtccaaaataaccagacttagtaatcagtggaaaacagactcacatcaaaaggcagacctctgattataaaaccttggaaaaatcaggtaggtcaactcaatacccactagtgtctacctactgtaacaggaaggaggtgcctagttctcacatcattctgaccaaagggtctgggtatgtttttctagaattctggaaggaaaccaaacatagggttaaaagttaggtcaaggaaagcttgttcaagaacccaatgaggcagcctgggacccaagccatttgaggtattttaagagaacagaagactcagaagtaccagcacaacgtggccccatgtagacagtactgtgaggctgtctcccaagaataagggggctcggttctgggtccaaggagtgtaggacacctgggcctcctcttgttgatccagcaagtacatcaggccagaaatcatactatggcagacacagtgtccctcccctgttctccgagtcagcattaccaactggaggaaccaaggagtgggaaaagactatctttttcacagtgaaaccttgacataggaaaaagcttgatactgtgactcatggaaggaggttcaggctgccattcttgtttcttttctgagtcaaattccaagggattttaaaaatcacaagagaaaactaggatcaagtttttacattatgttactcccaacacctacatgtatgtgtgtataaacaaatactgtgtaaggagcttcttcacactaatagcttaaaaaaaatgagaatctttagacagaaccaagaaacagaatatacaactttgtgaaaacaggatctattaactccttctcttaaggaacaccataatgaaattgctcaacccacggcatcatcacatttgtagaaaaataaagaaaaaaattaaagcctcacctcctgatacacatcaatgtaagtttcatgtggattaaaagcttaaggtaaaaacaattaacagtaccaattattgcacaatcaataaagaaggactgtgcatatatcaaagcaaaagaagaaattacaaaagtgttaatagaattgactactaaaaaaggtttatgttcattaacaggcttgctataggcaatagcaagtaccctatatggagtgggtagccattcccttctccaggggatcttcccgacccaaggatcaaacccgtgtctcctgtgactcccgcattggcgggtgaattctttatctctggaccacctgggaagccctagggtaccatatagggatcgtgaataacccttagaaggctatagtgatagtctgttaaatatatagccacaatgtatggatctctacatccacagagaggcaaacgatgagacaaatcaccaccatcttcctatcagttaaaaactctaagagaatactcttccttctctccccactggtagccactagttttttctccacacttgcgagtctg

SEQ ID NO: 27295 - DNA, 692 bp, Bovine  19866881049622
  misc_feature (1)..(1): n is a, c, g, or t
ncttaaaagtgctgaatgcagtaaaactgtcgctggcctctcagcaaccaagtacatgaggtgacatgggcatctgtgacaaaaggaagtcagcagccaccaggctctcacacctaccagacctctctgggcacacttgcctctaattatttccagggctgggaacaagctggacttagcataagagccggggaccccacccagtcatagccccctgaaagcaacccagggccctggggacttctggtcccaggaagagagcagcacagacacagcctcgcccctcccgcaaggccagagccaggcagcctcccctagcagagtccctctccctcgtgttctttccagctcctgccccttactcaactcgaagcaggcctgccacgaatcacaggccagcgtgctggcctttgctaccatcactgtgagcggttttgacgtaagaggctaaggagtaatgagagtcactgggtttgatcacaatcacactctgatttgaattgcagttcagcaattacaaggtcctcagtcagcagaggcctgtgggactgggggagggaggaacttatcaaagggaaatttgacccaccatgcatacaggtttcccttccaaactctctggggaaaggggaagtctttttttccccacataaaaccccttctggtgctggggggaagcaaacaagcttcat

SEQ ID NO: 27296 - DNA, 1877 bp, Bovine  19866881057335
  misc_feature (1)..(1): n is a, c, g, or t
ntgataggcccatctatcacctagcagccctgcgcaggacctccacagctccccctctgctttatcaatgtcctcaccatgagctacaacaaagagagcctcagccctcttgcttctgacagcacccttcaagaatgcactgattcgtgacaatattcatgtcaaaagtgctctctccagacacctcccagcgcctacagagccaccagctttccacaaccacaagggagaacgcccctccctgagcctgcattactctgtcctgtgggcaccagagcatcctccagcactgtcatgactcatggggtcctttgtgcaaatagtaacttctgcttccatccctaagccctctcatcatcaaatttaagaactgggttaagaccaggctgcagagcatcctttccaccacgcttgtcctctccttactttgctccaggtgctctggccaccagaagtcagctccttccttttaggcaaaatccaaaaagtcacataaagtgtaactcctgcaaataaagaactaagcaggtccaagacctgtgtttcctgctagataattgccactcatatggcccaactctcctcaggttcaatatgggtgaactgaacccttcctgcaaacatagcctcctccctaccactatcccctgtctgtgtctgctagcaaaattctcattctccccagaggtaaccagaccctcagagatctcttgcctcctttctctcaactccactcctggtcaccaagtcctaaccagtctttcctgcttgctgctctcttcctctggccccagttctacaaacctcatacctggacaatgagacagcccctcactggcttccagccttcctctctctctgtctctctccctctggtccatagctggcccagagctcagtgagagcaaagccaccaaatcacctctctgatcacagcccattccacatgcccactgcgatgctggggtagacagtcacccataagcaaagtcatgtcctattaccctgtgatcaccagtaacagtggccatctactatgcacctgagccagaccctttgaatactttattttaccaatcttcacacaactctgtgaggtaggagctattgctccatcttacagataggaaaaatgagatcatatgtttaaattatttttcctccaaacctattatttttccttaaattatttttccactaaacctatttgaggtctcaaaattctgtgagaatctaacaaaagctacagacctctcatccagaaaaatatatgtgcttaaaaattataagaaatataacatatgtgtattatatgtaatatatttcttatggtgcatattatgcttgcaatacaaagtcctgcatcctatttcatgggatgagcagatagagtgaaggaacccatatgccccctattggtgtactgccaggtgaagaatcccagcttaacaacgtctttcactctccctagaagcaggcatccagaattttaagttaatggtcttgaatggttggggttatttttatttttcatctttatcttttagcacattctatccccttagaatgggactaaggcatccagctcatgactctaaagaaagacaagaaggtgggtaagtcattacaccccaattcgcctagaaaagcatattcccatttccctaaatgtgtgtgaggcgtttctcctgggcagccagtgtggctttggaagagatgaacagagcagaggctgtcactgcagggaaagtaacccacaaggttaagaaaccaaccactttgcttcaagatcagaatttaatctgactggtgtcagaaatacttcctggtggcaccaagatttaaactcatgacaccaaaagaacagtgaatgtcca

SEQ ID NO: 27297 - DNA, 1637 bp, Bovine  19866881098175
  misc_feature (1)..(1): n is a, c, g, or t
nagtgaatctcaccccaccatctatgactgggcagcagggagcagagtcaagcagggggaatcaaccagcaggaaatggtgtgtctgcagactgtggtcccaaaggggatctcagggctttgcctggcagaatagaagggggaaaaccagaaaggaactggagagtatgcaatggccatccttcagtttcttccagatggtgaaccacttcataccttacaactatctttctatctctttctggccacatgcctgtttcaaatgtggctatgagttcattgcaacccagagctctgatttcttatattctaaagtttgggtccctgtcctgtgcctcaccacagtagagaagctaagccaaaatatgcagaagatgtggtctttggagttaaccagacacaatttgaattcaggctgtagcatctaccaacctcgttatgttgacaaagtctccttatgtcttggcctcagtttcttatccaaaaagcggacaaaataaggcttatcttccatctgtgaggtttctttattaaggcacagttagtgtattgcctgctcaattaatggtagttacttggttctcagtcccaccagtggctctgattaaatcttggcctagaagattcagtgaattgtgcaggagatgacaaactaactccaagtgtctaaggctcttcttttttttttttccccagctaatttagtccagccatcttcagctaattcaatcatttctcattcaccagtggataaattgtcctcatcataggcttaaccatgcagctaatatggtttggagagagattgattaacaaagccataattgaagctcaataagtgagataaatccaaatgtctgtaagatcaaccagagtccagagctgaccattggcaatattcagttacccaattcatttaacagtatttcagcaaatacttattgtgtgtctatttcatgcatgtcaagcttaggactatctcctttgtcaaagttggatattaagggaatgccaactcagccatgctagaaaagaccttgatgctgggaaagtctgagggaaggagggaaggggacaacaaaggatgaaatggttggatggcatcaccaactcatggacatgaattgagcaaactcctggagacagtggaggacaaaggaacctggtgtgctgcagttcatggggtagcaaaaagttgaacatgactttgcaactgaacaacaaagcactcagtaaatgttcattttccactgtcacttcctcactcttgccttgaaatttatgatgtatgatccaactactggttaattgacttgtttccagaacttgagcaggggatggagttatatccagtaaaaaacccaatgtgatttgtgccaaacacaccagatcctttgacacggcaaaagatttccaacaaaatgacagatggtttcaggtttagcacggtatacattgagattactgtttatatcaaataatatattagccactcatttttttcacaaatgctataaactcaaagtgccattgagaaattggggtgcaaactgtatataaaattctccaaagggatagaaggaattcttgaatctaggagccttgtggctcagatttgataaagaactctccctgcaa

SEQ ID NO: 27298 - DNA, 1507 bp, Bovine  19866881105001
  misc_feature (1)..(1): n is a, c, g, or t
ntgcagctattgacaccccaaccacccccagccagggtggatctgagaatcagcaactcagggcctcagcagtgggcctgagagccagcatgggggggcacacatgtcgaggataatgtccccgatcctccatcagcctccaggaagcagcttcacggggaagcctaggggaaacagcagtcaaactgcatctccatcagccctgacttcaatttgttgaaatccgtaactctccctgcattttcaagggaatgtgtttaggtgtggaagcatccaacaggaaactgaaatattgatgaagatgagcctataatcttttgataaataacatgccttctaatgccagattttgatataatacaaacaagttgtcaacgtgtgagcaaaaatttgcatccaagagaaaggattaacaatgaagaaatcctgttcgtgccgttcattttttcctgtaacctgaagaaaactgccttccctgaatagtagcatggtctggcatctttaagtcgttgggaagggaatgccttacttcagcttaacaaacatttctgagcaccttcttgatgccctgtactggctgctgcagacacacacagatctggtccctgctttcaaaccaattaattttttaggagaaacaaatctgtgaataagtgagcacaaaatagcagaaaatcatagcaaagaacatggtcttcagcttcagatagatgtgaaatcacaatcctgcacggattttcattagttatggagaccctgtgccagtggtttaacctctttcaccttaaactgaaaagggtggataacgatgcctgtccctcggggttgtcaagaaggtcacatgcgaaaaaaagctctgtgccacttccactcctgtgttccacttggacacactggtgcataaccccactccctggaggtgtgcgtacccccagcctcctagagtgtcctgtgctcagagccaaactcctccccagaaattgctgtccaggggagctgccaaggttataccacttgtaggggtgggaggtgagagtatgcatataaaatgacctttttcaatgtgttataattcacattccataaaaatttgcccttttaaagtacaactcagtggggtttcatatattcacaaaattgtatagccatcatcactaattccagaactttccatttcctcaaaaataccccagatatctcatgcccattagcagccattccctttctcctatcccccaactctcacaaccattgatctagtttgtgtcactacagaattgcctatcctgaacatttcatataaatgaaactatataacatatggtcttttatgtctggcttctttcacttagcaaatgttttcagggttcacacatgtcataacatggtctcagtacctcatttcttttgatgttgatccattcatcagctaatggagatttaggtttccactttttggctattaggagtaaagctgctatgaacattcttgtacaagtttttgtgt

SEQ ID NO: 27299 - DNA, 1564 bp, Bovine  19866881114178
  misc_feature (1)..(1): n is a, c, g, or t
natttcctcctctgaggaacctccatgacccccttccctggggccatgaagctgcacaggattctggaaggcaaccaggctacctggtgaaaccaagaagtcaagatttcatctgaaaccaccatgtgaaatcatggtcctctctggtgacttgtggaaacttcctctgacaaaaggccactcaattctcaacgagttgacaaattaatgactgtttgctgtctccctgctccttttaagcttgctctctgcccaaaccatgctcacgtgaggttcattctgaagaacaaagacactcccagtgattcattaggagtgacttaatggatgattgacaatgaaattactccaaactgctaaaaccttgtcaagctaaggtcccgaacatttattatggcttgtctgtccccatggtaacccgtgcgtgcatcttgcttcccctacctctccagaggggcttgtttactagctgatgacatagcctcactgaatacaaaacagaagattccacccataggattttgctggaaccagggaagaatggcagactggaaggactctgtctctgttctcagctttcatatcaagggtctggccatgctctttgagatggaacaaaggggctattggccgtgtgtctaaacaggacaggtgagtaatccaaaaggcgggatgtgtgtgcctaaaaactggaggatggaagtgggcagggccataggacagataaggacaagaggaagagaataaaaaggtgcttccaaccagaaatactctcctgggaaaagattttttctttccctttcaatccaaggatttgaagacattgtaactaaaagtatcctctctcttacagtagtctgtgtgtgtgtgcaggagatggtataaactatgaaaagcctttttagagggcaatttttcaaccacgtatttaattgctaacaaccataaaacataggtaagataggtgtttatcattccctcaacttttgatacatatgaaaattttaataataaatggaaagaagggcaaaaagaaatatccaatgacctagtagatgaaagtgttaggcaaaaacatatctttatggtctacaataaggggaaaatctaaacaacttgaatgttcatctatatccatccactcaggttgctacaaaataccagagattgggtggccttgaataccagaagtttattttctcacagttctggaggctgacaggctgagataagagccccagtctggtcagtttctggtgagggccctcttcctggcttgcagacttttcactgtgtcctcacatgggtttctctaggtggactcacagagcaacaagctccctgatgcctcctttgataatgacccctgttctattgtatcagggtgccacccttaggacctcatttcaccttaattacttccttaaagactccctctcctaatacagccacaacgaggattatgacataagtattcagtccacaacaccatctacaggaaaaggttatcctaatcacaagacatccatttataaaatgtccagcactataaaggaataagagg

SEQ ID NO: 27300 - DNA, 883 bp, Bovine  19866881118412
  misc_feature (1)..(1): n is a, c, g, or t
ncactcctgatgcaaagcgataagacacgccaagcacctagcacagggcctggcccacagttcacactggaggaatcttagctctcttcctgctctgacagcacatttcaagctcatttgcaaatgtagcattgatcccactacaaatatgttttggcttagcgatgagtccactcagaagaagggagagaattgtttaaattattgaaacaccttaatccataagctcacataaatattgttttgaactaatagatttatgcactttgcttctgtattccatcttacaggtggttaatgtctcttgctgtcacctactttaaaaactcaggcttttaaaattttcttttgtgttaaacttgcaatggagtattggattccttggttcatttgaaaataagaggcctttatcaaaatgttaagcttggttaatttgcataaaatatttcctctgcaatttactctctattacttttgaaaagcaaattgcctcagctgcaatgtggggtggttgtaatggcaggcaagctattagagctcatggttgtaggcagtgaacatgtctcaggtttggagctcaaggaaataaattggaatctggcctcgtctcactcccttgggtcatctgagctcatctggagaagaaaaggaagaaaaggaactccggttgccaagtaagggttcacagcaggtagaagtgtgtgcttgggagctgggtgtggctgtgctctcaggcatgaaggagggaggagggaaaacgtggtgtgtctccaggaacaggctcagtgaggcaggtctaatgggatccacacagcctggttcttccacctaaaacacaactcctatcccactattcctctgcctctgcttccttcccaccagc

SEQ ID NO: 27301 - DNA, 3095 bp, Bovine  19866881123608
  misc_feature (1)..(1): n is a, c, g, or t
ntggcttccttgagcgtgtgcagaggttctaagttgaccctgtataccatacacctagaatagtcttcccaagaagacagtaaaggatgcttcagattggcagatcttgaaggaatgatcaaacaggtaaagacattttttcaaacaccagttatttctctgcggtgttcagaaaggtttactcagaaacacaaaatgcaagcaactaatttcagcttttgtatctgagtactgtaatttctatattcccctgggagttattccattatgttttcttttattactgtgttcagttctatgcatggcatgaaaagctaactttgagccaccagattccataatgctgattcaatattattttatactttagctaactcttccagggaaagtaatatcgagacgtatttctgtttgagagagctgtgattgtgctcatgtgcccaaagctgagccaaagacatgggtccaagtgtgttcatggtgcatccctggcacgagtgtaaggctctctatacaatgagaaaagtgtccatttattcattatttattaaaatagcttccaatctactctttccagctttattgacacataattgacatataacattgtctacgtttaaggtactccaaaactgtgttgatttgctacacttatacatttcaaaatcattattacagtagggttagttaaaacctacatcccctcacataattgccacttctgttttggatgaagtgagagagaaaccggtatctttggcatgtcctgcataactgaggaggctgggtactctctcacattcttttactttgccttaaggagaagtcatactctgagaaaatctctcttggctccaagctgtaatgcctttggggagggataatgcataaaaagtttccaatatgtccaaattcctctttttttttttttttccttctgttgctctattggtatgttaggacttctctgttggaaccttgacttccgcaaatgctttcttgtctgtgggtgattgactaagccagtgtgttgcagggtctcctggaccaaacctgaaaggggctaggactgattcatgaaccactgtagggtccactgctggggccagaggcctgtatgcctaacacctattgtatgggtgggcgagactgctctccgtttccttagcatatggtgccagatccccaaattctcacaatggcactttcgtttgaggatggatgacaaatggttggagatggacatgacaggggatgtcttattcagtcgtgttgctgatgtaagctgtcagttcatttagaaagttggccaaagcagttgttgatttcaaaccagagaacatctggatgaggtatgtaatttaaaagaattgtttgagattcatcagtgcagtggtattaatgagaagtgggagaatgtataaaggagccttattattatttaactcactgcttgaaatggagatctaaaaccagagtgacatagtatatattttatgtgatagataaaagcaaatacaatccaagaaataatattgtgctcaattctgaatggactacagtagaaaaaatgcatttagatctgggcttctcttcctaacaaacatgaatgttcatggaaaagtgcccagttcagttcagtcgctcagtcatgtctgactctgtgaccccatggactgcagcactccaggcctccctgtccatcaccaactctcagagtttactcaaattcaggtccattgagtcagtgatgccgtccaaccatatcatcctctgttgtccccttctcctcctgccttcagtctttcccagcatcagggtcttttcaaatgagtcagctcttcacatcaggtgaccaaagtattggagtttcagctttagcatcagtcgttccaatgaatattcaggaatgatttcctttaagactgactggttggatctccttgctgtccaagggactctcaagagtcttctccaacaccacagttcaaaagcatcaattcttcagcgctcagctttctttatagtccaactctcacatccatacatgaccccaggcccctaccaaatttgtttccctagcacttacctgccatgtcagactttccctctatcattagggccaagatagtgcaatcccaccatacctcacaccggagctctatgagctacagcacatctatccaactcaaataccgcaacacatctctcacatttgtcctctggccagttcatgattataaaggaggatgggcatttttgcctagaaacctgttcaagtccagcaaatcaaactattgtccagagtctggtgatataatcttttatataatcaggaagacagatgctagagtaaggatcagaaactcaaatacctcccagagtcaggaagggaagtgaatgaatggtggggtttccaggccagagccagttggccatggtggccactgtgatgactgactcaatgtgtcaactccatggactatacagtccatggaattctccagaccagaatactggagtgggtagcctttcccttctccaggggatcttcccaacccagggatcaaacccaggtctcccacattgaaggcggattctttaccaactcagctatgagggaagccccaaagctgggctatggcacccagatacttggttaaacattattctagatgtttttgtgaaggtgtttgtttgtttttggatgagatttgcgtttaaatcagtggactctgagtacagcagattgctcttcataatatgatgaactttttccagtcgttgaacaaaggctgacctttccctagcaaaaagggattttgccaacagaatcccttttgggactcagatcccagttcttccctacatcttcagcctgctgcccttccctgcagattcaaacttgccaaaccactacaatgatgtggaccaattccctcaaataaatacacacagacacaccccgccttgttggctctgtttctgtggagaatgctaatacccacaccttgaaaaaccagccataactcaaatccagttaatccaaacaaaaataggttgatactatgaccaccctatgggccatctattaa

SEQ ID NO: 27302 - DNA, 752 bp, Bovine  19866881271723
  misc_feature (1)..(1): n is a, c, g, or t
nttggtgttaattcttctttgaaatttggtagaattcaccagtgaaatgatccagtcataggcttttctttgttgagagatttttgcttactgattcaatctccttaattattattggtttgttcagattctctacttcttgattcagtcttggtagttcatatgtttcaaggaatttatccatttactctagattatccaatttgttggcatataattgttcatagtggcctcttacaatcatttgtatttctgtgataacagttgtaatgtctcctttttcatttataattttgtgttctctctcttttgtcttagtttagctaaagatttgtcaattttgtttattctttcaaaaaaactcttagcttcatttttttcctattgtcattctaatctctatttcatttgatctctgctctaatctttattaattctttccttctgctaattttgagcctcgattaaacttcttttctaattcctccatgtgtaatgttaggttgtttatttggagacctgaagccttaaatcagataaaggacacaagccatactcaagggaacaaaatgaggaacttcaatagtgtctagggaacacaatacaaattctttagtgacaaagaaacattaggcatgaatgttagcactatccaccgcctaaaacaactatggatggagcttctaggaaatctggcaggaagcctaatattaataaaaattgagcaatagagcataagacaaatctaattt

SEQ ID NO: 27303 - DNA, 704 bp, Bovine  19866881300343
  misc_feature (1)..(1): n is a, c, g, or t
nagaagtaggaggccctattctgtcctgagggacccagcctgtttaactgctgctcacaaagatctccaggtagaaaaggaaaataataattcaaggaagcggaccaagtattaaaaagaccaggaccccagcagctgggaggaaagtgagaacggggaaggttggagacttggtggagggctccctggtggggacagaggtgaacctgagactgaaaggtgggctgactcgagagttcactttgaggagaaattaattcccgtacacgtgcagtgcccagtcagccaattccgtagcccatacgaggtgactttactctaagaaagagccaacttgaactactgaactctgaaggactcggaaaaagtgtggttggcaatttccgcatcagtattctcctcccagggccagcccggcctgatagagccggggatgggatgcggccaccctggaaggctttgcctctttttcacacagtgtgtggctttgaaatgtaacgtgacaaggtcgcctgtcacaggcctgagaagttcctcagctgtcgctcccagctctgctccagctgcaaaggggccacgttagaatccaagcccagagcgaatgaatctggagttcactgaggtggcaggtgctttttatagctttcattgggttttgagtggtgcagggagctgacaaaacacctctcaaggcaacggcttca

SEQ ID NO: 27304 - DNA, 743 bp, Bovine  19866881348014
  misc_feature (1)..(1): n is a, c, g, or t
ntatggcactaaaatgcatgctgacagaggaaagcgacaaaaaacaaggagcgaagaggagcagacccttcaggactggacactaagggaggcgtcataacagccactgcagcctgggcggaccagcccacagctgccaggaatggggagcggagtgagagcagatgggcacctggcacgaccctggggagcctgacctgaggggtgacggcaggcggctgaagcctagaacacagcgccacaggccttgcgtacagcagccttgcctagtgctgactcagtgatcacgttcttctccaggaacacatcctgcactaaacaaggtctgcatttacgtaatgatagaatgagatcagtgttaagaagaaatggaatgctgttctacgagccacgaagattaaaatgataatatacgtaaagtgctgagcacagtgcctggtggttagtaaatgctcaacaaagcatcagctgttaccaattcttattacgccccctgctcaactttgctactgagcagggtaatggcctagagttctttgtattcccagctggacttctgccagtgcagggcatacaaaagtgctaaaaagacagcactcgattgactctaccaagttttttcagactcataaaaaaagcctttggaccaagttgcccaattcccatccatgccagtcactggcccgtttgatctcagaacaattccttgctcttcctctgctctgtatcccgggcagacattc

SEQ ID NO: 27305 - DNA, 1422 bp, Bovine  19866881460657
  misc_feature (1)..(1): n is a, c, g, or t
ncattaatcctcctctcctgcctttttcgggggctataagaggcaccttaaaaggcaagcacttttctcccataggaaatgggctgcattgtggctagaataccgaatctgagcaaatagctctctgtgtgccatcgtctctgaatattttattcctctgggatatatctggccccaggcagactgtgcctgatttgctccttataaggactgttcggttgaggacactatgcatgaatagggcccagtaattgaatgcctcctatctccattcggcttttgatctctctctacccaggccagtgccatcctgcttgaggacttctccccaagtgacaggtttgctccttcaagactccagtccctgacttgatcagccacccaaagcctgcatactttgagaagctggtgggaaattcagtcttctcaagatatagattacctgcacatctgtcagggtttagttatacatgactaattcatcctgcagcatgagatggggattcatttcctttgcaagttgacttggcaattttctctgctcaaagaacatttagaatagacagtgtgcatggcaatcaggaagaaatagatgctattaattttccatttgcaaacttgagattgactatagagcctatatcccattctccttggaaaaacagaccacggcctctcctgtttagagatgtgcaaagtccgaaaatttagaaaagagagccttctattccccagaggctctgaaatggggctgttgttagtggaggcttctcccaagggttggtactggtacctggcagagatgagcatcaccactgtcagcacaagctcctcctcctcctttctgtgcacgtggttcaacatgggatgctggtccccagcttgagtgagcacgtgatctccttcctcagctcattgctaaggaatgaggggaagggctgaaggcacagacttacatgtcaggatatcacgatggacctgcaaaggctggagatcccaaaggtggctagcttcatccagggctcgttatacaatgttctgccacaatggaaatactgtgtatctgtgttgtcccagatggagtcattcactagctacatatgactactgagcaacttggaatgggatgggtgcaaatgaagaactaaattttaacttttatttcattttcatcaatttaaaggaaaatagtcacctgtggctcacggcaattctactggatagcagaggtatctgtgtgtgccaaaaccagtttagcacagaggtatgccgaagccagttgtgtgtccaaagccaattgtgtttagctgtctttgtctttgggcttcccaggtggtgctagcggtaaagaacctggctgccagtgcaggagacataaacacacaggtttcatcccgggtcgggaagatccccggagaaggg

SEQ ID NO: 27306 - DNA, 1046 bp, Bovine  19866881528972
  misc_feature (1)..(1): n is a, c, g, or t
nctagatcataactgttgattcaaactctcttttttattctaacttccagaagagagggacagtgtgtcatatgctgttgtattatatttggaactaattatatgctagccccaaggcccagcactgtgtttggcacacagcagaaactaatttgttgagtgataaataactcctttgtaatagtcagcattgaaatacatcagtacattgctagttaataaataaaatgacctataaatttacatctcctctatcaaatgactgacttagaggagaataagaaatttgcaagtgacagagtgggagactgttcgtaagcactccttcctccaaggatccctgtagcaccattttctctagtttgcaatgagaagaggtcagctgcttgccctcactttgtatggacatgagcctagacctcacctgacatcctctctattcattcgatatgtaaaatcgtcttttggactctgcgggagagggagagggtgggatgatttgggagaatggcacttaaatacatataatatcatatatgaagtgagttgccagtccaggttcaatgcacgatactggatgcttggggctggtgcactgggacgacccagagggatagtacggggagggaggagggaggagggttcaggatggggaacacatgtatacctgtggcagattcatttcgatatttggcaaaaccaatacaatattgtaaagtttaaaaataaaataaaaaaaaatctcaaaggagaagtgacagaacagtggataagagaagcttttttttttttttttttaacagttaatcaaaggtaatactggcacttcaatttttattaaaggaaaaaaaagctaagataacatggaatttgggttccaaaagatagataaaagatggaagaaatgcagttctcctataaacacagataatgttttaggaccagagaaaccccgtatctcaggggtggaatggatctgcgaggttatccagtccagtgaaattatatttgttataacatataagtcttcagtagataagttatca

SEQ ID NO: 27307 - DNA, 915 bp, Bovine  19866881552276
  misc_feature (1)..(1): n is a, c, g, or t
nccatgaagtcaaaatgtgactggcgggaccagtccccccttttctgtttaatagccttctagacctgtgggggagggataggatgaccagttaatcaaaatactctgtgtggaaaaggtcagcatggtggggctcctaccatatatttttctgggagagatattgacgttctgccttgtccttcctttcagtactgcccatgtggtcaggagattgcagcagtgctgtggatccttgatgaccacgattttactgaaagagagtgatggtggcaagtctgatgatatttccctttaccctatggggccactgttactggaaaggtaggcaatgaccctgccgggagctcccaggctctgctctctaagctctcttcatttacacaactcactacacatgtaagtgcttgtgacaatagtaattaaccttcatctggggctgctccgtgtcaggctctgtgccaagcatgtcacatgcatcatctcatttaatccccatagcgactcagtgagggttattatgcccctttaacagctcctttaccagtggggcttcccaggtgaggccagtggtaaagaatctgcctgccaatgcagaagatgcgggttcgaactctgggttgggaagatccccccagggaggaaatggcaatccagtccagcattcttgcttggaaaaatccaatggacagaggaacctggcgggctgcagtccatgggggtcacaaagagtcagacatgactcagcactcatgcaaggaaaggaaaggaaaggaagaacagggaactgaaggctggaaaggttaagccatatccccacgtaacccagttggtcagcgggatgccgggacatacatgcaagggagtttaactccagaggacttttgtttcagtcccctcccccaccaggtccat

SEQ ID NO: 27308 - DNA, 1125 bp, Bovine  19866881740109
  misc_feature (1)..(1): n is a, c, g, or t
ntacaactcaagtggaagtaagtttagaagaaatttagtgaattaagtgaagtaagtgaagaaatttagaaatagaagagaggaaccttattagaagaaaagaaataatggaatcctaaatatttagccatcccttacattatgattatcgcatcaaataccttgctgagcatctgaaaagctgaatgaaaataaaatgctattgtacatttactttttttttattaaaagacagtcaattatagaagacattcaagtaatatatatatatatatatattttcagtataaagtaatggaaagaatgtattgtaaaatattttataataaatggtacagagatgtacaacatgaatttaattgaggaaacagacaaaaacagaatttgtacaaaataactggctagtgctgtttagaaatgtcaagtacatagacaaaaatagacttaggaatattccagaataagggaaactgagatgacatgacaaatgcctttacacacaaaaaaaggcattagagagacatatcgaaagatctgcatctgatctacagattacttagtagttttactttttttatatagtaaatttttaaaattttattttatttttaaacttttacaatatatatatttttgattcactaacattgaactcatggctaacaatgttacaactcatgatggaacaaagcttatctaacacatatgttttctccataaggtacttcatggccttcttggacttgagaacagcagcactatccttgggggccatttgaaacagagaaatcaccaacaaaaagtaaaaaagaaatgcaaataatatgacactaaaaagactgagaaaaaaggcactttatagtaggagagctgaaacagagagaactttaccttatttgacctcaactgggactatgagcattgtgtgactcaaatttttcactgcactgagaagaaccagagatcaaattgccaacatccactggatcatcaaaaagcaagagagttccagaaaaacatctacttctgatttattaactatgccaaagcctctgactggggtggatcacaataaaatgtgggaaaagtctgaaagagatgagaataccagaccacctgacctgc

SEQ ID NO: 27309 - DNA, 862 bp, Bovine  19866882098843
  misc_feature (1)..(1): n is a, c, g, or t
ncagcagcagcaaaatgtatgttacatttacaaaattcagacagaaaataagataaaggaaaagctgggctggtgcccctggtcttaggccctgaagaaatgaccatccagctgtcctttgtcccttgggcatactgactgttaagtgaggccccaggatgaggtgaagccctagaagggcattcttttcgacatttccatgtggatttagatgctctttcaccaacgttcccctagcagatgagtgtattgattagtacagccccaggggcttggacgggtcatgtctgcagacctagctggtacagagtggaaggctgatccatgagctctgggcttgtatgtctggacttcgctatggccaggcccagtagggactcccatcccctgtgctcatcgaccaactcccaagtgggctctggtgcctgtctctcagctggagccaaaggggtcatacccaaggttgtctgcactgctggctcattggggtctgctttggccatctgctttcctaaggcagggtgaaagcaatcagaggcagggagtcatctccttctccacttggccttgctgggcgagaggctgttagagagactcgttctgcataatgagctctgactcaaggtgtactttcacatttgggcagcagttaggcagtattattacatgtgtgatgagttttaaatattctcatgcagatagccacttgtagaagtttcatcttgaaatctctgactttccccaagaaacatgtagaaatggcaattatagttagcttggaaaagtgacaaggtccagtagaatgcttcatattccatccaagttataacatatgttgaaatcgttaggaaatattcagttc

SEQ ID NO: 27310 - DNA, 1202 bp, Bovine  19866880406395
  misc_feature (1)..(1): n is a, c, g, or t
nggagaagagagccctcgtgtgctgccggcccggctggggcctgcccatcagtcgttaatccttggggtcaggttcctcatctgtgcaatgggcacattatctgccctcccgtgtcaccatgacacatttcaaataagataaatacagtgaatgtgccgtattccatggagacgtgagctgtattatattttgagcacaggggaaattaagatgattcgagtagagaaaaatgagaacagaaaaatattcagacgtttcaagtcagtgacacctttgggagtcacctagtccaaattcctcagtttaaaatgagggtgttgaggtccaggccccaaattcctgccgtttgtgagcatcaaggtcttctacttcccagtccatattctcccagctgcatgaagggggcatttgggaagggaccctgttcctttcaggaactgctggattggagtttggtgggaaagactctagttgggtggggagcaagaaccccagggttgggccgagcgccttgcagagggtccccgaacatccgtcctcggatgcttggaagtatttgccttcagctggagcagtagtgttcctctgggattccaggcaggaagacccaggtggtcctggaagagaagctgaagaagctggaggaggagtgtaagcagaaggagacagagcgcgtcaacctggagctggaactgacggaggtcaaggagagcctcaagaaggccctggctggcggcatcaccctggggctggccatcgagccccgctcagggacgtccagcccacaggtacagtccacctgctccccaggagaggggccaggcatgctctcccaggtcgcaactcatccctgtcccccagcatcagcctcgccaagacacagctcacgtgcccacccgaaacgcgttccttggccatatttcaaggtcacggaccctgaattttttcttctctgtctcactgaacttttttaaaggtggtggaaaccccaagttgttttcttccctttggcaaaatctgagtacaatattgggttggtcaggttttttctgtctgatgtcgtgtctctgggtgccaatcgctgctctcggtttctggggtgaccccacgttctgggcttctcccttcctctcgagggtctcccactcagccccctcttgtcagctctccttaccctgtgccctacctcaggtctgctcct

SEQ ID NO: 27311 - DNA, 958 bp, Bovine  19866880567066
  misc_feature (1)..(1): n is a, c, g, or t
nacaggttgtcacaatgaagtcctcccatggggacacagaggaggggccgtttaatctgccttatctgtaggggtcagggattgagtgagagacttcccagagaagggacaactcatgaggattttgaagggtcactcagagactgaaaaggagaaagggtactcagcatcctggagagaagtgcctgtgtgacggctcagaaggcaaaatgcccaccttgggtctggctcaccttgggggtggggcttgacaaggagtagataagaacagactgcattagtttatcaaagatgcatgaataaactggtgctcctaagtgtttgcagggactcgaaactatctgtatatgaaacttaccattgatatccttacagtcacagaattcactcatttagttcaatcagcgaatcaatcaatcaatcactccattagtcattgtcccagagagggtttgaggtcttttccatctttcttcctcttacactgacctcagatgcatcacccaactgcacagacggtggggatgtggaggatgcagatcttttctcgtatctgagcctcaattaattcatctgtaaattggggtgggtgacattgttctggcttctgcctgttgttagatacaaatgacataaagaccagaaaaggttttgaagactgtctgtgctttacagactgtagagcgtcctggcaatgtgaggactcttcatcacactgattaagtagatagagattaatagccaagcatgaaggctgagaattggattaactgctctgggctagattctattatcataatgataatcatttgttcacccagtgaatatttaccgagtgcttttcccatgtcaagcacgtttagaaagggcccgtcctcctgtggatgagccggatgagccgttcaaagccccgtgctttgcagatgcctctgggaaggcacagggggtcctgaggctc

SEQ ID NO: 27312 - DNA, 1499 bp, Bovine  19866880706635
  misc_feature (1)..(1): n is a, c, g, or t
naacaaacacacatgtggcctgggaacaccgagccccagccctcggcctttctgacaccgcccagcagagcagagagggtgccctggaggccaccccggggtgaggagggcagggctgggggcccccgggtcccgtggggcgcgctcaccagaacacgtggtctttggtcgctcgctcctgcagaagggtccacttcctccccaggtcagatgacacgtagagctttagggcagaaggagcagagagggaggtctggttatgaccgaggagcgagcctcttcccagaggcccgtgtgccctggacgtggagcaccccgtggaggcgggtcaggggagtggggagggcaggccctgcagaccagtctccaagaagcagaaggtctggtgggaactccacacccggccattcttgaccccaggcagctgggaggaccctagagatggcgggtgtggcgtgtggcagaggtcctgggcacggtgtgtctgggtgcaggcacgtgggagggacctgaacggcccttaaggtctcctggcaggtgggcgctggggaggaggggcaggaagggagggctggtcagtgcagcaacagcagcgccccctctgcaggctggctggggccttgaccgccgcagtgacccagggcctgtgcttagggttcatgttctgcaatcactgactccaaagacccaatcctttcaactttgaacttgaggtttcgtgagtgaagccaggtggaacaatgagctgacgtggggctcggggtccctggggggagtgttgggcccaccattctcctggacagagctgcccggggcgaggcggagaccacaggagccagcaccccatgcccgcttggtgcctcgatcctgatccgtcctgggtccacccacactgtcagtctgggtgcctggacctctttgcccccttgccaacagtggccctgaacgctgcagatcccatgactgcctgggagagaaacttctggaaaacgtcccttctgtcttttccacagccgcagaaaagcagacaagctcctgcatgagtgcttcctccttgccaagagcatctccaaacctcctaacctcggggactcgtgagaaaacgccccacttcagggtggctgtccctgccgtgaacatccccaagagcctccagagagtcactctgaatggtcgtctgagggacacgctgtgaccttggcaacaatcgtgaacacttgttcctttttttttttttaaattgatcactccagttatttttcaagtgtcttgaagtttgggtacattttaaaaaataattttatttatttatttttggctgtgctgggccttcattgctgcctgggcttttatttagttgtggcgagcaggggccactgtcccgctgtgacacgggggcttctcattgccggggcttgtcttgctgcagagcgcgggttctggtgtgcaggggcttcaggagttgtggcactgagctccgtagtcttggttcctgggct

SEQ ID NO: 27313 - DNA, 7403 bp, Bovine  19866880890824
  misc_feature (1)..(1): n is a, c, g, or t
nccgcacgtcccccgggtccccaaactgcgtagtcacagagttctccagggacaggcggggctgtgggcacaagccgggctcaggatggggctggagagctggccccacgggagcctgctgagagcgcccgggggcgtggggaggtacccccagagagacgcctggacctgagagctccccagcacagacacgcgtctcccagggccccctgccctccagaggcaccaagaccccctgtgtgcatggtgtcgaaggcccagctgctaggttgggcatccctgtcaccttcctgccccagcccaagctcagctgggctgtaacaccttcatgctcggaccccagggcccggctcagcacccaccccatggggtggggcacccacgtcgatcgtggggtctgcactatgacctcgggccttgcagatggggagacagaggctcgaggaggcacagtgactctccaagagctcggctggaggtggctgacttgccgctcgaatgcagaacccgagcaccttcctcacccatccctgtgccccagaaccacagtcctgagccctgagccccacccaggctgggcccttggccgctgtctatggggggctgcagggctgccatttgctgaacgagcgaaggatcctctttgggtcttggggtcccttcccccaggctaaggggcagccttgtccacaaaggtcctcaggacctcccaccaggcatctgtcttcggttccccatggctcacaggacacaacccacaaccctgggtgatgcttctgaggtcgggctcagcccagggaccccctcctccatgaagccctccctgatcacctccactctcaaactagaaatgatccgtccccttcctgtgacacttgtcacaccctaacttgggtcacctactctattcatatatcttccccaggaaaaagcatggtctggtctgatctgattcaccacatgtccaccacactcagacacagctggacctcgagcagatagatgctcagggtggtgggagggctggtatgcacccgcctcaccttcatggtgccgcatgctctgtcctgcccggtacagagggtgggatctgccccacgctccacgccagatgggagcctctggggaagaggggcctccaagggccgggcctgcgtacctgcaggctgtggccgatccaccagtagaagacggtgaggttggggttcaggggcagcagcacggccgtaaggttcacctcctggttgacgccgatgacaggaaccacttccaggtagagggcctgcagaggggctgcaggggccacacaaaggttaggggtcagagggcatcagggcactggccatgtcacaggttgctattggtcactgtcaccatcaacctcatcaccaccaccaacacctctaccaccatcatcactacctccaccaccatcagccccatgagaaacactacactttcatcgccaccatcaccaccaccaccatcaccatcaccaccatcaccatcaccatcaccatcatcatcaactctatcatcaccatcaccatcatcaccatcagcagcagcagcagctccatcatcaccattattagcatcacatcatcatctctatcatgatcaccatcaccaccaccatcatcatcaccagcatcaccaccatcaccactatcaccaccaccatcatctctatcatgaccaccatcaccactatcatcaccatcaccatccccaccatcaccgtcaccatcaccatcaccatcagcagcagcagcagctccatcgtcaccattattagcatcacatcatctctatcatgaccaccatcaccaccaccatcaccaccaccatcaccatcaccatcatcatcagctctatcatcaccatcaccatcatcaccatcagcagcagcagcagctccatcatcaccattattagcatcacatctatcatgaccaccatcaccaccaccatcatcatcaccatcatcaccaccatcaccactatcaccaccaccatcatctctatcatgaccaccatcaccaccatcatcaccatcaccatccccaccatcaccgtcaccatcaccatcaccatcagcagcagcagcagctccatcatcaccgttattagcatcacatcatcatctctatcatgaccaccatcaccaccaccatcaccaccaccaatcgtcaccaccaaccgcgctgttgcacaagccaccgtggtgtggcctccagccccgcctggtggcctccctgctcctgggcaccccgtgcttccccaaggacagctctctcacagggagccgccctgggcctggcgggggcgatgggctcaccggtgacctggacaaacagcactgcctcgtcgtgccccgccacgttctccgccctgacggatacgcggtagacgccggggctctcgtagcggtgccggatgggctccccggtcagcgtgaggttcacgtacatggccttgaagccgtcccccaggtccacctggtacttggtggtcaggacatcaccctgtaagacacaccagggggccacttaggacctggctgcagagctgggagccagcgatgggccattcgctggctcacgcacgtattcattcactcactcactcattcattccccagttctttcctgaaagcgagctccctggggaccccagggaaccaggtctgttctatccttgccccctgccccacccagcctggagggcagggctgagaccagtagcagaggatggaagtagtagccagggccgggtctgcatttcagaaagatgacccaaccgctgaggcagagaggagtcagctcagatgaggtcagggaggcctgagccagggaccgggagggcagggagaggccccctacctgctgcacagtttaagaaacagggagatgtgcgtgcataaaaacttagtctcttagaaaattacaaaacaaaacgttatcttcccctctgctgctgtgattcctgcattttcttttatcttctcactctacgtggtgccaggactgatgctcgggggcacgcgctctatgcagggagggggtcccacgtctgtcaccctccccggcatccccgcacccacacgagccgtctaatcgcccgtctaatccccaccgcgaacatcgcccttccaataaccgcattttcctcgtggagtcttgggaaaggaaactgaggaagcaaacaggaactttttcaacttcgtggcaagaacgagttcttcagtgacttcaggtcctctctccccatcaccttcctatcatatcctcctgccacccctctgcccgcggggggagcacccaggaaaccatgtcctgggggtcaggaatcactaactgtttagcgagcctcttggtttacacctgccaaaccctagaacttgacagagaaccgttatgtaaattacattcgtttacctttcttcacagatcaggtgaaaaaggttggatcacccctcccccatccacacccactcggaacctcagaacgtgaccttatttggaaatagggtctttgcggatgtgattagttaactcgaggtcacacggaattagaacaggatctaagttcaatggctgggtctttatcggaaagaggagcggccaggggaaggaaaggaaggaagccaggggaagacagaggctggaagggggtgcagccctcgcccagggctgcccagagcccccaggagctcagagatgagggaggaccccccttccagagggagcacagccctgctgaaatttgagtttggacttctagcctccagagctcttgagaggagaaatctctgatatttcaagccgcccagtttgtggccactgcagtgatgacctcggggaccttacacaagtatgttctatgatccccattttataggttgaaggactgaggctctgtgagtccagaacctgcaggctggcttgtggtcagggctctctctgtttaaaggcagcctgacagatggggtggtctcaaggtcaacttgctccaggagggaggggtctgcatgcagcttcctgggggaagaaggggcctctggctgagtctggacgtgtggctttgatgggcaggagccacaccacctggggatgctgtgtcctgcctgtgagcagctaagagggtgtgttttaactcctgaaacacttcccttggttaaaacacttcatcacagggacctccttggtggtccagtggttaagactcagcacttccaccacaggggccacaggttcgacccctggttggggaactaagatcccacgtgccatgtggtatgggtaaaaaataaataaataagtaaaaccctacctgatcagcctgagcatctcaatgagagagtagcccctgcttgcctcagctaagagccctcacagcaacgaagacccagcacagccaaaataaataagtaaaattatattaaaaaaaataataaaaaccttgtcataatcaggaaggtaagagtggcaatgtaagaaaatacaaaaaggcagagaagtagctggaaaggaaaagtggtgacgtcagcacaacacccaccacccacggcgtagtgtttccacgcagacctgtgtgtgtgtgtgtgtgtgtgtgtgtgtgtgtgtttattcctgagcgcttcaaaaacactcggaagtctcatgctgagccaactgccaattcacatgtaattgtcaaggatataacacagagagacctatgttcgcggtctccatgtgaacatcttgcagaacacgtatcacggcttggaatccacagtgactgagcccacgattcagtcacccctggggtccctagggctgcccgttcacacccagacgtgcctctccgtcacatccccgactccatggggttagaacctctaacctgttctccatttctatactttcgttatttggggaatatcccctgaatagaaccgctgggattagctttctcattcaatataattctctgcagattcacccaagctgtggtgtagagcctgttccttcttacttcagagcactgcccttgggatggatgtaccagctcaccttgcgtttatccactcgcccgtcgaggacatctggctgtctcccgtttctggctcttatgaagaaagctgctgtgaaccttggtgtatacaggttttcccgtgaacctctttgtttccctgggatacaggcccaggagtgtaactgctgagtcccatggatgttgcatgcttggtttttaaggaaatgaccagctttcccagagcggctgtgccacttcacgtccgcgtcagccatgcaggagggacccagtttctctgcatcctcaccagtgtttgtgggaccaccgtccttcatgttactcattcctgtaggcgcgcagggaccctctttacgctgcactgcgctgatggctaagggtgctgagcatggttccctgtgcttctttgccattccctccgggaacacgtttctccatgtcttctgctcatcttctggttgcttgtcctcttacggttgggttctgagtaatctttatatgttccgggtactagtccttgttggatacggtttgtagttattttctctgtggtcgtcttttcaccttctcaggctctgttttcaccttctcaggctctgtcacagacgaaacgtgtcgcattctgatgaagtcgtttatcacacttcctccgtggatggtgcttatggtgtcaatgctaagaactctgtctagccctagagcacaggtattcccctgcttttttctacaagcttcacaagtttccatttaaggctgtgatccactttgcgtcaactctgcatcaggcatgaggttcgttttcaccggctcctcgtttgctgacgcccgtccttccttcactgaaatgattttgcgcctgagccagaatcagccagacccgtctatgtgggtctgtttctgggttccccatcagatcttatgttcggttctaagatcttcacagaacttggattcccctaaatccagggctgtttccacacctgcactggatgagtgtgtctatggctgtgtacgaatgcgagtgcgtggtcacgtgtgaacatgtgtaagtgtccatgtgtgtgtgtgtgtgagaacaggagtgttcaccagtgcgtgtacccactccaaccttgcgcccactccttcccaaggcttcagcgcgggagccagtggcctctttcggacagtggagggcaaaggactctcttccaagagcatctttctgctgttccctcacctccgcccctgcaggcgagggtcccagtgtgctgggacagtgggcggccacgcgtgtcctgtcctgggtccggacggagcatcccagcagtgactagctgctgggattcctggctctagagggcagcaggtggccatgtttcctgcaagtcagtcctggagctctgggcggagggtgggtcccctctgagggtcccctcgagggtctgggcagggggctgcaccctcctctgcagtgaacagagcctcccccccgcccccgcacacacacacacacacacacacacacacaccaccccagggttgcccgaggctgaagcgtgactctcagggccaggctcaatcatcgcggggccagcaggttgatgcaccctcggctcaggtctgggggctgcaaaccaggaggtgtccacacggagcccccctggcctggacccaatgccagctctgtgcggccccaggtgggtggctgcgcctgtccgagcctcagcctccccagctataaagccggctggtgggagcacagcccgtgggcagggaaagatggaggggaacacacccacacgggcacccgcgcatccagttcttcacacgggaccagagcccccgctttccagcatcagagactgcgttgggttccccggtcccgcctgggcaggcatggacggacgtcttctgcacggagccccctcggttcgctcagtacatttgttaactgaagcccccggtgctcgagagctgtgagctgggggctggggtcccgggtgggaagagggggctctgcacccctttgtgctttcctgtctgcttgtgagcgtttttagtttctatatttggattttctacaatgagcatttgttacatctataatcagaaaaataagcacatgcatattagtttaaatagactcagttcagttcagttcagttgctcagtcgtgtccaactctttgcgatcccatgaatcgcagcacgccaggcctccctatccatcaccaactcctggagttcactcagactcacgtccatcgagtcagtgatgccatccagccatctcatcctctgtcatccccttctcctcttgcccccaatccctcctagcatcagagtcttttccaggagtcaactcttcacataggggccaaa

SEQ ID NO: 27314 - DNA, 2036 bp, Bovine  19866880898837
  misc_feature (1)..(1): n is a, c, g, or t
ncagaacggcctctctcagcgaggggcattgggacagaggctggagtgcacccaggagccagtccacgtgggcatctggaaatgacagcagcatgtgcaaaggccctgagctgggactccctgaccaggctgcatttcccgggcacatctcctctctggggccctggagctggcctgtatcaggaaaccagggcccatcagattcagcctcagcctgcctggccgatgtgctaactgaggtacaggggacggggcgggggccgccacacacacaggagcgctgacagctgggagcgccggccctccgtgcagcctcaggcttcccgcagaactctctcggccaggactctggaaccttcggcaggggcagcctcagtccccttcctccggttaagttcgctggccagccccacactcaggcgggatcccacaaagccctcaggaagggcaggcttggagtccgcgtccccgtctcgacctggggctctgaacacatcaaggccacggacctcatcagagcagtggttaaaccccgcttcacaagacgtccccgcactgtctgcagacatcacgctgacactaataaggcaaataaacatggcctttaaagatcagaggcaccggtctacagtctattacattaaactcagcgtcaagggggaaagaaaagacaggctgggattattctcgtcgtggcaattaagaagaaaaaaaagaaggaggaagaaaggggtgtttggagggaggtcatctcacggtgcctgaagcaacaatagcactgcctggatggagtctgtgatggggagaggcaggcctgggccagggcctcccttcccccctctctggctccatgcacacgctcggggtgccctcctgagacacagcctctcccggggcccccaggacacagtcccttagggtgggaaggccgaaccttctcccagagcctgacgggatcacggccaagaggagagcctggctttcctggcctcctcgcaaggctgttttctctgcctggcctacacagccatccccagccagcaaagccttttcctgggggcttatccagccctcctgaagcctcgtggttcccatctgtgagatgggaatggtgaggatgtcctccccgtggggtctgcctcagagtcctcctgttggggcgaatgagcagagtagacttggaagggttttcctggctgtgccaccagcctcctatcttcctccgagtccatcctctgacctgctctactctgaaccccaggagccccggcctttttccagcctgtccacttcccagcccacttcctgttgggttcagccaatgggaggctctggtgggaggccggagggtgggaggagcgagagttcagttcagttcagttcagttcagttgcttagtcgtgtccgactctttgcgaccccagggactgcagcacgccaggcctccctgtccatcaccaactcccggaatttactcaaactcttgtccattgagtcggtgatgccatccaaccatctcatcctctgttgtccccttctcttcccgccctcaatccctcccagcatcagtcttttccaatgagtcagtcagttctttgcatcaggtggccaaaggattggaggttcagcttcagcatcagttcttccaatgaatatttaggactgatctccttcagaatggactggttggatctccttgcagtccaagggactcacaagagtcttctccaacaccacagttcaaaaacatcaattcttcggcgctcagctttctttacggtccaactctcacattcatacatgaccactggaaacatcatagctttgactagacggacctttacaggcaaaggttggagaactcagggttatttctccctctgcctccaaggtgtctccagtggaggctgcctctgctcctgctctggtccctgctagccccggcccctggcttgcgggaacaccaccctctggtttttgtcctcctgctgcagaggaggcagcgaaccccaccgggcctcgtctcagcggcctcc

SEQ ID NO: 27315 - DNA, 890 bp, Bovine  19866880937818
  misc_feature (1)..(1): n is a, c, g, or t
ntctccccacaccaggctcagaaagcatttctgcttttaagggccagtgtgatgggatggggtcaccaggatcctctgggaccgcccttctgctaggtcaggtggctcaggcacaggctccaggggagagaggccttgactctgcctttcaaggggggctctacaaacagtgtgtaaagatgaagccaaaggctaagcagctgtgctcaagccgaggctggttttctgctcataaaccttcgggtgggaagggggcgtgggacctgattcagctgggctaacctctcccgtgcgcagggcatgaggcttggagcccaagtgaaatccaccaactcctttctatgggcatttgcggcgagcctttcctgcgccaggacacagttaggcaaccgtcgtcctgtgcccctgctggagcttggtgacctccatgcatctgacaagtgaagggaggtctccagggcagggccggggtctcaggatgaggtggctctgagcccacgccattccttagcagcagcgtgaccttgccaatttgtctccctcctcagttgccacatctcaaaagtgggtacctttatctacctccttcattcacgcatttggaggtgacaaggcatacggcgatgatccagtgtacccagggccccatgccccagggcctgcgaggagagtcaagtccctggactcccgggtcagcggagtgtgttcataaaccctttcctccttggagtcagcaaataacaaggagaatccagttggcaagattgaaagcacagccatgaatatgcatgactcattgagtaatcaaacacccggaatcctttccagaagaagggatcgcagcttaattttccacgacagacttaaattcaaattagtcattatttaat

SEQ ID NO: 27316 - DNA, 1862 bp, Bovine  19866881051359
  misc_feature (1)..(1): n is a, c, g, or t
nagccccctccccgacctgaggggtgcccttggagaggctgtgatagtttctgagccatgttttggtggagagtggaagggcagtccccggggccacctgggcggatgtggacaaagctgtttcccaggaggtcagcccagctcccagggtggggcagcttgcccggcctcgcctctgggctgtacctctgccaaggacccaaagcagggccacatcgggcgggaggaaagccgtgtgctcagctttctgaccttcgagacaagaaggggcgcctgcttgggtgacctgcagggacgcgtataaatgtcaagctccctctggtttgcagtgtgtcttctgtccgcttctgggtgaggccacagcccggccacatgacacccttgtccacacggatgcacgcgagccacgctgttctcctgctcccaagatctgggggctctgctccttctcagaaaagccaggacgtccaaaaagtctgggagctgggtggccaggtccacagacaggaggggaaggcaccccactgaccagggggttctcttctcagttagaccaatggggtcactcagatgggtgatgacgatgcacgttagaaccgtccaagttccaaggagccgggatgggtgaccatcagtgatgcattaatcccgctgggctggcctctcccagtccctcggggtcagaaggttctcctgaaacattcagcactcagcagtcatgaggaacggggaccctaactcactccgggggaaccaacagaccaccactgctcctcttgtgctctgggggaatcttccggggtgtatcagtcagctagggctgcataacaaagcacctcagttgcccagcttgcacagcagacattcatttctcccaggaacggaggccggaagtcccagatcaaggtctgactgggctgggtctcaggtgcagcctctctcatcggcggaagacactgctctggcctcacacagcctttcctctgagcacacgcagacagactgttctgctccaaaaaggccacccaccccatcggattagggccccgcctttatgacttcacacaaccctaatagtctccctgctgctgctgctgctgctgctaagtcacttcagtcgtgtccgactccgtgtgaccccatagatggcagcctaccaggcctccccgtccctgggattctccaggcaagaacactggagtgggttgccatttctttctccatataatctcctaaagacactttttccaaacacaggctcacaggggcttaggacatcaacaaatgactctgagggcacaattcagtccataacacaggaactggcccttttcctggactgattcacatacaggtgcctgggcaggggtggggcagatggtcaggtctgcgccctgggaggagctgcagccacgtggggtgcctggccaccatgaactgaagccgcggacacctcctgataactgtggcgagcagtcccccacgcctgccgagctgagggggaaataacatggggtgacttaggtaaaggctctggagccagcccaaggtgggcgttgggtaggtcctagaaccctctccccgccttgccgctcgcttttctgacacaacaagctgcctcctgggaacacggacacaccaacagagctgaacacacaagacacacagcggggagcacaggcgtgagacaggggctcggggaagccatgcggcagcaggcacaggacggcaagacacggacgctctgtgggcggcctggggcacagcccgcagcctcgcacgccttaccttcggaagtacgggatgtaatgatgtctgaacacggaagaaggcttgggtgttgggacagggacaggcagcta

SEQ ID NO: 27317 - DNA, 1867 bp, Bovine  19866881118728
  misc_feature (1)..(1): n is a, c, g, or t
ncccttggctgacccagcactccccagaaagctatcagatcctggcagctctgtcacgggctgttctgaggccgcaaaagccataaatgtaccggactaatccagtccatctgtctccagcagatcttttacttttcatgcgggtcacttctgtgagcagatgggttgagaaaggctttggcaagttaccaggaagtgactgcctgcccggtcccccggtccttcccgaccgtgggccgcaggcggcctgccgagtgggcggtgagctctcttcacggctctccctgcgcgttcggtccctaaggcgctgagctggtgccaacaaatacaggcaggaaagagcctcctttccaggctgtgggtgggggagggacatccccgggcagctgtacctccgcaacagagagaccctagtgctgtgctaggtggcagtgggcggtgccccttgtcacaggtaccaccacacacaaggaccgctggcgtcctgaggcagacctacaaccgggctttaaattattccagaaacgctgtttataccacgtcacccccacagcatgtaaacgccttaacagactgcagagcttcgcctccacgcgtctcatgtgctcctccctgcagccctgtgtgtgatcggccaggaggtttcatcacacccctctcttgggagaatgaaaccaaaacgcagagacacggaggaggaacttctccagcgacatccagcacatatcagaacttcgacgagaggcctcctgccgctagcatcagcggtgctgccagcatcccacgtgggccctcccaggatccctccctggtcttacagatgagcaggtttgtctccctagagtccttgggatgcccaaagataggtaataacatttctaacaaaacgtgcactcttgctgagccggttgcataggtgaacagaattcatttgtgttttggaaagatcatcctaggggcgatgcagaaaatgaagtacagaaagtattcaatgtttattacaacgattcaaatgcaatacagtgagtttctagcccagagccagaacagcgagactagagagagaaaaaaatgcacatgcaagaaatgtacaatgaggtctaattagacccagaggtgaaaggagagtaagaaccatggaggggtctggtctgagcaacgaacgagtaaggatgcattaactcagtaaaaacaaaccgggcaggggagtcggatctggaagagagacggggaggagattggacttgagctgcagaagcaactccagttgagggacatagtcattttttaacattcaaccagttttatatcttgtgttggggtataagccaattaagaaacaaatgttgacagtttcaggtgagcagcgaagggactcaaccatatatgcatacgtatccatcctcccccggaccccttccctcccaggctgccacctaacactgagcagagtccatggggtgtacagtaggtccttgtaggttatccactttaaatagagaaacccactcgatcactttttatttccaaagtccagcacagagcagactagacccctgaaactgtggaaaggaggagggaagaaaagcaaggagtgaactcagcagaagcgaccatccagacaccaggggctgggacagaaactgagcgatcaacccaatgtcaagttcaccaggtcttttatttagtcagtgactctgagtgcctggacataggagctggagagccctgcagagccccgggagctcacacagcagggagctcagaactgaatgggggagacaaacgaccagacgatgcatgaatctcagcagaagtagtgcagggaaggggcagcagaagctgtggtgagaggtcatgcacatgt

SEQ ID NO: 27318 - DNA, 2291 bp, Bovine  19866881219121
  misc_feature (1)..(1): n is a, c, g, or t
nagagcgctgcgcctgggaggtgggcagtgccaagcccggggtcagggcagagtgggggcgggtgtgagcgtgggtggtgactgtggccgcagtgaccatggcaggggtggccctggccagctgctgtggcgtgaccagtgagtgtacccccggaggaccccacccgcccttacatccagcagcagtgcctgccaagctgggcttgcccgcgtgacccccattgagcctagagacctcagagccttggccacaccttgggggactcagttacggctggggctgagctctgcccctcgaggggctgcctgggccagaccactgcatgtgaccagcccatggacacagccggcaactgacaaaacgctcctcccctccaaccctgcccccagggtcacacccgaatctcaaaaagccaaaccagcatcaagttccaggttaaatggagaggtgcagctgtgagccgggaggccccgacaagggcaccgcccgagggacagaagggaggggtcaactgcggtcccaccagggctcagaccagctcgaggcgctcacaggacggggaagcgtgtgagcagggagcgaggctaggagagctggatgagggaacacggtccattccccgggcctgagcatcagcccaactgaagacaagaacgagacgctcactttgccccggcactttcctgatcgccctcgagcttcctgctccctgccccttgctccaagggggtcctgcatccagactcatgggcagtttggggccagagcactctggggactctctaaagaggaggcgcaggttgtctgagggggtaaaggaggctgaggccgcccaggcgaccgctgaggggccccgtacctcactgtagctctgcctgtcccccaccgagtggctgatgtagggcgagtaggagatcatgtcggggcggtcgatgttgtagatggccttgctcttagggagggcggccaggtctctgtagtccaggatctcatcgcccagcttggcctgagagagggcagggggtgccaggagggctggtcagacccacacccagggccgcctcgcccggcaggcgtgggaggaagcgagtctgagtgaagcgggaggaggggcaaaggcaaggcggcggggaagcctcctggtcctacagacagtgagaacccagcctgcagtctaaacacacactcacacagtgagaactcagctgcggtctaaacacacactcacagagctacgcttgcatacacacagacacacatgtgcacaaacgtgtgagggcacagcaaacacacctatacacacacacatgcatgcatgcagatccacacttgggtgcaaacacacaaacacagacatgcacatacacgcatgcagtgcgtgtgggcacaggaaacccatcgctcggtcatgtgcggctctttgctgcacagtccatgggactctctaggccagaacactggagtgggtagccgttcccttccccaggggatcttcccggcccaggggtccaaccggggtctcccgcattgcaggtggattctttaccagctgagctatcggcgaacatgtacacatgcatacaaacgcacgcatggacgcgcgctcacaaactcctgcatgtaatagacttgtacgcatgcaaacacagatacacatgtgctcacataaaacatacacacagaggacacacacacgtgcatttgaatacctgctcgatgtacgtgcacatgtatgcacagatgcaaacacccagcacacgcacgcaggcctgcacacattatacatgtgtgcacagagaattgtccgcccacaactgtggagggggacgctgacacacccacagcttcacccactcacgctcaacagcacaaccctcaggcacccccacactcgcacacaaccgcacccacccaaagcagtactcatgagcacacctccacacccagccactcgtacacacgctcagggctttgcagcactccctacacacagccaacgggctggcaggtgacagtcagcgggcatgtgacctcacagaggtcaccacagaggcgctcgctcacggcgacaagcctggaaccaccgcatctgctcaggtgaggtcgacggggcggctcgctctcctatgactgggctccgtctaccccactgcccaccagcccctcctcctggctctgggggctgcctgggggcgcgtgaccggacaggcctgggagctgcgcaccaggaggcttggctctcccagtagggctgggttcacacccaaacaccagtctcagccccggtgtt

SEQ ID NO: 27319 - DNA, 726 bp, Bovine  19866881236283
  misc_feature (1)..(1): n is a, c, g, or t
nccaagggattctccaggccagaatactggagtgggttgccatttcctcctccgggggaatcttcccgtcccagggattgaactcgcgtctcctggggctcctgcattgcacgtggattctttacccacggagctgcctgggaagccccaaggtggcttttccctgcggctctgccccccttattatcgtggacgtgaccgtcggtgtttggttggctgccgccctggcctggggtggtcattcaaacacagatctcttgcctgagtgacttggagtgacaagtcggtcaggacagggtgggcccatgctccagaggggagcacctagagcaggagacggggggagcactgagttagagggggacaccccagggagaagaggaagcatgtcaggtatcaagatgaaagcgaaaaccgaagcgcgaccgcgaccggaagaggcggggacacgagcatccccggcttcctcctcccgggcgctcggagccttctgccggcggccatggcgggaagggtggtctcggaacgagagactcgtggaaccctgtcagcggcccctgccccagccagagacccacggggtccccgcctcctgtacctcgcgtggcccagccggcatccgggtctgctccaccagggcccacattggcattctggaagagaaagagagagggcggcaggggcaggttgcagggggcaggcagtcgccagggtcctggcagccgg

SEQ ID NO: 27320 - DNA, 928 bp, Bovine  19866881261725
  misc_feature (1)..(1): n is a, c, g, or t
ncgccagagccgggagacgcaggtggggatggcaggacgaggaagggcgaggatggtggggagggagccagcttccagaactcggacattctcctgtgggtggtgggcaagcacagcagtccttgagtggggcggcggggcggggggtggtcagggggcttccaggcgggtctctggatggtggagggggttgctggctgtcctgggtccccaggctgccctccgtcttcctctgtgtccctgccctcctgggagcaggccgcccctgccggcttggaaaggacacccatggattcttgaatgtgggccggaccgggtggctgggtgatcgggcccagaataagggggccgtgctggagcacggctctcaggttgcccgccgggcggcggccacggggtcactcaagcagcatccccccgctccccacccacccccagggctggggcagagtgggaccctcaccagagaaagtccgaggcccggcacgggcacacgcgggccgtgagtgctgccgtgaagctgcggcccgtgacgcaccaggacgcgggcttcctcctgcggaagctcctctgctggcccatgacacagcggtcaccctgcggggggacgcggggtgaggggccgccccactgcggctcccactgccggtctggcctgttccttattcccccggcccgggcgggcatcggggcaggaaaccggggctcaggggcagggctgtgtgtgtgcctgatgctgacccggggcagcccagcccctgtccaccccccagcactcgctgagtgctgtgtacctggccctgctgggccctgagggggtctcaggccccggaagagaggcccaatgcaatcctcaggcccgagggtttcaggtgggcccctgtgaggctgggacgagccacagcctccaggctcaggggccacacag

SEQ ID NO: 27321 - DNA, 863 bp, Bovine  19866881275086
  misc_feature (1)..(1): n is a, c, g, or t
naggcacgctggtgcatcagaggggctccgtgtccccgcaggagaccagcatccctgaggagctgatggtgacggtggtaaagccggggctgcccaccttggccgacctgcacgtgctcctgccgcctcccaggcccacgaggaagaggagcctcaccagtgacaaggtacctcccgcggctgctgggccgggtgccccccgcgtggcgtagggtctgatggtgatacccgacaagcacggggacctcagtcactcttcagcacgtaaaggcctatctctcaccgatcgctgtccctcctcccccttggggctacctcagcgtctcggtggtggaggagtgggcggggggccgggcaccgggctggaccagccccacaacgggcacgtgccaatttcactcccatttcttcggctggacctggtcgcaccaccccagcctcactgcgaggggtgagcaccacccaggggcctccaggacctggtttcaggacatccaactaggattgggactgaaaggtgaaaggggagcccttcacgccttccagggcggctgtagttccacaacaagcagacactgacgagtgtgggtgaggacgtggagggacttggcccctcggtcactgctgagatggaacggaaaatggtgcggccgccgtagaagctgtctggcagatcttcaaacacgaagctaccacataacacggcagcgtcactccccagggatgtaccgaagagaagtaaaaatgtgtgtctacacacacactcgtgcacgggtgtccgtgaacccaaagtagaagcaacccaaatgcccacccgcagacgactgggcgaggaggaggcggcccagacgcacagcagaaca

SEQ ID NO: 27322 - DNA, 1147 bp, Bovine  19866881280295
  misc_feature (1)..(1): n is a, c, g, or t
nctagacagcatattaaaaagcagagatattactttgccgacaaaggtttgtctagataaagctatggttttttccaatagtcatgtatggatgtgagagttggaccataaagaaagctgaagaattgatgcttttcaactgtggtgttggggaggactcttgagagtcccttggattgcaagaagatccaaccagtccattctgaaggaaatcagtcctgaatattcattggaaggactgatgatgatgctgaagcgccaatactttggcaacctgatgcaaagaacggactcattggaaaagaccctgatgctgggaaagattgaaggtaggaggagaaagggatgacagaggatgagatggttggatggcatcaccaactccatggacatgggtttgggtagactccgggagttggtgatgggggacagggaagcctggcatgctgcagtccatgcggtcacaaagagttggacatgactaagcaatgaactgaactgatttatctgcctatcacctattaccgaatttgtgttggctatgagattataaagtaataatttttttttaaactgcctgtttttcttaagattccaaattcactagatcagtataatgagaggtttaaaacatcgtattgccgctcacgggaatgaatgaatctgacatcaccatgctgtcaacacccaggcagacatgtttgaagccccctctccctggatctgagctggcagctcgctgctccattgcccctgccctccactctctcccgagttttccatttcattgcttcagtgctggtctggacctgggcaggggtctctagtgcactgttaccgcccgcagtttggaaacgctggtccagacgactccgcactccaggactccgagggggagaggacgccgcccaccgccccgtccgcccggccgaagcggcccctcacctgctcctgccgcaccacgaacaggacgtcctccccgggccgcacggccaccgcctcgccgcggatgctgatctgcaggccgcgcggcggcaggagcgggcactgcagccgcacggggctctgccgcgggtccacgccgccctcgcacacgttggacaccagcttccggtacctgcagccagaaggcgggtcagcgtccgaa

SEQ ID NO: 27323 - DNA, 1217 bp, Bovine  19866881405386
  misc_feature (1)..(1): n is a, c, g, or t
ntcagaacaagttctgtgatatctgttgttttggatggagtatgaccattccctttgcttttttttggctgtatggcatgtaggatttaagttccccaaccagggatcaaaacttgtgcccctggcaggggaagcgtggagtcttaacccactggaccaccagggaagcacccattcctgtcttttgatttaaggaagtcagttggctcttgctgaatgtcgaggatgcggcagccactgccgggtgttttcacatatatggctgcatggctttcctccgctgctgtaacaaattgccccaaactgagtggcttaaaacaacacagatttattatcctacagtagattagaggtctaacttggatctcatcaggcaaaaaacaaggtgtccgcaaggctgtgttccttactggagaatctgacggacagttgcttgcaagctcattcacattgtccatcaaatatagttgctgccacctgtcgggctgagacccgtttccttgctggccaccagctgggaggctgcccccagctcctaggggcgtctgtctgggaccccgtctgaggtctgtagcaaagtgctttttgccaggtaatgtgacatactcacagggcccagggattaccacgtggtcatcttgggaaatcattattctgcctcccacaatcacccaatccatttatgacaacatccagtgacactgttattattgccctcagttcacaaataaataaaaggcatctgtgttttaagcaaattgttaggaccatcaagattccagttaaatgacaagacagttcatctgactcacccttgagctgatggtggggtttatagcagcaggtcagtgagaaagcagcagagtaaattttgtgttttggagtatttaaatggatgggctgctctgattatagaagttttgccaagaagtcattaaagtaattcctctgttggaaaaaacagccacgtgggggatttgggatgtgaaggacttttcctcttggggtgaagagtgcacaattccatgtccagttctccagtggaaacagctgagtcgacccaattggggattcatgttcctgaacttcagagcatctgtttcaagactgcagcaaacccaggaaacagacttcatactttcagtgatggtttgaagtgaggtgcgtcttgtggtcaaggaagcaacaggtgatggtcacgagcgtttaagaccaag

SEQ ID NO: 27324 - DNA, 1126 bp, Bovine  19866881418999
  misc_feature (1)..(1): n is a, c, g, or t
natccacagggacttttcaaggaggaatctggtgttgcacaatttggctaaactgagcttcccggtaaccactggaagtggcagagtttgagcttgtaactcccaaaccgactgctgaaggagctcaccatgggaggagcagcagccctcagcaggctcccctaggtctctggggatgcagggaccaacgcagactgtcagaacattaagcttcttctactaggggtgcttttgctgctcttaaagcttgtgtgcattgtatctggaagaactcattttaggaaactcatggctgagagttttgagtcctggtactagctccctccagagttttcaccccagtagcaagtacctctttcactgacactggctatgtgtcttatttgggtggcaacaggcacttggctaggccacggtgggaggggcccctagaggcctctaagcctgggcactgcttcactaggtcactgtcttgaaccagactcaggggtggctctgcccaactctgtttaaagatggtttcaggggtgctttttcgtggacatgcactgtaccttcctactggaacttgaatcctttgttttccagctgcttggggctcttgtgtccaagaccctgcagtagagtcagtagaatggccagaccccagcattctctcttcccttatagctaccaagactgtttacctcccagaatgtttgaagttacattacagtgaaattatttgaaagaaagaaaaaaaaaaaacaataactcatcatttccaaggatgacttacttaaggtgcctttttctttctatttacaatcttctgtcccctaaggtaaattttcaggattaaataaacacttcaaatatattgtatatggctttggttgtaaacctcatcacatgctggcagagcagtgctccatgtgacctgagaacaaacccagaatttctctctgaccatgaagtagcaggcagtggtgtctctcctgagcacccccttcatgctgtctcctgcaggataaccacggctgacagtgtgtggacactgtctgtgctgagcagagatagagacagtgctatgtttttacaggtgttctggccagtgtttctcacttggggttcctggaccagcagt

SEQ ID NO: 27325 - DNA, 1463 bp, Bovine  19866880469283
  misc_feature (1)..(1): n is a, c, g, or t
nctcctaggattcttgagccccaggaagctgggactgcagtggacttggagtttggggtccccagtgattggagagaatctgtccaatcccccaggtcctctcttccctgctaccccagctccttgcaggactggtggggagggaacaggtcagcaccttgaatttggccacccccttgggcccagacccgggcaccccacagctctctgagcccagatgaaacttgttggcccctctctcagcattgtttgtatttactggttcgttgccaaaatccaaatgccccagacccttgccccgcaccccgaaagcctccaacactgagaaacgtccaaggaagcttgtttttagcagttcattctaaaaccatttcctagtatggtagataaggctccaggcccgcacccttccacagcctgtttcatgatcagaggagaaacccccaggctttcatctcctcccggcctggcaggacaggcggcttgtttatcccctggcggagcggtttccgcgaggtcccccagagtgccccaagggggcggggacccagagccgggagagggggaccggcctcggagaggaggcccgcggtgcacgtgcaaggggtgtggaggggcgcagggagcgggcaggacagaaggcttgcggagcccgcctctggatggctgtgggtgctgggcacaggtgagacagggcttccctgccagccaggtgccagggctgagcgccacacgggctgctcagagtcacgtctcccctccctgtccctctgaggggttcacttccccccaaagggggttggttttcaggtatcttttttccatcctaaatcacagaagcagttcagagggtttcatctgtggtttcatctgttgcaaccgagaggacctgtacagtacaggggggagtccagggcaagtcgcggctcccaggccagcctggcccctgtggcctgagtcctgcccttctggggcacactcccatgccaggcctctgggctccaagctcagcccctctggaaccaaagggcacatgccatcagctggggcaggaggctggcaggctggtgtgcctcactttcttccttagccttttgcacacagcaggccctttatccttctggagccccttaggtggggagatgagggggcccagggtccccagtgcctgcgtcctccatggtccagaaacagccaccacaccggaccctcagagagatgaagatacctgtttccacgaaggcaggggtgctcactgagcccgggcctgctcatcctggagcagaggacctttgacctctttgccctgagaccacctacctcatcctcccttctgacttctgagggctgctgccctcggaagaggggaaagggaggcagaggctgggagacaccttcctgccctgccccaactcactcagaacctcctgaaggctattatcagctggaacccagtccacatc

SEQ ID NO: 27326 - DNA, 1036 bp, Bovine  19866880476801
  misc_feature (1)..(1): n is a, c, g, or t
ncgcgggcctgctgtctcctcagacggccccgcgctccccgccccatacttagtgttggctccaggagtttgtgggggacgtcagctggagcgcacaggccttgtctcgttcccattcgaaagaaaaatctctgcatgccttcagccccaccatgtatcttcttcggcgtctgggggagggcaggtggtcagaacgaggagggtccttgggttccagcccgtctgatccagctccctggcattttaacgccaggtggaaactgaggccccggactggggaagtgacttgagcatagtgtctttgtccacgaggtgaggggcaaggaggaggttcaagttgaggtcttctggtgtccccttgtccaccctggcccccccactcccgagtgtcccaagccagcacagtgggcaacctgccagtcccccttctttctccccccacccgcacaaacataagcgtgctcaccctccatttttacagcaaaggatgctaaggtggggagtgtgagcagtgcccatagaaccaacaagagcagatgccagaaggggaaccacaggatcgcaaccagcaggcccgggccttctccacctgaccacactccctctctaagaacgtgctgggggagggccagccttgggctcctctgagctctacggtccctggctccctctggccactgactttgccctccgccgccgccgcccgggacagccgtacaacttaacagtgacttcgagtcttgccaagacaagcccaatagttagttttcagactccagtccttgccaagcctgaaatagtaattgcctgaaggattccaagaagctggactttatctgctgcagagactcagtaaatcaaaacacaggtcttatctctcggttctccccctctccgttgtgtggtctccgaaatgaaaaatgttacctaatggccgaaaacagctggcctgatgtttaattatttcaactcactaacctggtattctgggccaatcagtcgtacccagggagtgggtcgggctccttccggctcg

SEQ ID NO: 27327 - DNA, 1513 bp, Bovine  19866880492095
  misc_feature (1)..(1): n is a, c, g, or t
nctctcagttggttgttgtcaacttccaatgactggccactatgctcctcgtcttcaagacttttatctcctttgcaaaacttctggaaccactgctgcactgtgtgttcatcagtcattcacgggcctaatgcattgtccatgttgtgagttgtcacctctgctttacaacccattttgaacttgagtaaaaaatcgttcaaatttgctttttgtctaaaatcgtttctgtagtctaaaataaataaaaataaacagcaagtaatgtcgttatcaaaacaacataaagcgagaaatgtgaattgaaatgatgtttaacaaaaccacatttaagaatgtataccagtatcaaacggcaaagttcaataaagcaaaaccgtaattacttttgcaccaatatgataaaaagcagtagatagtttcttatgttaatagcatcttgtcttttacccctttaccagcccctacttctgagaagcagtgactttcacttcttttatctatttcatctgatatttacctccatattttatctttatttgatcaatttcagacagtaactctttacttcctatacgagagaagattttagctcacttactccacctttcccttctttacatcctcccaatatcattatatcacagtttttaaaattaaatacataatcaatattcacattatcaaaactatgaaaatattgttcacggtagtcaaatgatttccttccttcagcttttttatttttttaaaaaagttctttaaagaaatcttcaataaatctgtgtagcaccactcaatacaatttcctatgaaacctgccaggtgataggtcaattcttttcctcccctgaagatatctcttccggagccttccagtctcctccttcaatcaagacttaagctgctctttaaactctcttaactgccagtatcctgagacttccctttactgtcatcctaggaatttgatttgcttgtcttctatgttggtctccagtttcctgggtctcagatcttcctcctgttttttttcttatttcatctttgtggttacatatcctccagtagttcccattttcatccatttcctcagcctctctggactcctgctggcctaactgccttctttcctatcagtagctctgggggtactttggtttgaactttcacctctctgcttagtcatttgtaatttgtccatatgcttttcacagtcacgtatttgggtttaatgtagcagatgtcttagtttaattgaaaatgaaactatttctctttcttatttatcttttaatttgggctcaatttttaagaggcagagaaaaaattcctttgccttcctgaaaccagagtcttcattactctctaagacaaagtatgagattttgaagtgctctgaacccacgtgctttctttccacactcacacattcacatttgagaagctctgagtcaaacattcctaacaataatattgcaaatgtagaaaataataaatgttttttcaaagt

SEQ ID NO: 27328 - DNA, 1865 bp, Bovine  19866880528108
  misc_feature (1)..(1): n is a, c, g, or t
naagcccaggtgttgcctggggtcacacagtcagtggcacctggacttttgcctgcatctcagttctgcctactaacactgtgtcgagtcactggtggcctttaaatggttccatcccccattactacagtaaaggggctgtcatctgggaggccctgagaccaggcattagtgctgaagcagacaggccaatgggtgcccctgaggttagtttggggcccaggggctgggttcttcaccctgggaggtatttggacccttctgggctcaaccccctgtggtcaaaccctggagccttgggcgttcaggagaaggaaatccagccccgggcggctggacaaggctgaagacaagagggtggggacctggcgctgacaaaatacccttctcttccagatcatcctcaactccatgcacaagtaccagccgcggctgcacatcgtgaaggccgacgagaacaacgcttttggctccaaaaacacagccttctgcacccacgtgttcccagagacttccttcatctctgtgacctcctaccagaatcacaaggtacagtcccacaaccgcccccagcgcagacacatttctgggccacgagggaggcaggcagtgaagccccggtgcaagatgggcagggcagtcgcttcaggaacccgctcagtctcccgcagagccatgagaaatgaaagacgtgcgggggaaggagacgaggctcctgatccccagcacagggtagctgtctgtggtccatgctggggacagacagagatggcaactgggaacaccgggagcgtggagcttgccttgtggcttcactgtggggcccttttgttctgcagtcttctccctggtgggattctgggcctgcagagagtagggaaggagggtgggaagaggagccctttgttactgccagcagcgggggagcaggtgattgagccattcagaagcccttccccccggcacgctcctggcacatcctggcccacctcccgccccggcccgaccaccccagactgtcttctgatccccgaatgggctatcccatttcctccttgcctgtgcccaagctgcccttccctgaaggcttctacacctgtgttgggactggttgggtgtgggggaaagattttaggcagaagagggacaagattgtccctcttgtgtcagattgtgtcagactggcgtttaggacaggcaggcagaacctgatgtggcagttgtgcaggatggggagatgtgggtgggaagctgttacaggccccaggagagagtgacgaggggctgaattcaggagcacaggacatagaatgggggtctgccgctaggagaacgggtaagaggtgcggcgagaacttcaaggccggggaggcttctgcaagatgccacttccccagatgctgcccggggttctgaatgtgcctgtggttggggtgcggggcagggccggcccaggcctctctcccatgactcctctgtgcctcctctcctgacagatcacacagctgaaaattgagaacaaccctttcgccaagggattccggggcagtgacgacagtgacctgcgtgtggcccggctgcagaggtgggggccaccccgcccaggggggctggggcgggtggatggagttcaggcacatgaatgcggggaccctcagagtatctcccctcccttcccgtctccggctgactgtctttccctcacctccagcaaagaataccccgtgatctccaaaagcatcgtgaggcagaggctcgtctccacccagctgtcgtccaagcctgacgtcagccccctgcacggagctcaccaggcgctccagcactaccagtatgagaacggggctcacatgcagtttgctgcg

SEQ ID NO: 27329 - DNA, 4609 bp, Bovine  19866880544340
  misc_feature (1)..(1): n is a, c, g, or t
ntttgtttgttttaatgggagctgttaaacatgcaaccaagacctgtgataaaccattagcattaatattgtaaaatgctaggcagtttcattcacctaaaattttatttaatcatggctattttgcttatactcagatatttttttctacatggaaagattttcttttcttgtccttcaaacatctgggaggtgatatcttattcttaatatgacccatcaaagctcttgtaatgttagtacctgcacctttatgccaagttttttttaagtgtttcggtcatttttcagagtgctggaatatgtgcatgactttttgtggttggtatttgttttaatccaacatcggctgctttcatgtcattaggctaaatctctgactcattttgaaaaatcaagttagacctacaaggctggtacctttttcaaaagtattttactgaattaatgtattgtaattgttggtaattttggtattgaatctttagttgagatgaagcaaattgcattaatattgcatcaaatatcaggctgtcttcatccagactttagaataatttcaacattcatgtcttaacaatgaaattcaagttgcaccaatagcatgattctggtatttgctttaaagagagagaggaacagtccatgagtcagtaaggaaactgctgtaaaggaattttatttagacatttatttagaattttatttagtgggaaaaccagactagtccgactacattcgtgtaaaataaaggtcttatgtatttagaaaatgctaacaaatgcacaagttgccaagtactggaaatgctaaaagctcagaaaattgatatgaaattcacatgttctactgtcagaaatgtatttgttttcttataggtataaagaagagaaattatttatataccagcttgcatattttcttgactcaatataacaccaacaaatcaaatatatgtacataatttttctcatttaaaggacaaacttatgaatccacatattcataaaatttatcctttaaagcctgagaagagagttatagtcctcactgtctcagctaggatttttttttttttttttttgcctttgattactcaataagaattacacatagaaacagaaaatcaatatgtctacttctgcttattttcaaaattgaacattgctctgtattaatttcagagaaggtatatctaagcgtcagctgagagaggtttagtttggtttagttttagattccttgtgatagttgtcacctctaacagcaatgaactatcaaaaaagtgagatttcttatcactctgtttttattccgagaagtagtatgtgaaatgagggagaaaactgtggattgctggtgaatgtgtttctaactccttttattcctgacttaaaatcagttggtaaacctgactcatgatatgtggatttttattgaattaagattagaaaaagtccaggcagctccataatgaatatctttatacagagatcttgcgcatttttcaacatcttcaaggaggtgggagtgctacagtgaagcgcaaacttttggataaggttgaaatgagtcaacaacagtgaaaaggcccttggcttcatccgtttcttttcagagtcagggaaagggagggtctttgtgttttcacttgagtcttgggtttggttattctgttttgtttgttgtatttttacctaaaagacacacccctctctacctgtaatgtagtgtaaggttcaagacaaacatggtatagtcgtgttttattctgattaattcctacctttaagaaattctgccattagggctctcaaaacccaatcctagaacagaaaagttctgtgtgcctgtatattacatgcaaaggatttgtttctgtaaattagtgcccacagtcaaattgattcctttgagaattttctgcaattgaagtccaagaagaacaaatgcagtagttatgattcaaataaaatatttattgacagtagatgatctgtaaatatctttgcccaaaatgcttatatgctactagaatcaaaaatagaaatgaagctcaggaaagtacagttcctgaaagtttgttttttatggtctaaagtagagttgttgtttggggtttggtttgttttgcacaactattgcacgttatagtgacctgacttcttaacacatgatctgatttcttgatcagaaagcctttataaagtacgctgagtggatttttttcagatgttactaggtgaccttgtagaagtccctgctctggtcatacaggaaatatgtggcatttacgtaattgctgttcgtttccttgattgttcctatccagagtttccatgcgtcgcttcagtaaagtgcgttcaggcatcggggcgacagctctgtttcccctccctgtaactgcttctggaccgtgtgcttggccgacttagcaaagcgtagaagtcagctgcatctgtgtgagccagctctgcttcgactgggagcagtcgagaataccatttgttttcttttctaaatatcacagaagttttattttccattcaccgaggcttttttgttttttcctgctttgggctaagggtgtaccaatttttctaacatctatacatacttccaaaatgtgaaacaggtcatggccttcttactgatcatagtggatagtgctgctgtctctctagctgaaactgtgaccttggttgggggacgggtaaaggccctgctggtggctgctttcctcactttttggagctttgatgtatctctgcaactggtagaaatgtagaggggtgttcagggaaaggcagctggctggcagcgtcagattaaaatatttctgacccacaaaagtaaccaaatgcccatatttcttcatttaacataattaataccttgtatttccaatgactttgataaagtgggcttcctcctcccacaccctccccctcccctgtgtcaactttgggaagactgcaagagatctatagttaaaacactctgtagatgatgaagaatagtgtgtctttaaaaaaaaaaaaacgaacatcaaaagtctcaattaggttgctgcctagcaggaagcttataaccacattaaaatagaaaagttatttcatttttagtatactgtatttcagcagcaagggttgcaatcgaaaagcaatatgaaacactttggtttggctgccaagtaaatccacattttgttataaatgtgtaattacaggaaatatatgaaaagaaaagtgttaagcatttcttatcaaatactggaaaagaggagtttggtgcctttggaatttaggaaaaacctgggatggattttggtcctgttacaaggcctgcttgtcgcatttaatttaaagcagttgttcttctgtcattatcccagagcccagggcttttcaatactttacaagacagagacggtgccaccaaatgtgcctgggagtttaagcggtatttgatcaatcacgtgattttatcagttactttttcttttcttgccttctgcacctcagcatacacattttagagtgaaaatacagacgatgtatttattttaaacaatctggcagtggttgagctagccatctggaaaggtgatgtcagccctaggcaagggtggttgctggttgagggtagtcatctgtcccttcccccgcgacacacgcacgccagcctccgcaaatccagtttaatggtgcctgagttgctgtttggttggttgaactcattctcctcagctgacatttaactagtagtttgtgctggaagagtattactactgctttctctggccttcacagacacgatggctggacaaagatgagcagccctgatctgctatgatggacagagttcaattatattactccctctcagaaaggaaaaaaagcacacatttaatgccatagctaaattggattccttctactaagaaatcctaaatttgtgcttaatagccagataaatgtagagctgatttacatttacaggctgattgtagatttggttcattgaatataaaatttggtcggtatgtagatggttttactccccccaatgatatgtatgtatctggtcctgcagtgtttttttcttaagtaaaaattgaagacctctctttgggaaatatcttgggtaaataaacttgacagggactgctatgtgtatagagctgccgctcttacaggaatatgtatggttcaggaagattttggttctctctgggatgggagtaagtgagagtcattctggagggagggcttgcgatagaattgtggaagtgtttctgacacctaggtgtttttgtttttttaattcccaacagagagatgtttcaaatgtatttgcctccacagaaagaaaattttctcctattacatggttccagggaaaggacagatatacgtaccatattttatttggagatgtcctgagagaatccctcactgcctttttccatgctacagtctgttatacagcagcaagaccaagatgatcccagtaataaaccttattggtatggttcactgatttttttggactctgcatttatttcagcagacttctctaatagcattttgcagttttcagctttttg

SEQ ID NO: 27330 - DNA, 1739 bp, Bovine  19866880567144
  misc_feature (1)..(1): n is a, c, g, or t
ncatcagccaagtttggctttgatttatctcttgcctagttggagggtagattcctggtgccggaggaatgggcagcgtctataaatgtatctccccaggaagaggcccacctggggcgggggttgctggggatcagcttgctgggtggcacctgggaacagggacctgccccgcaccacatcctctctccatcgggcagggtcaggtgatgggcctggagtgctcagagtgtcagccccccaagaggcctgggctgtgctcatcctgccctggagcccacattcagtatcagcatcaaccatgactcaaaggtgcccagtccccaaggacacgcaaggactgatgacacccagcggactggcgattccactgtccactcactaagtggggagaggcaggtccgtgcatgtcccttttccatttctgaagtggagctagtaacactttgccctgtgtcaaaggaggggagagattaagtgcggttcctgccagctctcctccagcactgccccactcttagttgacaagatcaagagctacagcgccactgtttccctgaagggtctgcctgggacgtctatgcctagtaatttacagaagaggagattaacaataatacacgtgcacactcctctgccctgtgcactcagggctgaggcagcagcttcttcttttttttaatggagagagatgtcccagagccagggaaaggaaagagaatcatcgttccttttctcactttgcaagagcacagtgcctgccttgagaaaggtactcagttaaggtttgtatggactgtgtttggaagtcagggcaggtaagctgagagcaggaccgggaggaatatcagaagccaaatcaggaagacaacaaaacagccgtgacagagggtcaaggccagaggagtctgtaatattttaagggacaaagtgacaggatacaggagaaaaagatcaggagttagtgttatagtggagaatggaagcagagatacaggctccaacacagaggagctgtgtgtgtactggctctgggcaagccaattatctttctgggcctctgactcctcatccataaaagtggaaaaccaatacagtctcacaggggtgttgcagggtgtgtgttagataaatggcatatggtgagctctctgcacataaggggtatgcgtgtgtatatgtgaataacaagtctgcaccatgggaagcatcatcatagatggtgactatcacgacgatcctgagaggcatgacaggcaccactccagcatatggaagaggagctgaaagctcagagagattcagggcggctcagggtctccgagtgacagatctggaacacaggctgctggtccttagctagctcattctatcagctgcatctgccctggagaactgttctagggagaaatcacccctgtgtttcttaacttgttctgggaactcctgtcaccttcatccatggccttttaaacatgcttcccattcccaacctgcccaagtttctcagagtatcatgattaaagctataacaaacctagacagtgtattaaaaagtagacacatcactttgctgacaaaggtccgtctagtcaaagctatggttttcccagtagtcatgtacagatgtgagtgttggaccataaagaaggctgagcgccttgaattgactccttcaaactgtggtgctggagaagactcttgagtcccttagacttcaaggagatcaaaccagtcaa

SEQ ID NO: 27331 - DNA, 3108 bp, Bovine  19866880603500
  misc_feature (1)..(1): n is a, c, g, or t
nggtccctggaccttatggtgatgtcccccacacatttacttttttttttttttctaagagattttgagttgtaaaaggatcccaaatgatacaaaacaataacatggtagtttttgagaaaatacccatcagtgttaccttgctaaacattttcctttccaaatgtctatgtagcctgttcctcttgaattgaatctcctcagaaatagtagtctttgttccctgaaacaaagattttttcagatgaaacccctgatgaattccgtcgtggtatatcatttacaacccatgctacctgtgtctatggtggtctgggttagtctgtattgatatcaccagctgtaatttgcaaccaggcagataattttattaatgcaaattgcctcacatttacagcaaatgctttaaaaattatgatgatgtcatgattagtaaactgagtcatcattaacaaaagtccttggtaaacaattttccaactttctctagtatccagactgttggataagcaattttcacgactatattctagggctcgctatgcctttgaaaataagctgaaggtcctcaaagatccaaagctttagggcataggaatggtcctccatcctaatgaattcctggatggcagcagagaggaatatgtctgtgaacccaaggaacgcccccaccactttctgccctgaggccttacctcctcccactgtttgttcctgaagcaattgtggtgggtgaacctcagaagacacatttggaaaatccaagagaaatgcaaattcatgcaaggatttcttttgacgctttacccatcactgttcagtgaacatggtccaaaaaccttgtcacaataagcttccttctgaaatggacattgcttcctttcctcttatcagtctggaaagctggcatacccttcccttggtgaggcgccctggcacctccgtgcggcattcagccagagttcacaggtggcgggctgcatccatgctgcggaccaaggagagacacgcaggttcatgttgctctcctccccgacaccaccatctacatcttgaaggaaaaacagaatggctggaggtgaggcggggaaacagattttttttttttttttccctagtggtcatgcttctatcttaaagatctcccctgtgcattttcagattctcagttctttgctgtcctcagtggtgatttggtagtggaagatgatgtggcaatagtggtaaagaacccgtatgccaatgcaggagacccaagagacaaggggttcagtccttgggtctggaagaacccctggagaagggcatggcaacccactccaggattcatgcctgggaaattccattgacagaggagcctggtgggctatactctagcaagaccacatcgtattatggataggaaaagttttaagaaacataaaaataagatgcggaactgcattaactaaattcaggaaggacagcctctaccggacactttttttaactaagaattaaaagatagagaaaatgtttgtttcaattatatattattagtcatcagagtatggtaaaatgcattaaaagtctttggaccttgtaaacatatattaaagacattactcatcagggaagaatcagtgatttcaaagtatcattatcttaaaagctttagaaacatgcacctttcaaacttccaattaagttaaactaatctgcatcaatctaaggaaatatttagactctcagagtcaggaaattaagccaccagttcttaaattcagagcatacctctacgtctgtcttgcttttgtacttaatgtttgtagataaatgctaagaaaatgctcgagacgaacagtgtattcaaatcaaaagtgcatagaaactaaaaaaaggggccaggataatggaaccaaagggacaggaatacaatgataatttgtcaaaaacaccttttccatactcgctatcctgcaaaacatgactgatcaactatagaaagtaaggtaataaatagtgcctccctcccaaaacacttttagcataaaatggctacagacattttagaagaaaacatttaaatgactgaatgatttgtacatcggcatttcctacattttatttacgttcatatcagcaaacacctacttgtacttttatatgtctaagactcagtggataaaaccgtgaagaaaacccagttttattcttttctctcttgccctcaaaatgtttaaaatctagaatgacaaagaaaagacagactcctaacatactcctaacacatccaacacacacatttattacttctccaaggaaatatctgagtaaaacaatctagaaactgtcaaaatatctaataaaatattgatgcttgagtgacacttgctttgatactgcagagccagagtaaagtgggaagtaagtacaattacacagcagatccgggtaaatctgggatcaacagagctgataatttcaagtcttctgcaggtctttatccagcttggcttagcactgttcttctcaggatagggtcttctgtataaggtatctgggaaatgcatacctgctgagcggtccccaccatcctccagctgtgatcatctctactacactggcagtaagatgagaagaggtgtctgagaggctcactgacgttccttctagatatgacattctatgagcaaagctaaaacgtttctttcagtctgaccattccaagaaagaaaacacgttatttaacttctgtctcagaccagcacattctctaagacaatgtctcaattttggcaaaagaccttaatttatgtctctttatggattccaatatcatgagctaatcctacacctaaaaaaaatgcattcattatgtaagctttctcttaagcaaatagaaggctggagagtaggaaaacactgtttgccattcaatgcggcgtcagcagaactttccattattaaggaggaggctgcccatttctagataatgaggacaaatttttcatcatcattgtggtgcccttcatttcactatgtcactctggaagtcctgtactagtctgaacgtcctatactctccacctttgcctcttgtagcatcaacaggttataaaaataata

SEQ ID NO: 27332 - DNA, 1129 bp, Bovine  19866880606053
  misc_feature (1)..(1): n is a, c, g, or t
naagtcctcacaggaccactgaaattctcttgggaatgggtttagggactttgcttgctgcgcagaatgttctttcagcccagctcctagggaccaccctggaagactcctgagtagccactgcaccagtcctattagaactagtgacctcaaacaagggctggcaaactgtggcctttggaccaaatctggcctgcagtccatttttgttctatctgtgagtcatacgaaatggtttttatatttctaagtagttgaaaaaaaaaatcaaaagaagactctttcgtgatatatgaacattctatgaaattcaaattttggtatctataaatacagtcttgttggaacacagccatacacatttatttacctattgtctatggccgatttcctgttgagaatccctagggaagatagaaggacggaggccaagacaagtaactggacaagtgttcttaaatttgtagagtgggctgctgcccaagtgctcaggcctgggttatccctgggtcccaggggtggatgagctcgtccagaatcaagccttcttgcttgaggatgttgaaagatacacatccatggcctggggcacttaatgtcatctttccccccaacagcgtatattagcttcgccttagaagtgcaagtcaccttttacttattaacagctctatttcttaattgtgtaaaccctgttatgttggaatctgtgtaatgacaatctgatgggacttctttgaacatacatagggtttacttcctcttctgaaagcaacaggaacgtgcctgtgagtagctttggcttgctgaggccttcctgggagcggaggatggaggcagaagcactgtggctttaattttctggctaattcagacagcttgtagcctctgggcctggtgtggcctggcagtcgcttgcactttccttggccagggtgggcctggcctaagaatgccagtgcacattaaagcctcttaccgtccccaagagttagggcggcaagggatcaaaggcatacgctgcctggctaaacacatcactcagtgtccagtgatgcggtgtcccccggtggcctttgagcgcagtccatgatcataccacttctgggctactgccaccttataaaag

SEQ ID NO: 27333 - DNA, 733 bp, Bovine  19866880675385
  misc_feature (1)..(1): n is a, c, g, or t
ntaccctaacacatatatttcatattttctatttccaaaaaattggatagaaaactcataatataaataagggtgaggggaaggacataccacttgtattaaaagccatgcagcacactggtttttcatgagcagggaaatgggccacgatgccatcactgtcagagtcctcgctcacaagcacctgtacagaaaggaagaggcaaacggaagttaaccaattactgaccttgaagagacacaacaccactacatccctgaccaagtaacaggcttccgctacatttgaagattattcttcataatacaaggtgggcatgccacttcagaaatagggaaaagatgtaaattgcccccagcgaatcaatcacataacctctaaaaacaactggttgacctgactgcagatgacaatgatttcttgaagcttcagttcagaaaaaatgaaaagcctaaaatcagctctatacagctttatctaaaaatatgaacaggagttcttattgtgttatggcctgctgaaaaactcttgcccgtgactggaacagaacagcaaaaaaaaaacacaaaacaagttaaatacaaacaaacaggcatatatatatttaggggaattaccaaatattttttacttaaagtacaaacactgtggtctttaacctctagtttttagacagacacaacacttctttgaaaatactaccagtagaacaagcagtttggtatgtcaaat

SEQ ID NO: 27334 - DNA, 1754 bp, Bovine  19866880702859
  misc_feature (1)..(1): n is a, c, g, or t
ntatcaaccaaaataatacgtgttaagtgacccaggatcaaggtatagctggttacacaaaggattgttaaggatcttcaacataacttaaaaagcagaagttttaaaaaacctgatttaaaaaaatttttttaattaaaaaaaattttttttaaataacagcacaagattcaaaaggctctcaaaatactaatatattatgtatctgtttcatttcagtcttttctgcaatcctttagagaactactcttccccaacacccatgtgatgtcggtaggactgttaatctgttaaacaaggtaccactctcataatgtgggtagattcagaatccaggcctgtcaattaaataaagtatgccattcctgtgtagtcacactagttcaagaatgagtatgagattcaatctaggccatccagagtaattataggtgactatcttttttttccaggttacctagctggaaaaaaagctagcaaactatagttatcactgtttccattgggaagaacttgcctgattataaagccaccacaatagtcaagtatttttttcataagtcctaccaaagctgggtttgtgtcaatggcaactgaaagagttctaatacaaactgtcacaaagcaattgccactgagttattctgaggaacaataatatacagagggctggagatggctgagggaaaaaaaatgaaggagtaggaaatatactggggtttaaaagatgagtagaatttggatttggacagacagagagtagggcaattcaatacatagaggtgtaatcaaaagcagagatacaggaaagaacaaggtatcctcaggggattgtgaggtaatttttcaagtgctcaagttggaagtctgtagcagaaaaggctgaaaaggcagattcaggttagaccattgatcatcttgagaaagcttgagaaatatggactttatccatatgagatttttaagcagaggaaagatgttataaaagtaatattagaaagactgatttggcattgatatatacagttggtcaaaggaaagagacctagttgaaaggcaaccaaacaaaaggatgtatagttggaggagctgaaggcaaggaggcagaaggggctgagaaagtccttgtgataggctgtgtgcatgctcaaccataggggtattaaatataatgccattcattttgaacttccagaaatagaaagctaatgagagttgtacagtcagttctaaaaagaggagcaataatataccattattcattctttgtcttatgctgtaacaactggatgtctctaagaaccaggtaaataaacataaatgttgtatccaaagttcacttattcaaagctcacaaaaaataatttgcatagtatgcatattctcccaacgtaagttcttcaaaacatagatttagataaatattttataataattctttatagctatcataaagtgatacctataaatgagtctcaaatggagataattttgcagccgaggggatatttggcaatgtctggaaacatttttaactgtgacaactgtgagtatactattggtatctaatgtacaaaaccagagacgctaataaacatcctataatgcacaggacagcccaccacaacgaagtatgtagcccaaaacgtcattgctgtcaaggttgaaaaattcttttataattccacttcagtactaggtccttaaaagtacttattactttgataattaaaatgacaatgtctaaaattcat

SEQ ID NO: 27335 - DNA, 2182 bp, Bovine  19866880712106
  misc_feature (1)..(1): n is a, c, g, or t
nccagactccccccaggtacagcttgtccagatgcaaaacggcagtggaccgttatggtcgcaggaagaaccaaacgaaagcgctttagcttatgtcttgtgtgggaatattatatgatgctttgggggcagcgcaagggagaagagcaggtggggcagagatgaccctgtgtcagttacccaatgaaatctgttatctcgtaggcaatgaggatacgtcatttttctaattatatattgcctgtgactgttcttctgggaatgtggaataaaaggaaagtgaaaccagagacgtacaatgactgactgttagaaaactttaataattaattagggagcatctgcggtaccacagggtcagggtgcgaggaagatcactggtccgtttaatatatagctcgggtcaaacctgctcccttttatatgtgttggagtgcttcagctgttgtcgcactggtacgagagatggctcataatgaacagagtagccagtaatacatcgtgctattgctagattattctatgtgtgaaattcagcaaattcctttacatataagtggaaacatttataagttagaaaacttctaggcttccatagagatagttaggtgtgttatttttgacctgaaagccttctcctttttacaaaattattttttaaaagtccagagtttaatttttaccagtttgatagtatgaaagcataacctgtaaaatttttcaagtctctgattactactattttatatgtgtttgttggctgttgtatttcctcttctgtgaattgcttgttccttaggaaatgccttagtccgttttgcttttggattacttgtctttgagcctttcttcttaaaaggcaaatattattttctgagctaagaaactacctttccaagcagaatttcttcctcagatcctgagtgctttctgatcagaaacagagtttggtaaagagccttctcttattgtatggctgctctataaatgctgtttttaataagtaccgaaaatatattgaagtttgtccttggatgagggtttatcactgttggcctttgggtgaactttgagcctgagctgtttcattcaaggcagcatgatgtcatttaactcacaaatttctctgttgctagaaaaaggaatgttgttcccctaaataacctgaaggactgaataatactggcacaacattattcacctctcaggtctccactaaagacttcagcatggtaagggttttattgtttgcagaggatttgtggggatatgttaaggagtaggggcaagcaaaaactgagtctggtcctgaatctggagaatactttattctgcagcccactcagctgccagtaagacccagctcacactcacttttccaaataaaaaccttgggatccatttttgtttcttcatattgaaagactctctaagtttctttctagtgctgtttgttcaacatatgaactgattttaggctttgcaacagcagttaaagctgaaagttgcatctcagataaaaaagtagatgccatttgggtcagccctgctccacacccccttacttgagaagtagatctctctgattccagtggcactgagcttcgtttcaggaagtatagcagttttttttttaccatctcctaaagttgggagcttggagtttcgctagcagcggagcctgtgcttgatcagcagctgtgtcctctgaagcttcgagaatttattactgggagttcaagagatgcaggaaagactagaacaagaacataacagaatcagatagattgtcccttcattgagtttataaataagcccggctcattgtgcagcagtatgctttgtgttagtttttagaaaaacgatgcttataacctgtatgtggttagtctcttttaactttcaaatgtattgtcaactctttttcctttcattgcttttaaggatgaatggtgcctgagatcaaatagttgttcctttcatttctttaatagaatatctaggtcctctgtcccctgttgtaaactcagtagttaggaggatctaattttttcctgagtatccaaaccgtggccaatacacttgagaaaagtaattacctgttctaatataaagtgtattaatattaatgataaaaatgtactttctctctttgaactggaagactagattcgttgcagat

SEQ ID NO: 27336 - DNA, 1650 bp, Bovine  19866880723764
  misc_feature (1)..(1): n is a, c, g, or t
ncagaacaccgagaagacgcctgtcgggtggtcctcctcggacataaacactgagctagagccctcactcacaacacagatgtctaggaggagcttttgaaaaaaggagaggcaggctggattgtaattctgtagagatggaagggttatggctttcctaagtgcatatgtgtgtgtgtgtgtgtgtgtgtgtgtgtgtgtgcttacagctgcttgcctggggcaaggctcacccaatcatctaaggatgcaagaaactgccctagtccccaaccgctggactcagtggcagacaacagtaccaaggccaaaggcagcataagaaagagctgtctggcaggggtggggtgtggtcacaccaagcctgtctgcttcatccttgcccctcggggcttgcaggacccaccgacactcgccaagctctaaagcctgcagcagggcagaggcaggtgcgctgccttagcgttcgtcgcccaagggctgctgaaaccttagtgggcaaggcggtccctttccctggagaaggctgtccttcagggcaccgcctgtacagcacagtggcggaaccacagcaagtctgtaggcagcagcccatggagcaggggtcggttccataggaactcccctctgcactgggtttcacaataccagagcttccagaatggatggcaaccagagtgttaactagagaaacacggtgggttaagacaaacacacgcaccctctcccagcagagaagccccacactcacaggcgccgctcacgaccaagtcaggctaggagtgcgagcccacctttacctgttccgggtcccaccacgtcccggctcggggactcagccatggcgtcggccagccgctcccgcaggccctccttcggtgtgctccatggaggccatgtgccgcagcccaaagccctctggccagctcccgcacacctccagcagggtcacgctccggtcgaaggtacctgcagcacacacggggacatccgacctgagtcaccttgcagagagggcaggctgttctcgccgctggcccaccgccacctccccgcccccgcccggggcctgtttcagcccttcccgaggccggaggaaggaacaccatgaaacatggatgcacggggcagaacgagacggctcatgccaccagctcagggcatggagatttccacgatgtggggttagtagtttttgaactgttttcgtttttcctattgagtggcctgtaagatctttattccctgactagggatcgaacctgggccctcagcagtgaaaacatgaaaaagagtcctaagcactgaactgctagggaattccttgaactgttttcagaggatctatagggttcccctgaagtattcagggactacttcaggctggaggtcaagggcagcagaattcttgcccaggttcaagcaaaactaccctacttgactctgttaatgcaacagggcttcccctaaagcttcatttttaaaagggcttaccgagttcacattaaaaaaaaaaaacaatgctttcaaagccactatagcctctaatctgtaccaaacgtcctcgtctcacatctgaagctcagaaaagttatgtcccaagatccaacagcaggtttgggggccgggtttggttcaaggacttggatg

SEQ ID NO: 27337 - DNA, 2454 bp, Bovine  19866880778657
  misc_feature (1)..(1): n is a, c, g, or t
natgtttttttagtctttaaaagagcttttttgcccctttttttttctgtatttcatgatattttaaaagaattcaagtcaccagttgtccttaggaatattttataatctggatttttctgatgataagattcaagttaaagtgtttgataagaatgttttgcaagtgatattgttacttcccatcatatcatatcaagaaacacatgctatcagtttgtcttattacttgttgatcatttagtttaatgttgattaaactgctgtccatcagatgtcattttgcaaaatatatctcagtcttgtgtatcatttaaaatataggactataacatttttcaacaatctaaagtgttcatattaccttttgaatgggcttccctggtagctcagctggcaaagaatctgccttcaatgcaggagaccccagttcaattcctgggtagggaaaatcccctggagaagggaatggctacccgctccaatattgtggcctggagaatttcatggacagaggagaatggtaggctgcagtccagggggtcgcagggtgtcagtccgactgagcgactttgaatattctttagaatactaataaaatttgtagtttctcataatcaaatactaagactagatctgtataaatatagagaaattgtatataactaaaatttgatgggtctgattttctatgactatagatctttgagcgtcagggaatttgtgaaacagtagttcctgtcataagtgaatcttagagacttacctatagcagatggtgtgtgcatgctcagttgcttaatcatgctggactgtttgtgattccatggatggtagcccgccaggctcctctgtccatgatattcttcaggcaagaatactggagtgggttgctgtttcctcctccaggagatcttcctgactcagggattgactctgcatctcctgcatcttctggattggcagagagagtctctacctctgagccacctgggaagcccgtagcagatggtaccatccctcatgtcttattttggattcatttctaacttactcatttcctttgttcccatgatccaacaaaattctgttacatggttaattttgtaaaggtattgaggaaataagtaaaacctaatttctgtcattctaagagaattcagtctgcctgaagaacttaggcagactttaggtctaaagtaaaacatctgtgacttaaatctgggcttcccagctggtgcagtggtaaagaatctgtctgccagtgcaggagatgcacatttgatctgtaagttgggaagatctcctagaggagaaaatgacaacccactccagcattcttgcctagaaaattccatggacagagaagcctggcagactacagttcatagggtcacgaagaattggacacgactgagcgaccgagcacccttgcatatataactaattaaagataataggaaaaagcccaacaatttaaaaataaattttctctaaagtcgttgattgatctttttttgacatacacaattaaggctcccaactaaatgctaatttgcctgccttattttggtataactctaatactgacacatttatattctaggtttgggttggcaccattgggtcagggcccaagggtcgcagtctctgtgctaccttccagcacacagaaacatttgaattccaggatgaagtgggagctcttttgttatctgtgtgccagactattagccaaggaattttgtgtttcctgccatcttacaaggtaagggagtatttttgtttacttttgcctttgaataatcatatgacattaccatgataagcttcctaggatcaaatgcaacagagtaattacagttttttaagcatcatatattattttgctttttattggttaagatactgcctgcttattctgtcactgttttacctggaagtccaaaagactgaaggtgttcaagcattttagtggggtgtttttgtatatgtgatttttattccttggggcaacttgatattttctgattaaaggaaaaaggatcattatttttcactttgataaactagactatttgaaaatttcaaaatatgaatttaacatacgattttctttaatgcccatctttttgcttcatgtatttggctaggaaaaaaaactgtttttcttgtttttagagtcgttctgagttttaatattttcaggagttaaattgagttatatagtatattttagtcctcctaatactcaaagcattaaaaccacatataattcctgagggtattatcatagtttatgaaaatctaagctaaatttcagtgtagaggtggtactcccttttcttttttctaggaagttatatatataaggacagtagtataatatattagaatgacaatattgatacctttggctcttctggtggctttccctctgtatatatactgcta

SEQ ID NO: 27338 - DNA, 2509 bp, Bovine  19866880784891
  misc_feature (1)..(1): n is a, c, g, or t
nctaactcccagtcagtcaattcagtcactcaatcatgtccgactctttgcaaccccatggacggcagcacaccaggtttccctgtccatcaccaactcctggagcttgcgcaaactcagggtccattgagtcggtgatgccatccaaccatctcatcgcctgtcgtccccttctcctcctgcattcaatcttttccagaatcagggtcttttcaaataaatcagttcttcacatcatgtggccaaagaattggagtttcagcttcagcatcagtccttccgatgaatattcaggactgaaactcatcaggactgaaatttcctttatatttgactggttggatctctttgtagtccaagggattctcaagagtcttctccaacaccacagttcaaaagcatcaattcttcggcgctcaactttctttatactccaactctcacatccatacgtgactactggaaagaccatagccttgactagatggacctttgttgacaaagtgtctctgctttttattatgctgtctaggttggtcatagcttttcttccaaggagcaagcgtcttttaatttcaaggctgcagtcaccatcagtagtgattttggagtccaaaaaaataaagtctctcactgtttcatttccccatctatttgccttgaagtgatgggaccagataccatgatcttagttttctgaatgttgaagtttaagccagttttttcactctcctctttcactttcatcaagacgctctttagtccttcttcactttctgccataagggtgatatcatctgcatatctgaggctattgaatacttctcccagcaatcttgattccagcttgtgcttcacccagccaagcatttagcatgatgtactctgcatttaagttaaataagcagctaagggacaaataattccaatcctaaaaaagtattacaggggataaaacagtggaaatactctacaattcatttaatgaggaagcaaaactatagggacatctcctgaacttaaatgcaaaaaaagattcaaataaatgctagcaaactgaatttagaatatatgaaaagatacactatgtcaatagggatgtagagtaatttactattagaaatcactttaaataagctttatattaacaatttaaaagagaataatagatgaatttttgcttgatgcaaagaaaatttcattcatattttcaaaattcttaacaaattaaaagtagaggtgagggatggtatggagagggaggagggaggagggttcaggatggggaacacatttatacctgtggcagattcatttcgatatttggcaaaaccaatacaatattgtaaagtttaaaaataaaataaaaaaaaaaagaattattcctagcttctttgcatttgtaaaaagggtcatttctttaattggttattgttggcctgtagcaacaccagcaatttctgtatccagcatccttgctgaactcttctattagttctaatagtttgctgattctcctggattatctatgtagcaaatcatatcatctgcaaataaggtcagttatctctctttccttccaaatcttacatttcttaatgctgtgcttactttattgcattgactagtacttccaaataatgctgaatagaaacggtattaatgggcatccttgtctcatttctctttgctctctcttcactgagtaaaaccaccataaattctaaagctgtgcctcccagcttccatttgtataagtaactgtatacaaattaaaggaggcacattagccaagagagccatgtgactaccatgtgcctcagagcatatgatgtaacattctaataaagacatgacaagcctcaacaaccacagcctacagtgaaatagccttacatgaattgtgagccttggcttgggtatagcttatttacaaaataaggttcaaccaattcctgcataagccaccatcagttcatattccagaaactgtggagacgatcacatcaaacactgcatgatttttaccatgttagcttttgaaactggggggaaaacaggcagaaaagaaataaacagaaataaacagcgtgttctctctcttttaatgaatgtaataacagaagagtaatgaggttggaaaacagatgtggacaaaggaaaacgcatgctacagtgtagcccacacaatctggaaaggaatgataaaaaaaaaaaaaaaaaaaaacaactttacaagctgttttgagtcttgaattaaaaggagtaatcaagcaaggctgacttataaagggtcagggggtagcatcctgcagcagagaataagcaggactccttctccttcactgtctcctgcccagctgagtccaggaaggaggattttttcccatgcagcagcctctctgaacatatttttgattccgggtttaataactgccatctaacctccttcccctatccacccgctccccagggaggtccttccctaatgggtggcccttttcagtct

SEQ ID NO: 27339 - DNA, 2844 bp, Bovine  19866880798157
  misc_feature (1)..(1): n is a, c, g, or t
nttctgatgtctattttgtctattaatataacagttcctgctttcttcagttttcactggtgtattatttccatccctttacttttatcctatttgtatctttaattgggtttcttgtagacaaactatggttgaatcttcccctttgatccaatctgacagtttctgtctaattttaattgcgtctttaggccatttatatttaatatgacttttggtatgttggatttaaatccaccatgatgttgtatatttactatttgtctatatgtttttttcaggggtggttccttttattctccccttgacttcttttggagtaactgaatatttttaggattccattctatctaatttgttattagctatataacttgtaattttagtggtggatttagcatatgtttttaattaatcgttaaagatcaccttgaaggaatatcataccacttcacatacagtataaaaaccttataactttttaacactgccttaaagcaatttaattatgatgtgccttatgtcatgcttttaagttctgttaggcaaaactgcaatagtttagggaaaattttgcctcactgtggaggaaaaaactttctgtgtattatccccatttgcctataaattatgaggttttccactattaccgctggaaacagaggattcccagtcctgtgagagcactggtaaatgttcactctaacccttagaagtggtcccttcctgggtcttgggtagtttctcatgtgctgatcagtactcagctgaaggcctataggatgtcctctgcagatctttagagctagctatctgtacagctctctgttctctggtactgagctctgtgaatacaagtttcttggcctccccaaactcccagcttcatcttttccactgaggaagactgctgtgctctatgtggatttcccctcccttgttaccatgcgtcctggtcatgagccagcacaactgtaggactccgtttgttttgcatctctcagggtaactgcctgatacccaataccttgaaaaccactgtactgtacaattgtctaccttattttttttcaggtggaaggatatgtctgatacatgcatttactgcaggccttgtaaaattccatgtgcagtgtatccaactaatgtttagaaaatgaatgccaactatttcacctttatgaaaatcaactgagagaaactgaacaaaatctactttaaattaaattagtaaaatatgatccatgtccacaaatatccttagcttaaactccaattcatgatcttatcaccaacaccaatttctgcttctcagatggtttttaacatctacatgacaaatgaaaaaatatgctgatttttctgatttcatgtttatttatggagattggtgttaagattttctaaagtatactgaggaatccttaactaaaagaatcctctcacagcagttgcaaaaccccaaactaagtcattacacttctgtgtaaaagactggacacctgttatcttcattctagatttcatacacacacacacacgcacaatctgttaagtttaaaatgatttactattttgcttcaagtaaaacactttaaaagtcatttaaaaacaggcttattagcaatacaaggcactgtctaaacacaggaatgaaaccgggtatttgaattgttgaacagacacatttcctgtttatgagatcttaagaactaccatgaaacatattccaattttaaataatgtgttagatcaaagcacaataagaatcccttatattgctccttaaaatagatgatggtttcagatggttaagaaaagaacaggctcctgcctaatgtgcccatggatgggagcatatttatccacactagtatcttgaggtgagatttttctgtttgtgggcactaagaaactaggagaaatgaccagaaatcagctttcactactctggatctttcaacatcttaggacattactgatgcgaacctaagtctttgcaaaacgatactatattgtaattagaatataaggtatgagcagttatatttacagtgactataagccctcaaaagaagttaatgaactgaggctgaccttgatcactgactcagatcctgcagcacagggcagtacctgctccctctcccacattggccaacctctgctgcaacagtaatcaatttgccgtcttgatctctcaagcatatcatacattttttgatccatcattaagcctcaaacttgtggcctaattaaattactgaggaaagacactttggaattctagactttggcaggagaaaaagcagagataaatatttgagtaaggtgagaaaagtattacctaatctccatggggttatttatattcaaagttgctgttcaaaataaaattttatttgactgcattttttaaacacaaacgatgtccaaccatttgcagcatggtaattaaatgccaaacataaaacaaaggagaaggaagaaagagaaaaggctcaagggataagacagctccacatgacaggtgtaaacagatatggaggtggtgtctaagggtcatcaaggtgatcttccagagtgtagaagttacatgggagaaaatgtggaaggacagaaaaaagcttagagtgagagaaatgaaagaaagacacagagagagagatcagaaaaaagaagagtcaagcttgatcttccaaataaaataacctaataatgaattttgtcaataggcataaatttcagttgtttccaatgaatgataaaagccactggggaaatcaaattacttctagaattaagagacaggcagtgtcataccagagaggaaagaaaacaaac

SEQ ID NO: 27340 - DNA, 1427 bp, Bovine  19866880824663
  misc_feature (1)..(1): n is a, c, g, or t
ncttttgttaccccatggactgtagcttgccaggctcctctgtccatgggaatttcccaagcaacaatactggagtggattgccatttccttctccaggggatcttcccgatccagggactgaacctacatcttctgcattagcaagcaggtcctttaccactgagccaaccaggaagcccagagtgctgggtaggtacccacggtatcatgtcagaaacttaaaaatactgatgatggggtttcatttttctctcaaaaatctaactgattacatgtctgggagagagggtagttttggcaagagactggccatgaaaagatctgaatgtgaagtccagatatgacaatattgtgctgtataaatttatgcctatatattaatcttgctgagttctaccttctcttaaggtggcaggattacacattctaagattatgattctctcttccctgaactcaaagcatttactatctgtacattaattgtgcaattgatcatagaatgctttgtggcatttcgtcatcttttaagtaattcaaatgcatttatgtctcatctttcccaaccatagctccttgaatcgagaaaggcacagttttcttgtctcccacactgctaagaacagaaagacacagaaagcattcaataaataccagcctatttcatagaatgaatttctatttcatagaatgaatcgattctttaagaaaatgctcagagggctgtcacctagtgtttggaggctccgtcacaagttgccttttaactggaaggaattgggaaggaagaatgacgaagccatcagttacaggagcttctttataggacaaaaatatgccaggaaggaattcaaggctttttgcttgttgttgttcagtcacacagtcgtgtctgactctttgcgaccccatggactgcagcacaccaggccttcctgtccctcaccatctcccaaagtttgcccaagttcatgtccactgtatcggtgatgccatctagccataacccgccaaaagaagctaccgggaaaggtgttttgttttccaaggatgaaaaggaactgggcaggggcatctccctgactagcagacaccagggaaagacttatcaagagacttggtttcctatgttcattgctaagtccaagcagcaattatctactttagcaatgatcattaccatcacaaagaattaggcgcggcccatggtggcagtatctggatttacaggaccttactttgactccagctctagtacttggtaactgtgctgatattactcaacatctccaagtctcattttgctcatgtataaattataaaataacaactccttcctgagtccattcaagaatcgagcagtaacatggacggacctagggatgaccacactaaggggagcaagtcagaaagagaaagacaagta

SEQ ID NO: 27341 - DNA, 2183 bp, Bovine  19866880923370
  misc_feature (1)..(1): n is a, c, g, or t
natcattccagatctgataccattttaggaaaacaattcaccagtattttcaaagaaatctcaaaatattcatgtcatctaattcaggaatccataaatgcacagaaaaaaaaagaaatctcaaaatattcatgtcatctaattcaggaatccataaatgcacagaaaaaaattatataactataagaaaaatgtttttaaaatatttcatgaaatttaagctaaatatgagttaaaagagcagggttcaatatatgacaggacgtgttaagactagcaagaaacgagtgacttttgcgttcatggctatatttttttccttcattttataaatgtataagcaagaacatgaataagcactaaaatcagggtaaagtagttaaaagaaaaattaaacattaatcactttatttaggagttaatggcagaaaattctcttttgtcagaggtaacaaggaattgcaatcaacaccaactgcactggtgactaatggcccattaaggagctgtcatcagcacagtttcgtggaggttcagtgtggaagacatgagtgcgttcctcaccggtcacaatattgtggtttagaaaattagggagtttggacttgctttttttcaaagcacatcaagtctagcctcgttccagtaagtctattttcagctaacagataaacagctaaacagttactgaatgaagtaggtcactttccttttaagtaggcacacaaacacacaattataccaaagaagagctggaaaattatcgctggtcacacaactaaaaattattcagaataacaatacagtgagctatcctgaccaaagtgtgtgacgcagataagtcagaaagaaattgaatacttgagaactatatctcattggtatattgtaaattaactaaataacaccgacgctgcctttactgtttcagatttctcttcactgagctaaccatcataactttttcatacccaatagagaaaagtaagccattcttacaaagattctgaaatctaatatatgctgctgtaagcaaaaagccattcagtattttcctttgactgaaaaatacgtaatgcttctctcatcaaaccccatcatggaagcatttgtgatcaatcttgaagtatttctgtatttgttttacataaaacagtgtgacctttgattccctccctgtggtttgttttaaacagttgttcttttctgaatagttgtgctttctattacatgctgtcattcagattcacgatgtcatccctattattagaactgttttgttgtatacttcacaattcaaaagaacggtgattataaggataccttataatcagcataaagtttacgagccatcatcaaaatgaaccctcgcgcatacacaaaaagaactcacttgacaaacatgcagggggcagctctgtgacatgaaagggtctttgaatgcaccagggccttcactcaagttttcttaatgactaatattctctttgtgtcaagaagattcataaatgttcaaaaatgcaaagggatgtcagtatgggtagaatgattcaaatcacacacacacacacacacacaaatagaatccagaagtcactacttaaaatatgcaaagcttctttccaaagtaattagattatagacttcgacctagcaaacagacataaataccttaaactggacaaacgcaaaccttaaaatcattacaagagaaaataaagtgtgatttaggaaccttaagagattaaatacctaatcatttaggcaccaattctcaggtgacaaaataattctgacttactttctaaatttgttcgacacttgtgagtgaacagggaagggaaaatctcaatacaattcaggagagaaatgggataattactccacgtaatcaaacctcccagagactgcaggctactcactttagcagcactaatgactgtggcggtgtaagactgaatgttgtctccacaggctccaccacgggactgatgacatcgaatcaactgcaaagagagagagagtgaccattctgttccactgtttaactctacaggctcttaggacagagcttatttaccacatagaatggtggtgatgggtgggaatatttgcatgagccctttttcgacaaacagctaaaagccctgctgagacacttttacccctttttataatctatc

SEQ ID NO: 27342 - DNA, 1300 bp, Bovine  19866880925491
  misc_feature (1)..(1): n is a, c, g, or t
nctaaacggcataactaacagagtactcgggactttaaaaccacaataaaataatagtcattctcaaaacgaagtgaaaactgtaaccccaaatttgaaagaatcatagacaaagtgatggaacaatgtgagaagaatgttaaaatcaatagtattaaaatcaatagcaataggataagaaagagcaatagtgtcaaaatgataaaaccgtaggaaaaaggtgaacaatgaaaatactaatattagtattgacagaatactataatataatttattattgatgctatagtgaattattaaaataaatgttaaccaaaatcttaagagcaatagtactataaataaagacagcaacaagaattgctagagtaatatgacaatttatgaccaaggttttaatagtcccaacaacagtataaataatgatagagtaataagaagtagtgtaccaatgtgatgaaaaagaatcagagtattaagagctacaacaatatgacaaattatgacaaagtaacaagaagtaatgatgtggtgaaaaataactagcgaattaagatccataacattacaaataatgacaaagtaaagagatattgtaacaatgtgatgaagaatacctggaatattatgaacaatcctaacaaaacaagtaacggtaaaataacaaaaagtattatacggatgtgaagaaaattaatgtgaatattgagaacaataatattatgttatggtaaaaaattttggaaactgtgaccaagaacagagactgaagaaccagccacggaaacattttagggatacagagtaaaaataataatagattaacatgacctattggaagactgtatttaatgattgcctaagtattagtacaatactaatagaattactaacgtgccaggaggccctagaatgatgtgacaggaaagccataacaacatatttgataatggtgaattaacaaatcaaaccagtactttaaccatacagtattaaaaataaaagcactaataactagtgtgtgataggatagttttaatgttattgaactggccagaatactactctgataataaagataattaaaatgcttaaaatagtataaactattaacaattcccccgacacaagaaaagtatcaccagtaatctagaaatggaaagaaaaatgctatccttagaaaacgagacagctgaaaagagacggacccaagcgcacagggcgcggagccgaccggccgcgcccgcagagggctctaggagcagggcgagcgccggccgcggccctcggctgatgccgg

SEQ ID NO: 27343 - DNA, 1102 bp, Bovine  19866881012532
  misc_feature (1)..(1): n is a, c, g, or t
ntctgattcggaaaggccacacacgtgttgcttagaatggcagattctcctcactcaccaaagacacagatctggacatcagcaaaatactttagtcagtggtactttccagcacactctgtgcctggtgtgtagcagggctggaaaattgccacagagacattcaccatcgtccttaaaacacagcaggggtcatttagaatgtcaggtttaaaaaccattttccctgcctccctctccctaaacaacgtcagctttttagctagccttactgagagtcttcattccttatcgatcctcaagtaacagcaaaatgaaatgaaaaggacgttgagctctcccaaatgtcctcatctttctgtccccgctaacatcggctcttctcagcatcttcattctctgagttgattctccagttgaaatctcctaccttgagaatgatgatgaaaaagatcattgatgattagtcccactgcctttctgaactacttgcaaaagggagtccgatccaggcccccaaaggggatggcacgcaggctgcttcagtgcctgtgtcttgggctgcaccctcccacctttccctggtggctcagctggtaaagaatctgcctgcaatgtgggagacctgggattgatccctgggttgggatggtcccttggaaagggaacagctacccactccagtattctggcctggagaattccatggactgggagagtaatgggacttgaaggctgagctttaagtccatgggttcacaaagggtcagacacaactgagcaactttcactttcactctcacgcccctatcagaacagagatttcagtgccctcaggtacaagctaccttccaggtgagagttgtcacgtgtaatttgacccttacactgccaaagatgagattctgatcaaacctgggataggtatttgtatggattatttcatggcagttccgtagcattcttcagagggtttgggttactttcccaaaggaatctcaatacgtgtgccactttggtagggcagttagcatctctcgaaatgttcgcctcacattcagatatcagagaggttagttcgggccgggtcacacaataagcg

SEQ ID NO: 27344 - DNA, 1160 bp, Bovine  19866881033869
  misc_feature (1)..(1): n is a, c, g, or t
ngattgggaaaagactcccccttcggcttcttactacctaaagaggacacttagtgcatctgtgataaccgtttgacattccttgtatcaggctgacttttcttatggcagagatttttagtcacgagtgaatacctctaaataagagtttttaatatccacggtagggtcctaactcctgaatcagagggcctatgccagagagaccttggaaaaatgttggtatggtgcctgaaacttttcatttgccgtgaaacatgttcttaattatactttttattccagtccacctcactgattaaattaattactttctcctctgttcttaaacttttactgttgtgtttatcacctcgtattaaaggtagttgggaaccatttccctttcaaaaccgtgagctcatctttgaactccccacagcaccctgaacggttctgacacataataggcactcaataaaggttaatgaattcaacgtttcagcatggaatattgaaaccaaatttttgaagttgagtagacatagtagttggctcctaggagggggactaagtgcctgggtaacagaagtgaaaagacgactttaattttaatcttttagactacactcatgcgttatccttgcaaaacataaatgaagctcttaccagctatcatatttttcagaatttggcaggttaccgtcggaagatattattgtttatttacttacacaaataaactgaggttgctgctgctgctaagtagcttcagtcgtgtccaactctgtgcgatcccatagacggcagcccaccaggcttccccgtccctgggattctccaggcaagaacactggagtgggttgccatttccttctccaatgcatgaaagtgaaaagtgaaagtgaagtccctcagtcatgtccgactcttagcaaccccatggactgcagcccaccaggctcctccatccatgggattttccaggcaacagtactggagtggggtgccattgccttctctgaaactgaggttaaatgatggttaataacttgtattttgttaccttgttggtgatagaacaaagatacgactctgtgaaaccttcagtttctccaggagattgaacaccatcttgaccacagtagcctaccccttttattgaagtctagttgattaaa

SEQ ID NO: 27345 - DNA, 785 bp, Bovine  19866881051523
  misc_feature (1)..(1): n is a, c, g, or t
nagtcatcagggaagcccgtgaaccaatacaacagccaacaattaaatctggtaaggaactgggacatctcagtggtgaaaaaatagaggtaaaatatcttcaacaatcccatctcatatctttgcactatgtaagccctacagaatttagatgcaactgtgtaggaggttataattgactgagattaatttttccctatttgttaggacagaggtacaaaagaggactaaagagaatttatagaaaatgaagttacatatgttgcaagcctgagtttaatggaccaacgtaagcaccttctagctaaagaaaaatagtatcgtttacatttcccaactattcttaggggtttcgcaggtggttcagtggtaacgaatctgcctgccaatgcaggagacgcaggttcaatccgcgggtcgggaagatcccctggaggaggaaatggcaaccgactctagtattcttgcctggagaagcccatggacagagaagcctggcggggtgcagtccatggggtcacagagagtcggacacgactgagcaagcagcactgttcttagatagttaatgatcctgggttaggaaaagggatatggaattttgaaataaaattttctgctatgctctatccctacttttagtataatcatttaaaacaagcctatccatctaactacaaagggtacactgtcaactttttttacagaatacaactccaaaagtactgcctgtacacacaggcatttgataaatatagatcaacaacccagggcaggctgagcag

SEQ ID NO: 27346 - DNA, 1583 bp, Bovine  19866881078068
  misc_feature (1)..(1): n is a, c, g, or t
ntagagcatatatgctttctgtttaagcagttaagaagtgtattagcccctatgataaccagaaaaaccagagcgtgaataccgataaatgcaagccttccgtctcggaaagtcttcacttatttgattaagttaggtgaaaaacagagcagtcatgcttgtagcctttcttcctttcccctttcctttcctctttttatttctaatgcgaatcggaagtctatgtggagcagtctggctagccccagtctaacctcccccatctggaaggggactaaccagccttggggctacttcccaacccttcccagctgttgggttggggttttttgtttttgtgggcttgagaaagcatatttatataaatgattgccatatcctttgccagctgttgaccctgctcttgtcccggctggggcatggttttcatttttagcggccacagactggaactgaccctgatagagttagcacgctatgcaaacagctttacgcgctattgctgtgacagttcagacaatggatgcacagtgtaatccaagggaccggtgtttccctttgggcaaatgtcacagaatccagagctggaagtatcagttgaaaaaataaattctgagatgcactgtgttatggaacaacttctcttcagttattcagactgcaaagatttcggctagcatcatagcagggatgcatcagcagcaacaaatgagttttctcttatccacatatgaatctgagaagtgccctagatagatctgcagaggcaggggtcgcaatagttatatgagaggttaaaaaagaaaagctatattttcagttttaaacctatgtataaatgcttctgatgctaatgtccataaattaaaaaaaaaaaaaaaaaggtccttgtaccttaataggagaagaagataaaaatcagtttgggcttttggtaattattaagacatacatatacaatcattcctaaagatccaacctgatcatttcttaggcacattactaaccagaaaaaaaaatctatgtttaatctgtggataactgtagtcacagcaaactagaaagtttagaaatattatcagggagagtacaggtgggggaggggccccacagggacaggagcggtgaatattccattaaggataatgcatcctgaacaaccagttttcatctgcagctaaaagggaacaagagaataaacagcaaatttttacaactttcataaattttcttaagtccttctgtccacaagcacaaacgtatatgtgaagaataaagaagtttaattaaaaagaagtagactgttaatgcttaaagtgatacacttcaaaaactgaaaacttctaatatttgataatttacaggtcactcagtcattgcaacagatcattattttgagagtctaattgtaaagagagaacagcaagacagctagcttgtcagaaagaagtcctgtattatgttccctctctctgcaagcctgcaggctggccggctatggcagatggagtctgccatacataactgtaattaaaatgtgaaccccatcttagaggtcagaatagactagttgacaaacaggg

SEQ ID NO: 27347 - DNA, 1168 bp, Bovine  19866881132638
  misc_feature (1)..(1): n is a, c, g, or t
ncatactttgcatttcttaattaaaagagagaatgagcattattaattattgtcatcctcagcacacagtatagttatgtgtgagtagctccatattaaatttcaagaacaaatgtaaacttacccttgattcagcaaggtttctagggtcacttatttcagcaccaattaaaggacgtgggaatagagactgggtgatacaatttctgcactgtaagtagctggttaaagaacattctttcatattccagatggcatttaaagataaacctttctccatgcgcacaaaaaaatttaaaaaggcctttcataaactctgaaccaccagattcaacatctcaatttctcttttaaaggtctaatagaaagtgaactgtacattaagactggataatgtttttgaaaaccattagtttaacatatttattttaaaaagggaaaatttcaacaataatctttagtctaacatagacaagtatagaaaataagctttaaaaaagccatagctgacatttgctaatgtctattgtgtaaattcaaataagtttactctcacagcaacaataagtgtgtattattgtcctcattttccggattaggaaactgggtttcagggagtataaattagaatttaaagacagtagcctggggtttaaaatgtccaaatcccaactcatgcttcaatccatctggcttagtgccctcctaagaatcaaaactggttttcaagagaaaaatgtaattccttgttttcaaataaaaccatgtataattgagaacactatgaacaaatttctgtattgtacagtaagaaaaacttgcttatattaattaaatgtggaatggtacccttaaaaactttaacaccagttagttttaaaacagaaatttgattatcacgtaaaaatatgagaatgtaatctgtctcataatagaagctgtaatagataatacatgaagattcataatctaagagaagactatttaaaaagaatactattttaaatgcaaatagttcctcagtaattagaaaaactaaagtaattctgtccaacctaccctggaatatgtctatggaagcaacattcttccttttacagtacacattcatagcaacaataggtatcatcattatatatactgcttttaggacaaaaagtttctccat

SEQ ID NO: 27348 - DNA, 1448 bp, Bovine  19866881173727
  misc_feature (1)..(1): n is a, c, g, or t
nattgaatgtggctgaaaggacacagttgaagtcacactgttaagaggtaactcaagaaaaaggactacaacacgttactgttgatgactgggtggctcaaatcacacccaaaggcagaacccaggtacctgacagtgtaaaggaggagctcctaggagaataagaacattccttgcttagcaacccagcctttaagattgaattagattgtgttgttttgtggttttatttctgaaagtaaaacttgccagaaattaggaatcaatttcccaaaataaaatactttttgttttggtgtgatggtatacagtttttggcttccctggtggctcggtggtaaagaacctgcctgccaaggaaggagacgcaagagacacgggaggatcccttggaggaggaaacagcaacctgctccaatattctcatctgggaaatcccatggagagaggagcctggcgggctacagttcatgaggtcacaaaaaagtcagacaccacttactggctaaacaacaacaaatatggctaaaaaccatcgttttcagtaaccatgtgtatgttgtattgatttttttctgctcaatgtattattttaataaatatctcatgaatgaagaaaaaaaaatcactgctttatgttgcccatatctaccaagggggagaagaagaggaggaggaggaagaggaataagctaatgatgacataggctgctgctgctgctgctaagtcacttcagtcgtgtccgactctgtgtgaccccatagacagcagcccaccaggctcccccgtccctgggattctccaggcaaaaacactggagtgggttgccatttccttctccaatgcatgaaagtgaaaagtgaaagtgaagtcgctcagtcgtgtccgaccctcagcgaccccatggactgcagcccaccaggctcctccgtccatgggattttccaggcaagagtactggagtggggtgccattgccttctccatgacataggctagtcaaagtcaaatgtagtaagagatatttaatatgatccttttttcccctcactaacaaatatgtaccttttcttccaaagaaacttggtatacttgaattcatattatacttaacactcacctgggaatgtaaaacattgtgtttactagctatggatcatacaagaaacatttttttctgaattttatacccgattttaaaaacaaaagatatgacacgaatggtattctaattccatctttaaaaactttcaagggaagttatgtttcatattttaagagtcctgaagtttcttgttcttatttcaagtgattgtccaaaagcaaaaatgtatttgcttttttaaaagatcagctagtgtgaattttgaatatcaggtttctgctttcacagataaatcatttgtatcaaattcatctgtttcttcttccatcacaagtggattgca

SEQ ID NO: 27349 - DNA, 1119 bp, Bovine  19866881222540
  misc_feature (1)..(1): n is a, c, g, or t
ntttagaactccttctttatataataaaaaatatttcagagttaacctttatatatatttacttttaaaagttttttttttctttactttttacctaaaataatttccctaggtaaaatattggcagtattttaaaggccatttggattgtaagaacttgaaaattttcaacaagttgaaataatgtactcatacataaaagttaattcattttaaagaaaaataacagactgaggagatagaattttgtttatttgacctaatatttgctatattaggtcttcccaggtggcgctagtggtaaagaagccacctgccaatgcaaataaatgtaagagacgtgggttcgatccctgggttgggaagatcccctggagtaggaaatggcaacccagtgcagtattcttgcctggaaaattccacgcacagaggaaccttttgagctataggccatgggtcacaaagagtcagacgtgactgaacacacatgcacacatttgctgtattgcctcaaataacttaaaactcagttcagttcagctactcattcgtgtcagactcttcgcgaccccatgaaccacagcacgtcaggcctccctgtccatcatcaactcccagggtccatccaaacccatgtccatcgagttggtgatgccatccaaccatctcatcctctgtcatccccttctcctcctgccctcaatctttcccagcatcagggtcttttcaaatgagctgactcatttgaatggtggacaaagtattggagtttcagcttcaacatcagtccttccaatgaacacccaggactgatctcctttaggttggactggttggatctccttgcagtccaagggattctcaggagtcttctccaacaccgcagttcaaaagcatcaattcttcggcactcagctttctttatagtctaactctcacatccctacgtgaccactggaaaaaccacagccttgaatagacggatctttgtggacaaagtaatgtctctgctttttagcatgctatctaggttggtcatggggtaacagtaaaaatctcaaaaatctttttaagattgttgtaggaattaaatgagataatgatgcatgttaagcactg

SEQ ID NO: 27350 - DNA, 749 bp, Bovine  19866881608515
  misc_feature (1)..(1): n is a, c, g, or t
ngttattagggtgagcctaagaaattgctgtttagaataagccaaaaagtcctatggtttgagtagattgattagtttatgtgtgtaaagaatatatgcagatggtagtctcatcttgctgtctagctcagtgagggtaaaagttaagaatctaatattaaaaaaaaaagttctgcttgggtcataagaaatcttaggaatcgtttataaaagattacagtagtgatgattagtgatttttgtggtaacagtattttttttttccttcagaacaaatacataactatagttactttttctaaaataggcattttatttcagtgtattcctttgccaaaaacaaaaacgagactagcagatatcaaccagctttgaatgtgatcccaaagtagataatactttttctttagtctgtttccgagcttcccaaattgtaaattaaaaacagggcttacggagttaaactggggaagttttatttgggcaaaaaataatgtttcctccttttcttttaggtgatttggcagcagcagtgtttttaagttgctgacattaactagctttgttggggataggtcaggctttgaacttctaagataatccatgggtatgtgagaagttcctccctaagtttactgagttttctttgttaaatggtaacaaaggatcatgcaagggaagtatagctttgatacacagtgaaaatggttaaggcctgtatatggggtttttggtaattatttaactat

SEQ ID NO: 27351 - DNA, 816 bp, Bovine  19866881676802
  misc_feature (1)..(1): n is a, c, g, or t
ncctgcggcccacctaatagccggaagctaatatccgcaccccatgcttatgtgagagcacctgtcgtgtagagaaagcaccagtctggagctcagtttggagagtaggctgggagactctccagtagctggtctcatcatgcctgggatcatctctgagttatcatgggtgtcatgatcatcacacgctctcatcccaagggcttgtgccttgaagagcattgtttaatgacaagtttactcttggtatcaggcctccccggtggctggaaatcagatcagcagggtctcatgaaagtccaaagcggaggctgagccacggtctcctaaatagcgagggtgtgattagacagtatcagctccgaggacatcccagctcccccatgctgcctcacccactggtcttccctgcccctcgacagtggtgcacaaaagagcacatgtgcccccagcctccccaggaccttgctggctcaccagctgtcattggcaggcctttaatgggcgtgtgaaaccccagaacctgacctgtttctcctctggggagacagtgtaacacaggatgcccggtcgggatgaaggattcaggtggctcacctgtacgagcgtgactctctgttaccattaaggcagattgttttggttcctccagttcccagaatctgggctctaaaataagtgcacagaagacggtaggaactgatattgcagcattttctgctcacttacttagctttttccttcctctaattttagcttttttttctgcctacctccatctctcccctcaccatgctggcccgagaggtataacct

SEQ ID NO: 27352 - DNA, 977 bp, Bovine  19866881816159
  misc_feature (1)..(1): n is a, c, g, or t
ngagaggggctggagaaaaggagcccgaatgttctcaagccagtgtgagtccttagttatgccttaagccctcgaagagctgacggccaaagggaaacagggtctccttcatcggacagtgactttaagttctccgacaacgcgagagggtgaataccatgccagccacagttcaagacagccggatttctgaatgctcacgaagccctgatgtcgagtgtcaaatggggccagagtgttctctaagcctctcagaaggctgaacccagagagtttatgcccttaactgcagagagcaggatcctctctgctacctcacatctctgccaagcttgatccatgtgagaaactgccttttctcccaaacacagataaaagtgagctccacaaaatttaaataaaaacctccccaatatgaaaatttcctaaccgtctgactgctctactcctaggtcatggttttgccaccagataaatctctactatcagccttcatagcctgttgagttcaatgttgcttgtgttagtgacagtgaatttgtgtttgaaaaatgaactactgatgagaactcctgttgaacctgtattgtttgttattctgaggcaaggatttggcccggcttaatccggggcttcaaagccaattgcccttgctctgtatacagagcgtcagagcccagtggcgtgggtgataagagaagtaagggttgaagacactgggaaagtgggttggggagagagtgctttgatctctttctaaagtattttctgaaagcaaaagtctatcagaaggaagtgtcttcaaaaaaaaaaaaaaaaaatctcagagaaccaactggtcttccaaaacagcatccattccacacaccctctttcctgcccccatcttagggaaaatatttctgaaaaatgctttgagtgaagtagaaaactctgtgcatgtgtgtgtgagtgtgtgaatgtgtgtgtgtgtgtgt

SEQ ID NO: 27353 - DNA, 1856 bp, Bovine  19866880413372
  misc_feature (1)..(1): n is a, c, g, or t
ncctgctactggattcccaaaaccgaaggggttatagaggtcatgtgatactcttagtgaaagtgaaagctgctcagttgtgtctgactctttgtgaccccatggactatacagtccatggaattctccaggccagaatactggagtgggtagcctttcccttctccaggggatctccccaacccagggatcgaacccagttctctcaaattgcaggcggattctttactagctgagccaaaagggaagccaaataatactggagtgggtcacgtatcccttctccagcagatcttcccgacccagggatcaaaccagggtctcctgcattgcaggcagattctttaccaactgagctattagggacgcctgatactgtccgtactctctgttagatcttcctggagtctactcaaatgcgcacagatccctacccggggctccagtgaggcctccacccagctggctcagaggaggagcgggtgggaaggcctgggcccgggcagttcctttacctgtttccactggggggtgggagcagagcgaccctgctcgggcaggcagctggacggctggctgaccccacgctcctgtgtcggctgtgacacacaggccagtgtggggagggacaccacatggagaaaaaaaaaaaacaaaaaaaacacacattaaggtagaagacacaaagataaccctcacagcagacagacacacatctaagaactgaagaagggctcagagaattaattctacaaagttacagttataaagaaaaatatgtaggttacacttgtgaaaaaaaaacaaaccctcaactaggtcaaaaacaaatgcaaaggagtagacagacagagctgtaattctgagtatccttttcccaagctcactgctctgagcctaaaccactaactgccacttggaaaatgaggcgtgcatctcgaggacaaacttcctctggcagacagcatcccatgttcccgaggtgggacggggcctgggctgcaggctcctcggcacggacgcctgaggcgtgaggatctgagcgagcaccaggcgtgagaagacgttcaggtggtgggcccggcctggtccacaggaacaggggctgatgacgtggaggaggtgaagaggagacgcgcgcttaagcaccaggggtctgggaagaagctttcggtgtggaccgcactatgccagcacctcctctcatgagaagccagagtgacttctggacgagcaagaggagagacgagacgggacagacatcgccggccagccctcagcaggactcgggggagtgaggtcagtccacagagtgtcttgacaacacgcccactcttgacctcgccaaggacagtctaataaggcagctctgtcagcagagtgttcacctccatgcttatcatcagcgatgagaaacaagtcaacactcagcaccagaagaagggttaagaaaggtgtagagtgcacactttggaagagactcgtaaggagttcagaacatggaaatattgcccaaagttacgggaagaaagcagaacagaaaagtgtacaacaatgacctcaactatggaaacgaagacgcactgaggaaagacccgaaagagacacggcaaaacatcagtaacactataggggccttaattaccaacgttattcttttcagcattttcctcaataagcagaagcagaggtttctgtgactgaggttgatcagggcaagcgctggtttattactcatatatgtatgcgtgtgcacacacacctacgtgcagagactgagatcccaccacactgcaaagggcccgggtgggcgtctgtcacagacaccctgagacctgcctggggacgcaataacc

SEQ ID NO: 27354 - DNA, 1713 bp, Bovine  19866880586676
  misc_feature (1)..(1): n is a, c, g, or t
ncccgtgagttagaacctagtccacgtcctctgtctctggcagcctggcctgcggctgctacctgctttagcatcttcgtatgtgatgtgcttttgatgtagaaaccctcttttctattctcagtctgtaactagtttgtctcaagcttcttacactggctgctgcaggttcgtgggcctggcacaggtttccttaccctgacctcagagcacctgcccataggaaacatttggagaacaggtagagaaagaaagaaaaccccagatggtacgttttccccttgaatacaagaccctcagttgcgggttttgaggccctttcttcatccagaggactgccctttacacctcgtatggtggggaaccagaactgaagtgtacaggtgggggtcatggggatcagaaacgctgtccttccagtccctgcgacagacatgggacgggaggaaggctttcgttgtctgtcatgttacggaaagatgatcttaacacacaaggctgtctggctgggcgctgcctgcccccatccctagacaggcctgcgtggcacttgggttctgtggtgggcctgccgagtgagcactgggagaccaggtgttactgcaccagccgggacggttgcacggcaggacgcctctgacccatcctgggttcctgccatcaggagggggttattaccagatctcccactgcttcccaagtctgcttccatttctggaaaacctgttagtgaggcagagacttctgcatccagcttccctgcccagtcccgagagtcgtagcaaatgtgatgtatgcacgtttacatatatacacacatgtgcttatactgctctagcttcgtgtgtataagtacacgtttacatattgtgccctgagtaataatcacaatcctagtggagctgtttctaaagcttctctttccttagttctggtttacctggggacctagcctatcttagtgttccggtcggggtttggagggagcagagaagccaggctcctggtggaggtggagactgcagggtgagtgtctcagaaagcaagcagagcatacttccagcaccagagaccaggggcacagggctctctttcaggggccctgaggaccgcttcgcttccaaggcatgtctgactccctgggcctgttactgcagcttcctgctgtctcttggtgtttagtgtgtctgtagacagtggaatcctgtagtctctcctgacagtggcctcagcgtggccttgaaggcctgaccagtgagttaaggggttccacaccccacttttcctgagccgttaagcagcagtgggtctccaggcatggtacggaggccagagctgtgtcagggatgcccgcgtttctacctccggcctgccttctgtgaagcttcatgcttgcctttaatctgtgctgttgtgagttttggtgtgtttctttgtgagctgtttttatttaattgtgtaactttgttttttccgtgaaactttgttttctgtgaaactaaggtgttgtgcttctaatttttttttttaacaaatgttaccgttcttatttaagagaataaattccaaacaatcttcaggtttctgagtatttcttttcctcctctttctcctgattggagggtgggaagggcccactcaggcaggtctcaggagtaggcttgacaacgctgtgcctcaggatgctcgctccggggccaggtcgggggagag

SEQ ID NO: 27355 - DNA, 1237 bp, Bovine  19866880587596
  misc_feature (1)..(1): n is a, c, g, or t
ngacatgctcacgccccccgaggaggagcagcggcggtctgtgcagtcggaccagggctatatctccaggagctccccgcagccccccgacgacgacgacgatgacgacagggagggggtcggggaggaggatggggggcagccgctgtccccccagggcctggagagcctgcgcagcctcctagctgctgctctttttccaggatcttagcaagaaccccgggccttgggcccgagggccagccatgcgcggccctccccccagccgggcggtgagtgagcacgtgtgtgcctgtgtgcacgtgtgggcttgcgtccgtgaggccgcacctttaaaggtagccagcttgactgtgggagaaggaaatggcaacccactccagtattcttgcctagagaatcccagggacagaggagcctggtgggctgccgtctatggggtcacacagagtccgacatgactgaagtgacttagcatgcatgcattggagaaggaaatggcaacccactccagtgttcttgcctggagaatcccagggatggaggagcctggtgggctgccatctatgggatcacacagagtcagacacaactgaagcgaattagcagcagcagcttgactatgtccccttagcttttcttcaggtccccgtgtggtcaccttccatccccgagaccccatggcccattcccaggagctaaaggacagaccgtctgccattccttcctttggcgtttatcttgggtccagtatagccctgaccgccaaggagctgctcctctagtgggagggtccagggagcacacagggtgagggcaagatgtggaggcagaaggggtgcttgtggggggtggagggcaggtggagtcccgagtctggggcaggagggcagtgtgtaactgatcctgccgcagaaggtgagcccatgggcccagcttggggaggcctgggggccaggctggggctggggcatcaggccctgatgctaaaggccggggcttctttaccaggatgccctgttccctgcagaggaggctgtagatcagacacactggtcattttcggagaaagattggatagaagtgaatgagccctgatggcctcagcagggcctgaaaccatgtgtggtcttggtcagtgggagagctttggccaaggatttttccaggattgcgggctgagcccctgggctatagcatccgggctcaagaagaacaaggagcccccaaccctgtg

SEQ ID NO: 27356 - DNA, 1689 bp, Bovine  19866880596144
  misc_feature (1)..(1): n is a, c, g, or t
ntcgaacgtggtgtgtcctattgaaatttattgctgaattagaagtagttgtgagtcaggtattgggagagcccagaacaccaccctgtagagcccgggcattccagagagcagggtgaaaaccagagttctgatccagagtccactaagcaagactttccagcacttttgtgcaaatgtgcatctccggttcatatacaggcagtggtccctctgttgggaaattcccacaatggacacaggaactcggagctttgctttcttcatttcaagcacctcacttcctgggttgtgttcccacctggcgatatcaccttctcttgggcttcgtgtctctttcctcttgctggtgtgcttgctggtggccgagcccttgaggaggccttgtgggctgagcagcactggtcagctcctttcctgaaccggccatttggtctcagtccatgggttctctgaggtgccactggtggccgagctgccctccagagaaggctcacgtgcatctagacggcaggtctggggtcagagcctcagagaagaccgagattcctgaggtgtgtggtctggagcagctgggaagccctctttgttttcggaacctactgggacagcctcgttcagcgttgtggtgtctgtgtcccccagggggagccctcgtgtggaactggaggctgctgggttgtgagatgaggaggaaagggtggtgagctgcagctgactgcgcttgcatttgtcatggtcctggggtcaccctcaccgcgctgtgacggacaggagtgctggtgggcagctgtggagcgaggtgccactgttttctgctctctggggacctggtgaccttgagggccacagggcctccttcactcagacccgtttagcagatgtggttctgctccacttggggtaagtgtggacaggcgagctgagggctaacatatcctctttaggcattcgcatctggccttcagccttagtctggggcgtctgatatgcgaaactagggaagttcatagcctttgacctgcccctcacattttctaagtctgaattagatgaggttgaatcccagcaggatctccagcagagccaaggccctgtcccagctgctggttggctacacgctgcccccttccgtcccccaaccccccaccaccaccttggttttcgggaccacccctggcaccaggaggcctgtggctgaagcatgtttgtgggggtgcctgggggaaacgcatgctttctgctgcctccctgggtgtttcttatgcttcatgcccttgactgccagggactggggggccagagggttacctgatccaataacgcttccccgattccttgttgtagactattggggagagtcttattacactgacctcatcgacttgcatctgggtggtatgtatgcagacctgttacagaactaaccctgctgactccccccaccccccgccccccgctcacaaacagcaagaagtcagcctgataaccataaccggatggtaaagcacaggcccttttccagctcaaacagagcagtgtgctgactcggcctcacccatatgtgtgtgccgggggagacctgagacaatccttgctgctggggtattttaattctctataaatttagaggttcaccagccacagcatcagcctctgattcgatctgcatcccagtcccactgacag

SEQ ID NO: 27357 - DNA, 1177 bp, Bovine  19866880600939
  misc_feature (1)..(1): n is a, c, g, or t
ntagccaatcttctgggataaaccctcatggaaaagattaaaaaaaaaagaatgtctatgtgcatataactgagtcactttgctgtgcagcagaaattggccgacactgtaagtcagctacgcttcacttgggctgccaaggtggcactactggtgaagaacccgctcgccagcaagaggcgtgaggagacacaggtttgacccctgggtcgggaagaccccctgaaggagggcatggcaatccacttcagtactcttgcctggagaatcccatggacagaagaatctgctgggctacaggccatagggtcaaaaagagtgagacaagactgaagcaacttagcacacaagcatacttcaattaaagaaaaaacaccagcaaccacgtggctggaccagccacactctgcaaggaacaaggtttctgggggataatggacccctgggaggaccttgcacctggaagccacagtctgctgttatttagttgctaagtcgtgtctgaatctttgtgaccctatgaactgtactagccagactcctctgtccataggattttccaggcaattctggagtgggctgccatttccttctccaggggatcttccggacctaggaatcgaactcgcgtctcgtgcatgggcaggcagattctttaccactgagccaccagggaataatttacattaaaaagttattttttgttaaaaggaaaaaacaaacatcaaaaggcctgggcctgaggacagcaccaacctgtaaacccagctgcgtcagaggccagccggtcacagagattggactggctggtttgtagtggttactccagagctgggaacctggaagactccaagctggacgtctccctttccaccaacagctgcccccaggcgaggcttctgcagctgcatcgagccagaggcacagtccagggggacagtggctccaccccgcctcctctcttgcccttggggggggatgtggacagcaggctgggaggctgggaggctctgctgcccttacctgcgcgcggtgcagccgtttcagctcctcctgcttggcctgcctccgagctgccttctgcacacgccgggtcagctttggcgttcagctcctcctccgtgtaagttctcggctggaggggacaagagggtttcttcggtcagtggcttggctg

SEQ ID NO: 27358 - DNA, 4410 bp, Bovine  19866880633872
  misc_feature (1)..(1): n is a, c, g, or t
ntaacctgttacattgactaaggtaactctgagatgacccgtctcaggcacggtcctgttagtgactcaacctcgggagaagagacacagtccccccgccccccctgccatgtgaggcgcaggccgtgcacggggctatgccgtatccccagcacatgccgaccacaacctccgtggccgtcgctctggcatctgggctgtgatgagctctgtgtgagcctcctgctggactctgaaagacaagcaggagcctcaagggtggcccctctcctgctttttaacttcaatggtatttaggagactgtgctgaagaagagtacgtcccctgggctgaagcccagtatgggagctcttactacaagcaggtgacaaagaggggccatgtgaccagtgagaagtctgcagccagaacccaggcgaacccaggctacagacagtgaccgctggagagacaccccaccaggtggccaccaacagaagggctgcaagccacctcagggggtcagccaagctaccctcctgcttctgtacaagagacagcttgcccacagtcatgggcagggcctgggtctcgtcttatatttactttttaaaagactacaggcagcatctttatgaggggagccgagggaagcattgggcaagacctctccacgggccggcagggacccgggcgcggagggcagggcagtacctgagaggcggtggagaccgcagagcacttgggctgcgggaccaacgggaagaacagaggagcccggagtaggggtcgtaaagcgcacgctcttggcagaggggggaggctccaggccggagtgcgtcagcagctgaggggcccacagccaagccctcctgcctggacccccaggtgcccacgagaaccctctgcctctgaggctctcacgggacccattaccccggggacgtttggcaacatcggggggtgctgtcaccaaaggggaaggtgctacgggggctgatgggggaggctacgcaccctcgggggcacaggtgctcacagccggggttgcccagatgccacagacaagactgaggaagcacttgacaccctagaccctgaatctcagaggaacccaggccagggaccgcccagcagaccgcgtgcacagcctctacctcaagccccggcaggtgggccgcccctgccctgctgacccagctcctcaccccagagcgtcctgcggatgtccaaccagctgctgcccattcggattcagtcgagacaactaaaaccctccttctttctcctgggttcccgagtcctggcagcaggtcacggtggaccccgaggaggaaaacctatttcttccgcagagccagtgccaacccgaccgccactgctaggatggccatggcagccgcccctcccaagagcaggagggacctgccctcgggcagcgggccggccttctcgaggtcgcctgggcggggccctaccctgagtgccccctgccctccagtggcctcttcccggctcggcggggctgaagggggctccgctggggacttgggtggcaggacccccttccgctccggttcagaagcttctgctggggctgcttctgcctcctcttcaccgagctccacaaacagggacgtcgtgggactggccctggggacggccgccatcagggcaggggccggcgcggccgcctcccccacgccctcggggatctcctcccgctccacgtgcacgatgtcggagttggaggagttgttctcgctcttctctgcggccccgttgctatccaagctcttgacctcctcggggtccactgtgacctgctgccaggactcggggggcccagggacaccggcaggctctccgtgtgccagctctggctggcggacagtgacacgggcaagctctcggcctgccaggaagccgtggccgtggagggcgactccgggggactcacgtgcgtggagctgtcgctgggcagaatgtagatgtcgttgctgtcctccgcggcacccgcggggcactcctcctctgactccaggttaaagacggtgccctagaagaggagcacgtggtcagcacaagggcactaaagcaacctctgcgaacacacatcaggaaaactccctcctaagttgagcctgaggaacaaacacatcatttacaatgatggcgtttctggactgaacacactcgcctgcagaccaacgcagaggaggagtttccaacaagatggttctctaagcacgtcctgaacgctgcatcagcagaaagctgatgcacatcccattcgacttcacacacacttaacacagtaaataacacagcccggcagaggaagcagcacaggcaggcagctggtgctccaggctcaccactggctcagcagaccaggacaatgttttggcagcggctggggaggcaagggtgagtgggagcctggcccaggagaggcccagaaacacggagcaggggactgaacaagcctggagtgaccagggaggggctggcagtggacagagggctcagagctacggcctgaactccgctgcacgggaccgcttggtcacagatggagctgcccccatgggcggcacaggctcctgcccttccactggtgggagccacagagaggcagcgtggccgtggccacgagctccggtcacagggaagaacggacttcaattttggtgcttaacaaattgactgtctagacatgaagacgagtcacgcgtttcacgtgacaccgggcagccctgaccaggggctcatgttggagatggacgggaggtctcgccgagcctggacgacaccacagatggtgacaagaggctgcagagtgtatgcgagcacactggctcccactctgtcaaggagaataattctgttcttcagccaagaccagaccctttctggtcagacatggttaactccctgcgtccttgtccttagagtcacatctgctgatgctctgcgcaccactggttctgcagtcacaggaggcatggctccactgggcttggagcagcctcatgacgactgttcaagctgactccagaggccctgagagtcagcgtgctcccggaagggtactcccagcaagggctgaaaagagaccctctcacagcaaaaaaagtgaaaacagtgaaagttgcacagtcgtgtccaactctttgcaaccccatgggactgtagtctgccaggcttctctgcccatgggattctccaggcaagaatactggagtgggttgctatttccttctccaggggatcgaacccgggtctcttgcattgcaggcaaattctttaccaactgagctactagggaagcccaagagttggtttaaaaagcaaaagcaaaagaaacataacaaaaaaggtaaaaattttaatcctcagaaaggagacttttgctaatttttgtttttggccactgggcatgtgggatcttagctccccaatcaggggttgaactgcatccgctgaagtggaagtgtgcagccctgacctctggaccaccaggaaagccatcctgtgatggtactgttttattaaaggctcgaagcccaaacaagtgaaacgggaatttcagaagttccattatgatgaaatgagggaaaagttaaactaagaccgcatttagtacagttacttttctcttcatttttaacaactcaaagctgaaagttaagaaccttctgtcgctatctagtagccttcttcaccacacagcactatcagcagggctgtcaagacaacagctcggcaagagccaggggctcaacaccagtcaggctcagccgctttttccctgctgtcgcggactccttacaatttatttctgtatattggtcgtgacattttaatcatgatttacccaaaattttgtgctttatgtaagaaattttaaagaaagaatagatgatcactgaaacttttgcttctggtcagctaaagcaagaatctcaattggaggcccctccggcgacagtcacggtcactactggagggcaggctgtctcagagagaaggcgccaaagagaagcgggggaggtcttcacctacacgcagcacagcaacaacttcaatcactttcagcacaaaatacttgtatcactgcaaacagcggtatctttagtcccactgacacaaaaacacaaaggaataaattcaagggctcaaaaatataaaattaattgggaccaacaagagtttaacagagaactgtgttctgtttaaacagatggcgcccaagaagtaggaactcgcccaaggtccctcagctactgtgagaatcgggcaaccatgtccttctgaagaccggacttaattcattttgccgtcaaaataaggaaaccgaagcaccgaggagggtgcacacctggcctgaagcccacggcgggggctggtgctgaccgggccggctg

SEQ ID NO: 27359 - DNA, 1445 bp, Bovine  19866880636977
  misc_feature (1)..(1): n is a, c, g, or t
ntggcagtccagtggctgaaactccacgctttctccgtacacggggcacgggttccattcctggtcagagaactgggatcccgcacatcatgtagcgtggccaaaaaaaaattgttattttaaagaggaaaaattatttttattagcaatgtgtgatcttattaagtttcattgttaaaaaaaaaaaaaatcaatgagaatcggtacaccacagtttcatagctgagaagtatcccaacagtaaggtcatcccatacgggaaacattttgggttcaatttgatgtctttaaaaaaaaaaaaaaaatcaataaattgttttagagattctttatatacaagcatcaacacagagcactcaagacactgcttgtaaattattcttcagttaacaaatctgatgaaggtgtctaagcattttcaccttaaagaatctgaagaggagggggaacactccccactgaacttgataaccagcaacacatacagctttaggttctgggctcagcttatctacaataaacacaagacaacaggctcattttagaactcaaactgtaggagacacatgtcatctggggtgctttttcctcctgttattttgcgtctaagcataactttccactgcactgtgagactatgtgttctattcaacttagtaaaggaaaaaaaactaagcccaaaatataatgtataatcctttcaacttctgtctttatgtcaaagttttcttagcaaaatactagagggaaatactccaagatcatagaaaaaaattgtcataaccccttgtaacattacagtctaacttctcttatcccaaaaaataaacactgtccttttaaactattaaattacactgaacagcatctatgtttcattgctacggtcaatgaagatggggtaatgctctcaccacattcttgagtctaagtacaattttccttctactttcttagacactttggaaaccatgcataacccctagtaacatgcagtaatgcacttcttgcactttcaaggttgacaaattttaaaagcttttttaaccctataccatctatatatttctgctgatagtgaacagtgtgacatcaggaaaaaagatacctgggtatcttatacctaagaagactacgtctgaaaaaagcaggaacttccctaactaaataaatctatctataataacctaccactaagaaaaaggtgagatcataaagaagaaagaacagaaaatggacaaggaataacaaagaaagaaagaagaaaaatccatctccaagttctcagtgactggggtggggggaagaaaagtactgaaagaagactctcatgatgccatatgtatccagaaaagtgtgtgtgtgcagggtgattacagttccaagaagctggaatttaaactaagactgaggcagcagcacatagagaaaggaggcccctttaa

SEQ ID NO: 27360 - DNA, 1992 bp, Bovine  19866880649896
  misc_feature (1)..(1): n is a, c, g, or t
ncctaaaacccccacctgtccccaggaagctggggctgccagcagccgagggggcccagccctgcccacccacccctgtgtccccgcccgacagggagccaaagggcccccgggaggagcacagagacctgtccagcagctcggggctgggcctgcagggcagctcctcccgcaccaggacaccgggcagccagagcttcaacacctctgactccaccatgctcacgcctccttccagcccgccgcccccgccgcctgacgaggagcccgctacccttcacaggaagccagccctggcagggcagcttgtggcctcagcacccccacccccggctgtatgtgtgaggcccccgcgggagcccacccagcccccccaggaggaggcgcggaagtctttcgtggagtgcgtggatgagattccctttgcggatgatgtggaggacacgtatgatgacaacacatgtgacgaccgcacggaggactcgagtctgcaggagaccttcttcacacccccctcccactggccccaccccaagcagcccttggctccggagaacggccgggggccagagagtgcggtcccactgcagaagcgggggctgccgctggtctcggccgaggccaaggagctggcggccgagcgcatgcgggcccgggagaagtcggtgcggagccaggcactgagggacgccatggcccggcagctgagcaggatgaaggagatggacatagcagctgcagcccccaggacccccaggacccctgcaccccgcagagccactgccgtgccccccaagggccccgaggaacctgccccgaggcacgaagccacaagtgaggagctgctgtcccctccctcggactcagggggcccggacggctcggtcacctcgtcagagggctccagtgggaagagcaagaagaggtcgtccctcttctctcctcggagaagcaagaaagagaagaagcccaaaggcgagggccggcccctggagaggcccagccccggcactctggaggaagcggccgccaagcccaggtctctgtggaagtctgtcttctcggggtacaggaaggacaagaagaagagtgatggccggtcttgccccagcaccccgtccagcgggaccacagtggacgccggcaagcccagggcatctcccgtctcaagagcaggttcggcgggtgcagccccacccccgccctgggcgcagctgggggtacaggctctcccgtccccacggttccctccgaagaccccctgcctgtgccgccctgcctcccctggggttttctagggaggaggcagctaaacttaggaggttccaaaacaagcgaatggctgggcaggggccacaggtggatgtgctttctagggaaggcgctgcagctggacacagcctgttggtgcatgtgggctcctgcctgggtgcgtgtcagcattcaggcctgtggctctgggtgcggggacagaaccaaactggggaggaccacaccttactcccgacccgggccgccagggggtgggccccctggtcatgatctgctcggccccgcccccagagctgcagacgcggcgccagctgagctgctcggaggactcggacctctccagtgacgacgtcctcgagcggacctcccagaagtccagaaaagaggtgggcgggccgcgggcgtgactctgtcccttgttcagcccccacccccacccctggaccccagccagcccagtggtcaccccctgcacccgcactcactgtgcccgcgaggcacacctttgcaggagcagctgttgccctgccagagcacgtcccccttgctcttggcgcgtagacccccgagtccatccagttcacctgtgcccttcctccagccgcgtcagttagtgtggcttcattcagaatagaagcacctgtttacttcaggcaagacttcctccaggagcctcggaagtggtgctcatccgaagaaaggggcttttgatcccttcca

SEQ ID NO: 27361 - DNA, 2040 bp, Bovine  19866880652341
  misc_feature (1)..(1): n is a, c, g, or t
ntctggcgacgcacaatgtgactgctaatggagggtacggctccacggaagacatcgctgtccccaaatgaggcgccttctatttgatcatctgccggtgtggctcatgcatgcatctgggttgtgttcaccagctctgcacgtggcacatgtccatacttattacggactgtaatgggttgcgggggtcggggggggaaggtgggcaggggagttgaaaggattagctccacaagactctgaccctactgagtattaaagtcttaaaaccagactcacacacctctgccagccatcacccacctcagtgctatcgcagcctacaccggaatcctgcagacaccaggttccatgggcagggaacgtggatccacaaataaactgcgcctttaaagatcctcagcaacctaaaagcagctggtttctggtatgaaccagtcctcagaaagcaactctcacttcatccataaagaacaaagtccaacaatttgagttttgtttaaaaaaaaaattaaaggataagagagaattgctccacacagataaagactcggacacaatcgctggttcaagaacagggcttgggggttttcaaagcggccagaaggcaggcagttttacctgctctgctaatactaaacacggctagtcgaggtctgggtggagtggagggaatggccctaagcagaagccctggactgcagcagcacagagcagatgcggggctcgcggtggggcctctgcaccaccaaggcacaccaaacccagcacagctgacctcgcccgcacaggcgagcatctcccaccctgtggcagctagtcttccaatgtcggaggaaaccgcggccagaggaaacccaggcatcctcatctctcctttccctccctcctcctttttatttaaaaaagaagggcagtatttctgtgcctaagaaatgtgattgcaagagtcctgtatcagaaaacagcaactgagacattgctctggcaaaatttccaggattatcacttacccgctgaaagtaatcataaatccttccttctctcagaagaaaaagaaaacgatgactaacttttttaaaggatttcagtaatacctgggatctctaaaagatccttaaactggcaccagatggttataatttcagtgtttaagggaagctctgaagtgacatcacttttacccagtgatcagagccagtttcttaccatatattagggaggctttatgttttggtctcctgcctcaaagaaagtaccactccaaaccaagtattaatactgtgatgacggtggtaatgatactactgaaaatagcagctgcaatttattaatcacattaccacatgcccaggcacatctcagagccaattatctatctttcctcatttaattctccttgtgaggtaggtacaagtatcaggctgattttacagatgagaaaaaggaaacacagagaggttaagtaacttgcccaaagtcaaacagtaagtgatacagctggcgcttaaccccaggaagtctggaacctccagctgaacagcctctgtccttatatctgctagcatcttcatcccgaaacagccctttgagtcatcactatcatctgcaaattacagatggggaaaaagaatgaagaagggccatcaaataatctgtccagcttgtaagctacagggtcaggagtccgctctgggtctctgaacccccaaggtctacattctccacttccccacagtccagggcagtctgaccaaccaacacaggacgtctgtagagacagcagttcctaggaccagagaggtaacactggtcctgacggcataataccagtagggaagaatgacgaaccatcgagccataggcaatctgctgtctgctgtccaccccatggctcttaaacagaacctactctgtcatatcctgctcacgacccacagatgtgcttattatttcccatggtatctccagtgtggcaagacttacccaatctcatctcccactctccccgagaagcccagccctccagtttggccaccc

SEQ ID NO: 27362 - DNA, 1228 bp, Bovine  19866880782528
  misc_feature (1)..(1): n is a, c, g, or t
ncatgcatgtgtgtgcatgtgtgtgtatgtgcccaccactccccgcggtcaccaccgcccaccctggtgggactcttacccgcttgtgatgatgcctcagtgtggtcagaaactcaaacctgacacacagacgctcgttggtgttcagctgcaggatggacagctccgccccctccaggtagaggacgctggctgaaggtcgaggggggagaggagcacaggtgagaccaaggatggctagccgccggggggcggggggtcattttctgtctgctatgcgtgccgactaacccacccctgctttctgcgccttccagctccctctgggctgggttagccgctgcctctggacagctacctctcactggacagggacgaagatactttaccccgggccaaaagggaaagctttgcaaattcgtggctaggctgctggggacagactgtgggtgtcagaggggggtcctcgactttgaggacggagcatgagcctcagcaagggactcactcggccatccacaggcctgggcgccctcgtcacccagtcttcccaggtgtgcacacggctccacccccaagaggctgaggtgtggggggtgctgtcagaagggccagcctgcagtcagatggttcatgaccgatgtgttttccagggtgatgaagatttggggctgaagaaaggccttcagtggaggatggtgggttaacatctagaactctgaaaaaggactcactgcctgaactgatgggtcctttctctgaactggcccccgtgtctgagcacagggccgggagccagggcctctgagtctggtgggaggactaggaggcccagtctgtggacccaccagaggtggggagcaccccgaacgcccactcaccatctgtctgcagcgtccactcgatgtgaaccacggggagcaaatgtccttgctgcgtgtgggcgaagcgcagctgggtctgcacgttttttggggacgagggggtgaggttccgagggtggatccagctgtcgtccaggcaggtacctgggagcaggagaggcagaaatcagaggcttgcgggctctaagggacagagatgcagcccaaagaggatgcctggcggggtccaggagccttcacagtcaggccatgaccccaagaccaaaactgggctcacagttctcttgatgcccttcgggggtcgtggcaaagctctgacgttacaggagagatgacaaagcatg

SEQ ID NO: 27363 - DNA, 3704 bp, Bovine  19866880888574
  misc_feature (1)..(1): n is a, c, g, or t
natatggggggaaaccctacgaaataacgatagtaagttgacaaatactaagcactcaaatggtattatttttatccttattttctctaaattcctctgacattaccattaccataccattaccattaccatacacactagccctctctgtttttattttggctgcaacaacttgtgggatctcagttcctcgcccagggatggaacccaggccccggcagtgagagcaccagaagaatcctactcacgaggccgctggggaacttgctagccttattgattttttaatttttttgagggtgctgactttgtattgtaatcaggtggcagtgaggacaccttaaatgtgttttgcgtttctctcttcccgtgcaagcgtctgggcgcgtgaaggactgtgtctgctaactgaccggctgttagcagcagcaacacgtctgtgctggcatttagaagctgataaacattcccacatgttgactcttcatgagctaatggtctgggtttggggctgaaaaggaaaatgaccacatccctgaagccacttcccaaattatgggatttaatgagccaaggaaattaaattatcctctaaagtgtactttctggtttacattatgactggatggcagccgttgctaccatcagattttttgggaaaattacacacagaactgggttcaaaacactatgattttacttgttcgttcacgtgtatgaagaatctactacgtgaactgtcggatgcacagatgtacaccgaatagggccctgcccacaaagtctgtgatctgtcaggagggccaggccggggaaatgaagaacaattacaacatgaagcactaagtgagaagtggaataaaagtggtagaaagtgtgaaagagcttaagagggtcaataagtcaggaagggcctcctggaggaggtgtcgcatacactgggctttgagggcgaatagggtttgggatttcggtagggaggtgggagaacttcccctctggtccggtggttaagactctgccctccagttcatggggcatgagggtccagatttgatcccttgtccgggaactaagataccacatgcagccaaaataaataaataaatagtggaggctggtcaacagccatttgagctgagtgatgtgaaaaagagctagagcttgaagaggctgagctggcagaggaattgttgggagctggattcaggaaagcttcacaagcttccgggagcttggagttagtagattggacaggaggagaccccagaggcctctgagagcagaagaaggtcgtgtgagatttattgtacaatttgtgattaattggtggtgaggtgcagaggagaggaagcaggagttacagctttgtcctggtgcgtggtgagaacaccaattcaggggagcaccagggcaggcagggtgcagacaagtgaaggactcatcagctatttagacatcaaagtctggggagacatcaaagagcccaccttccagagacaacaaactggaatcaggagtgttgatgctggtgctgacagggccaccgagtcagggtctggggggactgggactggggctggagctcggggggaaaagcaggaaggactcagagctcactgcctatgctggatgcagctcagaaggatcatgtgataaaatgcacagaggaaagaaggtgaacaggccaagctgagtcacctccggggagctggaaaatgagctggagaaggagacagagaatccaaggacaaaacgaccacaagtaacatcgattaagtgctcatcatattccaggcacaactctaaggtcctctcaagtattaattcatataactctcacaaccacctagcgaggggagcaccactagtagaatcagggacagaaacagggaacagctgcggaccccccagtgaggcccagggccaagggccatgtcctggaccccccagctgttttgcctccaaagtgggggtacaggccagggatgaaggcatctcaaggtggggtggtctctgggagacggtgaaggacagagaagcttggcgtgctgctgtccatggggttgcagagctggacatggcttagcggctgaacaataatactggggctctggctgggttttttttttgttgctgttgtttgtttgctttgtggctgtgctgggtcctcgttgccgcattggctttctctagttgtggtgcttaggtttaggttaccccgaggcatgtgggatcttagtccctcaaccaagaactgaacctgtgttccccaagtggggaggctgattcttaaccagcagaccaccagggaagtccctggcttgggtttttcactccacttgattatctttgtgcagaattcaggtctgtccccccactggtgtcctgttagctgcttagggattatttttaacccactgaggtaccagggagacctcggatccatcatctttatgactctccagccatccccatccaaggactcacacagacagtccctgattcttcttgaccatatttggcctctgtactgtcgacaacatcctctagaacaggggaggctcagatctcctttctcaactcatttatttctttgttcaccagatagttatcgaaagtctgctatggggcaggtgctatactagctggagaagatgaacaatgatcaaatggatatatatttgtgagaaaatcagagagcgtgacgtgagggactggagaagaaggaggaggtgagggaccggagagggaggaggaggtggagctatttcagagagcggctctgataactaataaggacctgctgtggagcactgggaaccctggctcaacactgtgataacctacatgagaaaagaatctaaaacagagtggacatacgtattaatatatgcagaactgattcactctggtgtacagcagaaaccaacacaacatcgtaaatcaactagactccagtaaaaatttttaaagggtcagggctcagagtaagagatgacaaagatccaaacactgtgaaggatccaggcaggggattcgccctgggatataaacagctcagaaatggggggtgtatcctgttcatttcatgcccctcagagcatcctcggctgtgtctcagtaaacattagggagcggcttcttgcaggtataactggggaaaaactactgactgttacactggactagagagacatgtgttgcccagaaactttttttagagggcactttattaaaactagaaatacccagtatttttatatgggatgtgaatgggcagggatgtgaaaaaggtttttctatattttaatagagaactcttctttgcagcagtaactattataataagattttattgaactaaccaattattagaattgtgcacattttattacaggtaaatttcattacaattttctgccttataaaaataattattttgggacttccctgcaggtccagtggttatgactccatgcttccattgcacggggcatgggtttgaatcttggtcaaggaactaaaattccaaaagccatgcagcacagccaaaacagaattatttcaagtaggcaatacatatataaggtttaaaaatcggaaagcacaaataggaactcaatgaaaatatcttcctccacttcttgctcttgttctgcccagacccatcccattcccaccccctcccccacgtgtggcta

SEQ ID NO: 27364 - DNA, 2326 bp, Bovine  19866881073848
  misc_feature (1)..(1): n is a, c, g, or t
ncttcagcctgggctggcttggaactgctggcctggattaacagaacctggcagaagtaaggctgtatgacttctgaggcaagacagtgaagggcaacccgattcccacctggctctttttcttgggagagatgcctgggaagcctggagcccacatatgaaaagtctgggcaccttaaagttgccataatgtaaagaccacgtgatggagataaagagatgcatccaatcagtgattggagctgagtgggaggagatgagccatccctgctgagcactgctgaggttgcagattcatgagccaaaataagttttttctttttagatatttttggtgtggaccatttttaaaatcttcactgaatttggtgcaatattgtttctgttttgtttttttggtccagaggctgtggagcttagctccctgcaggattgaacctgcaccccctgcattggaagtgcagagtcttaaccactggacctccagggaagtccctcaaataagttttatttgttgctttaacctggtgtgttttacggtggtttgttatgtagcagtaagtaactgggaaagtttatttaaaggaaatataaaactctagcaacttctcttccttggctgatgcctgtgaagttggcagccatctccaactccgcatcttggctgctctcagacccttcatgaagtccaatgatcatcaaaaagagggccacaaagttcatctgacacctgtcagaccgatatgtgcacatttaagcagaactggaggaaaccaagaggcattgacaatggggtgcgcaggagattcagtggccggatcgtgatgcccaacatcagttacctgagcagctagaaaacaaagcacatgctgcccagcagcttccacaagttcctggtccataacatcaaggagcttcaagtgctattgatgtgcaacgcatgtcgctgcgctgagactgctcacagcgtcttctccaagacccacgaagccactgtggaaagggcagcccagctgtccactggagtcacaatcccagcgccagactgtgcagctaagaaaatgaatagacagctcctttgcacattttgtttgtgttaataaaactgtaaaactcagacaaaacaataacaaacaaaacaaaacaaaaaattcagcggcagtgttttacagcatcagtgggccaaacacatatggggttgagctgtcgggctctgtacaggctgaagctgggagctccagcgcccatcagtgaaacagttatactggctttggaaacaaagcagtttgaatgcctttgaaccttgctgcacatttttggaaaccatgtcactcttgttaacagtatacttatagtgtgttccgctcataaataatctttaatacaaatattcagagcttcttcttaaagaccatttaacactcaaagagaacaccttaagtaaaacaaacagcttcctggtagaggattatatttatttgatggcaaactataggatattctagactctttttttttttttttttgatgacgaattcaggtgaaccagaaagagattccagatacctgctaagagctcaaaccaaatgtgcgtaattgggatctattgttggaaagatagtgaactttttgggaggtctgattctttctcctccttctgatgaatgtcactgttgctgctgctgctgctaagtcgcttcagtcatgtctgactctgtgcgaccccatagacagcagcccaccaggctcccccgtccctgggattctccaggcaagaacactggagtgggttgccatttccttctccagtgcattaaagtgaaaagtgtaagtgaagttgctgttgtgtccgactcttagcgaccccatggactgcagcctaccaggctcctccattcatgggattctccaggcaagagcacttggagtggggtgccagctgttaagctcctataattggcaagctctccatggagaggatccaacagagggcaagaaagtctgggtttacccaggaaaattgtgactgtctgaagctttacatgggatcttcgcctccatgtcctatttactggtcttccaaaatttctattggatggcaaattcctttaggaaaaggggcaagttttattatagctgtggaagctggcagagaaccaggatggatataacaagtcagttatcttgttaaggatgtgagaatagcctcggggtctagagaggctggatctaaatcctgctggtgctactcactagccgaatgacttcaggcaacctagccttctcagtgcccccagttttctcctctatagggagtgctcataag

SEQ ID NO: 27365 - DNA, 2885 bp, Bovine  19866881084295
  misc_feature (1)..(1): n is a, c, g, or t
naagccccccgtggggccaggaccttctcaccagccccgccctttgggtcacatgatggattcccgagtgatgagacctcccctccccccaaaccagtggacagaacaatccggcttcctacctcacagcgttcctccttcagggtacctgcaccccccgtgtaaacctggcgcacagcggctccagccccctgcagccccggcactgggttctctgtttggagctccggccccagccctgcggggtgtgcagggtggggactccatgctggacagccctgagatgctggccatgcagcagctctcctcccgtggatgcccgccaggcgtgccttaccacccccgccagcctgcaccgccccgcctgcctggccctttcccacccatgggcctggtggcccccaagcctgcctcaggggaccctgggaggacacaggacagcagtgacgtgcaggagcctgagaacggccaaggtaatgtgtgcatgcgcaccccctccccccgcatctgccctgttaattagtgacccatccttttatgcagactaggaaacaaagtgtcaactggcctctggtccctttcacttgcacatctctgggttgagcccgcggtggtccgaggatttgcggtaaccgtgctgcacagctgcattcttgctgtgtctccactcgtgctgagccttcccgtgcttatttcactctcagaataagctttgagggaactttgactagtattcttgtttgtatggatggaagctccagggcacaaaggtggttatttgccttcattcagctcttaagtggggagaccgattcaaacccgacacagcggacctggcatccgtgtgtgcaagctctgcgtcacccagcctcacttgaaaaggactgtcctgaagtgaccctcggggagcatgtcctcagggctttactcctggcccagttctctgcatgcctttctcagtgggcccacatctgcgagcgccggggctgcggagcagtagtgagatgggcgcgtcgtcaagagggctctagaagtgccgtcgacgagagtagtgaactcaagtgcaagagactcctctgtgtgactccggctggttgaggacggacatctagcatgtgtctgtgtgggagccgtggcacctgggcatctacagagtgatgtggttccttatcaactgggtggagggccaggagcgcagactcccttcaggtgatttcttgggaggggaggctgactctgtgaatgccacctgcagcacgactttccaggcatgatttcagatgtgactggaattcagagctttggagggagagtctcaggggcagtctgtttgcttcgttgccatgatgtttgtgttgttttgtttgcctttattttttcttaatgaagtatagctgatgtacagtgttgtgctaattagtatctgctgtacagcagagtgatagttatatatatatacattcttttccatattcttttccatcgtggtttgtcgcaggatattgaatgttatttctctgtgctgaagtcagatgttgtttatccactctgtatataatagtttgtctctgccaaccccaatctccctgtccctcgctgtcctgcccacccttcctcttgagtcacaagtgtgcgctctccgtcctgcgagtttgtctctgtttcatagataacttctttttgtgtcatgttttaaatcccgcatgtaagtgataccatacatgtatctctttctgatttacttcattttagtatgtaatctctaggtccatccatagtgttgcaaatggcattatttattcttttttatgactgagtaatgttccacagtgtatacgcaccacgtctttatgcgttcctctgttgataggcatctagagttgcttccatgtcctggctgttctaaatagtgctgcagtgaacatcggggtgcgtgtatctttttgaattatggttttctacgaagggcttcccttgtagctcaggtggtaaagaatctgcctgcggtgcaggagacccaggtttgatccctgggttgggaagatcccctagagaaggaattggcaacccactccagtatcattgcctggaaaatctcatggagagaggagcctgtgggctgcagtccatggggtcacaaagagtcgggcacaactgcgtgactaacacttactttctgcaaatacctgcgcaggagtgggattgtaggagcatacgttaactctgtgtttagttctttaaagaacctccacgctgttctccatagcgtctgtaccaatttatattcccaccaacaggtaagagggttccctttctccacaccctctccactgtttattatttgtagactttttagtggtgtccattctgactggtgtgagttggtacctcattgtggtttaaatttgcatttctctagttcagtgatgatgaacatctttttatcttggcctcttggctatctgtgtgtcttaattgaagaaatgtgtgtttaggtcttctgcccatgttttgattgggtttgttttttggttgagttgtatgagctgcttgtatattttggagattaagtccttgctggtctcatcctccgcagctatattctcccagtccgtagatagtctttccatttcgtttatggtttcctttgttgtacaaaagcttgcaagtttaattaggtcccactttttaatttttgcttttatttctactgccttggaagactggtctatgacagtttatgtcagagaacgttttgcctgttttcttgcaggagttttatggtgtcatgtctttaaggggttgtgcgtttatttctgtgtctgttgtaaggcgttggcatgttttttgttgactgaatgataaaagtgcaccttttcatcatt

SEQ ID NO: 27366 - DNA, 1795 bp, Bovine  19866881093348
  misc_feature (1)..(1): n is a, c, g, or t
ntttccctgtgctgtacactatatccttgttgcatgtttaatattgttttgatgaccatctgagtgctgcagtttcttgtataactagtttccttatttctctctgggacaaatattagcacttaatgtttcagctgctaaatgcatttttattttaaagtagtcttatctcatatgacgccatcatctgtacttatttcctgtgataggggtagtaataagctgttaggcatttattttagaacatgaaggttccagtagctgtgcaaaacattaaatatctgaatgagtaactttagctaacttccaaagtcataatttcttactgcctgaaaatcacagacagttgacacactgagatagcctttataaaaagtgactactcaaaaaaaaaaataaagtttacttcaggttaaaaaaaaagtgactaaataattaacactaaaaaaactaataactcaaatttatatagttgatcattttaaaaggattttgaacaaggaaagaatactatttttattttataagggaagacacttagactgagattacttgaccaaatattttagacagtaactcagatcttctaactccaaattctgtatctttttcatatacagaatcttctgattatatactttgtaaatttgtttgtgggtactattatccttgattaaatttttactctggcttcatttatgataaaaatcactgatctttccttttgaacaaaaggaatgaggagtaatctttgaagatgagtcataacactttttcattttagatatagaataaagtgaatttaagcaaataccctggtcaccagcagcttaaaataaaattgtcaaatctgtataatgaaataataattaatttatttcttggtaggcagaagaagagttcaacattgagaaaggtcgtcttgtccaaacccaaagactgaagattatggaatattatgagaagaaagaaaagcagattgagcagcagaagaaaatgtgagctttgaaaatcactgggctgagagggtccagcaggtgcactggggtcagcagatacgggttctggttttgtctggaccactcactgcttatctaaccttggtcactctgcttaacttccctttcctcacttgggaacatggaagcctcactggattactgaaatatacagttgaaataactgataaagtcttgccacttggtaagcactcaataaatatttcgtaatatttgagaataggtgggtataaagcactgcatatatttcagggagttctgtttgggtccgtacagagaaaggtatttgcgtatctgaagaagggtgtacatttttttctctgcagctctagtgatgatacttttccatgccttttgcagtcagatgtccaatttgatgaatcaagcgaggctcaaagtcctcagagcgagagatgaccttatcacagtgagtaattagtccctttagttatagtattataaaatgtttgtctattatcgagaattcactagttcatattggattaaggacttgattaatgatttttagagagaaaacctttggttagcaaatcagtacagtagatattgtaataaataaagaaatgaataagatatgtgtcccattttcaaggactcactgctctgacaacatatagactcttctgagtcacataactcatgatggaggaccgtagagtgcgggtgatgggggcttgaggctggaaagcctgaatggagtaacataggggccctgagtgcacgtgaggaacctttgagtactttcagtagaaggg

SEQ ID NO: 27367 - DNA, 826 bp, Bovine  19866882173681
  misc_feature (1)..(1): n is a, c, g, or t
ntcacagacacctgagacctgcctggtgacgcaataaccccttgtccctccccacacagacgccgcctcgagtccagagccctcggggggtctgggacattcccccatctcaccagccccctcctctgaggtcagaccaggtcctggcgggtgagtggggcctacctgtctcctcacacccacagactgtggaggcgcgttctcctcaaacttggccagcagctgggttgccatgtacttcactttgttctggttgccgagggccacgtccatcctccggtcggtcagcgtgctcaccagggtgggccttgctcctctgtggccccggggcgtgtcctcctgaggaacatgggccccgagagccgcctgtgtcagagcagcccccctgcccccccgggcctggcgcgatggctggtctcaaggttagagcgctccttgcggttctcatctcaagatggactcagggcgggggcagcaatgaagaggcgctccggcttttgctggtgtggccacatcccgggaaggccccttgcccttcaccatgtgtgtgaccccacagagaaaggaaggctacatgcacacgagtgtgctccgggaatactctccagagaacagaggcacaaggccacagcaaacatccatgcccaccctcctcacgtggatgaactggaaagatccagcaataccaactcggacattgggggattaagccaggaagaggcatactacagttgctccagcaaatcccaggcatttctctcacctcctctgactggctggtctttctcctcttcccagcaccatccaggtctttttccttcttgtc

SEQ ID NO: 27368 - DNA, 1410 bp, Bovine  19866880420857
  misc_feature (1)..(1): n is a, c, g, or t
naataactccaagcgtttcagacatgacgtattgacaataaggggcaaacgtgggattagcgccctccaaaagacagagagggcttttgttccatctttgtcagagcagaagtccccaccctgtgttttgaaattcacatcaactaccctgtgccaatttccacatttccagattttaataatgtggccagggttagatttttagtttcccccattctaggtcagggagcagaacgaatgtgaggaagggggaacgggcagggaatcaataaagcatcggaagtacaagggagggcgtgtcatcctggtctttcccagaggtcagctaagcagacagacaccctacactgctgtcccaatgggaaaagccacacacattctcagaggtttgggttttggtggtggttgttttcaaggccatcttgtcaagctgtatttgccaaggttctcgttgccgctcggttgctcagtcacatccaactctttgcgagcccatggacttgcagcacgccaggcttccctgtccttcaccatctcccggagcttgcttactcctagatggaggtttcttggttttgtttttgttgtttcttgtcttaatatgctgcagaatttcactgagcttgataagcaactaaaaagaaagcaaagggtttctgaaagtgccttatgagcctggaacctggtttggttttggaggcatgaacattttgtcaaacaatactgaaacaaatccatttccgaaacagaatagcttgggacttctagaaacccttgtagaatttactgtcaactttggtttggtagtatactcatatccagcatcacttccaccgggagaatgcgggagcctaggggcaaagggagacactgtatttttgtttaatatggaccatttttaagacctttattgaatctgttacaacattgattctgttgtttatattttggttttttggtctctaggtgtgtggaattaggggatcttagctccctcactagggatcaaacccacaccccctgcagtggaaggcaaaggtttaaccactggactgccggggaagtccctcagggggacattttcatcaactagctccatatgtagcccccaagatgcagataagcccagctgggcttcctgagtgctccgtgtcaggcctgccttgcacagaatcacccagctatggagtagaggaacagacaagaacccaagtctgcctctccaaacatcctggtccctacagtgcagagctgggtggagctctagccatagaggaaggctcttaggtcccccaagcatcccacctcctgcactaagatccgcagtctttgagttaagtacacacgatagcccagctggggacagaggccacatctcagcctaggtcaggctcaaagcggctgctctga

SEQ ID NO: 27369 - DNA, 2816 bp, Bovine  19866880492057
  misc_feature (1)..(1): n is a, c, g, or t
nattgaatatgctaaagcctttgactgtgtggatcacagcaaactgtggaaaattctatatgcaagtcaagaaaaagcggttagaacaaacatggaacaatggactggttcaaaattgggaaagtagtatgataaggttgtatattgtcactctgattttaaacttatatttagacttcagttcagtcattcagtcctgtccgattctttgcgaccccttggagtgcagcataccaggccttcctgtccatcaaaaactcccagagtttactcaaactcatgtccattaggtcggtgatgccattcaaccttctcatcctctgtcatccccttctcctcccaccttcaatctttcccagcattagaatcttttcaaatgagtcagttctttgcatcagatggccaaagtgttggagtttcagcttcagcatcagtcctttcaatgaatattcaggactgatttccttaaggatggactggttggatctccttgcagtccaagggactatcaagagtcttttccaaaccacagtttaaaagcatcaactcttcagtgctcagctttccttacagtccaactctcaaatctatacatgactactgggaaaaaccatagctttcactacacagacctttgttggcaaagtaacatctctgctttttaatatgctgtccaggttggtcataactgttcttccacggagcaagcatcttttaattttatggctgcagtcaccatctgcagtggttatggagtcccaaaatatatagtctcagtgtttccactgttcatccatctatttgccatgaagtgatgggaccagatgccatgatctttgttttctgatttttgagttttaagtcaactttttgactctcctctttcactttcatcaagaggctctttagtcctttttcactatctgccataagggtggtgtcatctgcatatctgaggttattgatatttctcccagcaatcttgattccagcttgtgcttcatccatcccagagtttctcatgatgtactttgcatagaagttaaataagcagggtgacaatatacagccttgacgtactcctttccctatttggaaccagtctgcacattatgcaaaatgacaggctggataaatcaccagctggaatcaagattgtcaagagaagtatcaacaatctcacagacacagatgatatccctctaatagcagaaagcaaagaggaactaaagagctagttgatgagggcgaaaaaggagtgaaaaagctgtcttaaaagtaaatatccaaaaaactaagatcatggcatctggtcccatcacttcatggcaaatagaagggggaaaaagtggaagcagtgacagattttattttcttgggctccaaaatcactgtggatagtgactgcagccatgaaatcaaaagatgcttgttccttggaaggaaagctatgacaaaccgagacagtgtattaaaaagcaaagacatccaccttgcccacaaaggtccatctagtcaaagctatggttttccagtagtcatgtacagatgtgagagagttggaccgtaaagaagactgagcaccaaagaattgatgcttttgaactgtggtgctggagaagacacttgaaagtcccttggacagcaagatcaaaccagtcagtcctaaaagaaatcaaccctgaatattcactggaaggactgttgctgaagctaaagctccaatactttggccacctgatgcgaagagccaattaattgaaaaagaccctgatagagggcaagattgaaggaaaaaggagaagggagttggcagaggatgagataattggatggcatcaccaactcaatggatgtgaatctgagcaaattcaggagagagtgaaggtcagaagagcctggcatggggtccgtggggtcacagagttgaacacaacttagtgactgaacaacaacaagtcgggctaagctttgaggtttagatgtgagaggtagttagtttatatggctggagtaacgccttcagggtcctagaggctggtcagaaaccctgattgtgctggaaacatctgagctgcagtcccctcagatatgactgagaccggagctttggtaaacatgtccctgaagagcttgctcatttcttggaaaagggacttccagagagttctcagagcacataaatagcaggcccacacagacaaaggtaaccattcaaggaatagagaagtatgttctcaaaaattacactccaagccagagttgtggttcagaaagggggttttatactgttgctgttgttgcttcattgacctcagaaaagatgtgctggacagctgtcaacagtctcccgacagtgagaaggggtgtgtctcatggcagtgggcagacatagaaagatacaaagggcccatcccggccagtcttggggtgcccttaacggagccctgggttgagtgaagagcatttctgtttagaagcaagcatctgggagatgtttctatgttaccagtcatgacttgtaatgcaggtttctccccactgccttccagctgggattgccatgcatgtttgatgaaccaggaatctaagtcttgagatgaactctctcaactctgagcacgttaacacccaaagtgagagggagcgccaacgtggccgggggcacttggaggtgaaaccctcagatcctctcagatcctgctgccttgttggacacccaggttaatttctgcacttcatcaatgtctatgccaggctaccatccactacacgccatattctgggccatgccccgttgacaacctgcttatttc

SEQ ID NO: 27370 - DNA, 873 bp, Bovine  19866880548435
  misc_feature (1)..(1): n is a, c, g, or t
nggggaaggaaaagggaagcggggtggggcatgatggcaataaaacagaacccgcaaatttaatcgaagctgacagtatcaaatatgtggctgaaccaaaccaacaagctattgattgtgtaaagatcatctcggatttcagattttcaagtatatggactgcactttccctctggccaagacatacagtcttggagcccaagaaaacattctctgacacatgtgcacacagggaaacttttaacataggcaagggcttttcagaaacataaatggatgagctgatcatttttaagtctctggaggctgctgcccttgtctcattgggccagccaggaacttcttaaagaaaggagtttttatgaggctggtgggtgcagtaacacacaacacgtggtgagggggtgcattaaatagcaccccacgggtgggaagggaagtagcagagaaaggctaacctggcagaaaagatctggtagtgtggggaggagacaggaggccattcgtccccatcaacacttgatcctctctgggaaaggagttctgtcacttctggcaaaaagacttgatttggaaactctgcctcagccaaaacgctggcgtttaaagctggatctaaataatgcacaccatgtgtgttggttcctattataattagtcgttgaagactgacaaaacagtcagtcctataaacactcatggctttggccagagagctcttaaagcctcatttatttttgtgattttgcattaagtgtaaaactctctcttacctcaaagccttccatgccgctactcaacctaccatccaaaaataaaaataaaacagccaacccacaggaacgaataacaaaaaaactgaagagattaaaa

SEQ ID NO: 27371 - DNA, 1134 bp, Bovine  19866880567773
  misc_feature (1)..(1): n is a, c, g, or t
nacctaataaatttttataaataatgtgtattttaaaatacataaataaaattgtgtagtgtgtacacttctgtttaaagtgtagagagtccagcttctttcacagagcctaacatttctgagatttattgtgtcaggaatttcaacacccacccttaggtttgatcatttcctaggcaaactcacaggactcatcttgccatgctggtggctctgacttgttgcaggaaaaaggatacaaagcataatcagcaaagggaaaggaacatgagacaaggtccagaggaaaccagacgcaagcttccaagagtcctctctcactgaagtcacacaggacatcttaattctcccgatgggaaatcaggacaacccgtgtgtaatgttatctactagggaagcttattagatactcagttcctgaagtatctggtcacatgtgcagcatctggcagatatgaaccaaaattccagactctcagaaggcaggcaggtattcagcataaactccactgtttgtacactttaggcatactgagtcatttttggacagttctggaaatggtgggaactcttttgaaatctaagcttagagttactaacccagagccaaacgcttaagcatatctttttaaggacagcagtctcaagcttgctagtgttaactctgttctgaacatttactcaggttgttgcatctgtaagtagtccattcattttcattgctgaatagcatttcatctgcagacgtaatatgtggctggtggtgggaagtaaagtccaatgctgtaaagaacaatactgcataggaccctggaatgttaggtccatgaatcaaggcaaactgggaagtggtcaaacaggagatggcaagagtgaacatcccacattttatgaatcaataaactaaaatggactggaatgggcaaatttaatttagatgaccatatatctactactgtgggcaagaatcccttagaagaaatggagtagccctcatagtcagcaaaagagcccaaaatgcagtacttggatgcaatctcaaaaacaacagaatggtctctgttcatttccaaggcaaaccataaaatataacactattccaagtctatgtcccaaccagtaatggtgaagaag

SEQ ID NO: 27372 - DNA, 5133 bp, Bovine  19866880621967
  misc_feature (1)..(1): n is a, c, g, or t
natttttcaggcaagaatactggagtgggttgccatggcctcctccaggggatcttcatgacctagggatcgaacccaggtctcctgcactgcagatggattctttaccatctgagccaccagggaagcccctctctgagggttagttctcgttaaagctagcagatgactcagagttccaaggagggccaatctctgttcccacacatctgtgccccgagtcttcagaactcatagacccaggcccagcctctgatcaccagtgggaggggcacctcctccatcgtattgcacccccggtggacacagcctgaaggtataccaccctcctctctgacattactgtgtctgatattgggggctgttctggacaattgtccctggcatgtttcatatgtaagtgtgtgtttgtgccatctgcacatatgtgaacactggtagtggcatctcttattgagtacgagtacactgagcaaacccactccagtgttcttgcctggagaatcccagggataggggagcctcgtgggttgccgtctatggggtcgcacagagtcggacacgactgaagcgacttagcagcagcaacactgagcaaaggctgtgcttcagaaaataataacttatggcgcaaagcaacatttatcccaaaagaatgtgcctgtgtgcatgcatgtgtgtgcgtgtgtgtacacattgcagtgtggtagagggagggagggacaccctgatatttattgatcaccttcattcatctgggggcttccctggtagctcagatgtaaagaatctgcctgcaatgcaggagacctggatctgatccctgggttgggaagatcccctggagaagggaatggcaccccactccagtattcttgcctgggaaatgccacggacagaggagcctggtgggctacagtccatggggttgcaaaaagtcagatgtgactgagaaaccaagcacacatgcacgcaaccctcaatttttcagtcttcactcttcaatctttcccagcatcggggccttttccaacgagtcggctctttggatcagatggtcaaagtattggagcttcacctttcatatcagtccttccaatgagtattcagggttgatttcctttaagattgactgtttaatctccttgcagtccaagggactctcaagattcttctccagtagcacaatttgaaagcatcaattcttctgcactcagccttctttatgttccaaatgtcacatctgtacatgactaccagaaaaaccatagctttgactatacggacctatgttggcaaagtgatgtctctgctttttaatatgctgtctaggtttgtcatagctccatctttaacacttattggcacttacctagccccaggactgttaggtgctttatctgaattatctcctttagtcttcataatagcttgaggagacaagtacaaatcattgccctcatttttacaagtagagatactcaagcaccaagaggggaaataagtctctggggtcctgcatctagaaagtggcaggatctgggcagggggctgcagagcctgctgggaatcccagcagcacccggcctggctctaggagctcatgcacagcagaccagcgactgcatctccgtcctggtcggggccttctgtcctcattcagggtgatgtcacatcagtgggacgggacatctcacacctggaccgcctcgtcctcagatctggattccagtacatcctcatcctcccatccctgccactcaaatccccccactgccctattactttggttttagtgcactgagcccctgcccgcttatgccacgcctctcttctcttgccatccagcctcttctccaacatgaattccccagtcactcagcctttctcttgtaggttacaaccccttggcaaaatcccagttctgagtgaacaccgccccgcccacccaccgtcttctggcctgcactgggctgttgagtgtttctggagatcgtcagatgatacgattggcttcttggctctgaattcatgatctcagtctgtgagcagccatcggtgccaccaggagaccccactgttccctctggaggtctgctccgcccccagccccctgccacgagatgacaacaatgctcacaacctcctgttctgccctggaactttccctctagttccgaactctcatcttcccaccaacaaactcaccaatcccacccagacaggcacctcttctgtttcttccttcctagatgggtggagaaaagtctctccacctgtgctctggattcatccctccagctactaaggaacttcgctcccaggacttccctggtggtccagtggttaaaacttggcctgccagtgcagggggtgtgggtttgatccctggtcagggaactaagatcccacatgcctcgtggccaaaataccacaacagaaaaccgaagaatattgcaacaaattcaataaagcttttaaaaatggtccaccaaaaataaaataataaaaaaaaaaggactgcactccctctgcaggggtgccctctgcagggagctctcgctcactttcatggtcctttctctaggcgacttcagtgcacagacatgcccctctcatcctcccagagcccctcctcccctcaacagccaccccgattcctccattctctttccatgcacacacatggcccccactctcccagccccatgcatgcccagcgccactgcagcctggctgtgctcccaacgctcttctgatgccgcttggtcaaggccacccatgaccctgtcttgccggtccagccccacccactctgcagcttcatcttagtccttcatcactggtgaccactccctccctccctccggaagcactctgctctctcagttcctaaactgaacactttcccagtttttctctgacttcgctggccagtccttcatggggtcctcctttttctgagccctgaatggtggccctccttacaccccattgggctctctctcttcactttccctgctcacttcccaagagatacctttcagtgttgttgctaagtcgtgtctgattcttttgcaaccccatggactgcagcctgtcaggatcccctgtctatgggatttttcaggcaagatactggagtgggttgcaatttccttctccaggggatcttcccaaccaagggatggaacctgtgtctcctgcacgtgtctcctgcattgcaggcaaattctttaccactgagccacctggatataaacaccattcttgggacttccctggtggtccgatggctaagactgaactcccaatgcagtggggccaggtttgatccctgttccaggaactgcatcgcacattctgcatcttagacccaacacaaccaaataaatattgaaaaataaataaatgagtaccattcttatgacaaccaccccaagtctgaattctcaacatggacttctcctgggagctttcttcagagttgcaggtcccaccacccactgccatctccactgggaaatctcagacattctaaaactagcacatccagagcagatgcaaattccctgcaagacctgtcccatctctccctagacttcccccatctcagacaatggcacccgctctccaagttatgtaatcctctcttttatcttcttctcttatctaatccattggtaaatcttgtcgacttgctctctaatatatcttgaatccagaatccacacttaacacagcctggaaagcacagccgtagcctcagctcagcatagtcttcagagatactccttttatttgtttgtttgtttttttactttatttttaattgaaggatacttgctttacagtattgtgttggtttctgccaaacatcagcatgaatcagccatcagtatacctatgtcccctccctcttgaacccttctttccgtttttactttcctttcccacactagctcttacccacttaaaggtctcggtgaagaggttcccatcattaaatccattttacagataaggatattaaggaaggttcagagaggtttaaaaacttactgtaggtgtccagctggtaagtgggatctctgggcttctccccacctgcctgactccccatcccacctgccttgtgactggttcatggctagaggagtgaggactgccaaaggtcagccttggagcatgctgccagctccatgggaactaagtgttctctgtgggggctgaagagcatagataatgctggactttagcgttcaagtcagcagggctaagtgtgacttttgtttgataagcttggattttatgtcgttaggagcaaacaaaccataaaatagctgtgtgttttaatgggcattttggagcgcatcccagcttgtggggctctgcccaaggacaagagtgaaggaggcaggcaccgtgggagggggctgctcggcttccatacaccacccgggctgtgagctgagccacgtggacaaacgtcttcactgcttagagcttccctttccttatctgaaaagtgggacacagccagcctcatttccactctgtcaatcaggaactaccgtaatgacccaaagcctctccacttagaaggctctataatgatgaaaacactaacagtgatcatgataaccaacttatcctgacaccacgtgccaggcgagatgctaagagctttattatcttttaaaattatcccagtttatatatgaggaaaatgaagctcaggcaagttcaaaactatgcccaagctcacagcgtttgtgagtgacagtgccagacccagcgaggcttcccaggccttgctcttagccactaggctttgctgtggagggctgaggatgatgatgtgagggatggcagtgatgaagatggcgatgatactgatgacggtggtgatgatgatgatggtggtgatgatgatgatggtggtgatgatgatgatggtggggtgctgcgggtagggatcactcttatgcttcatggccccaggctctttgttaattacttccccccttcagagcctcttccacaggtccaagcctgccttggccaccttgccacaggggctaagtgggtttaactgaaggaagaggtgtaactgaaggactgctcaaggga

SEQ ID NO: 27373 - DNA, 1391 bp, Bovine  19866880641472
  misc_feature (1)..(1): n is a, c, g, or t
naaaatgttaagaatttttttctaatgtagctatttggaatattaatctcattacacttatggcctgtggctcagcccctagactatgggtctttcttattggaagaagacccacaggtccaaacacttcttattggactttagttgtaaaacctgtcataaaagtgatcatgcaaaccaaggcttcagcgattaatcgtaacttgaaagagcacacataaatctacttgatgactcagagacccctcaagtgtttccatattgctttctgcagtcgtctggatgacggattcttctcagataagtgattatttgtgtttctttctgtcttagggtccacaactttctggagcaacacctgcagctggtgataaagggtcggacacgcaagtacaatcggtgccttcatctgactgattttcctcccggagccgttgcagtacactgtcataaccgatgtgtttttccccattttagggaacaaagggtgatcacgatttccaaatcagaatattctgcacacccgtctgtggcagacaaagctgatgttcagcaggttgtcatgtattgcaaggagaagcttattcgcggagattcggagttttcctttgaagagctgagagcccagaaatacaatctacggagaaagcatgaacaatggggtacttgcagtcttaaatttgagatagcctaggtcacttaacatgattctcatctctgagtaattacatttgtagtagataattcattgtactgaaagaatctcaaaaaaaaaaaatctctagctcattccatcagaagcctaaaacctttgttaaacactagtgtagcaactacgtttgtccaaagcctaaactgatgtcttgacagcaaagcttagagctgaaacagcactaaaggagatgtccatgccaacgcagagatacttttaagctttcacataacatctgtatggatctgagcttctgtatctagcaattctaaacccctgggtcagttatttatactgtaaaggattaattaagagctagagttgagaagagatttttcaaagtctgcagctgttataaataagacgttcaggagtcctctgatcaaagcgctgtgctattcacggctgtgctgtacagtgggccctgactctgcggggaagactggatgttagcagcagcgttggctcttcagtttacagcacgtgtttgctgtaacaacatggacctcagaggaaaatgaacctctgttctcaagacttcgacaccatctgactatttgtgctgtgccccctgtgttggccaatttttgtttattcattatttctcgtttggttaacaaccgagaggacagtcagtgacccttggggaggaccctttcgtgccttgcacagatgctaa

SEQ ID NO: 27374 - DNA, 821 bp, Bovine  19866881015063
  misc_feature (1)..(1): n is a, c, g, or t
ntttccccccccaccagatctccaccaacaacaaaaacctttttcctgctgcttcagcccccaaaacactccttttttggaacaactgagccaggcagctgttttgtatcaagtccaggggttttctatatgacccagggagctcagacaactggcaggccttcctgcattaaggggtaatctgagaataatttgccataaaacacccagaagtgccccagctgtagccagatatgccctagaaagcaccacttgcactgtgcggactttacaaaataatcataattttagaacacacattttttttaatccatttttggaaactattttaaaggaaagaagtaaccggcaccatctgagaagaaggccacagggaacttcccttacaggtacacagactgtccccaagcacctcttctcagcagctcagtcagtgaagaatctgcctgcagcgcaggagatctggttcaattcctgggttgggaggatgccctggagaaggcaatggcagcccactccaggactcttgcctggaaaatcccacggacagaggagcctggcgggctgcaggccaggggtcacccagagtcggcgcgactgaggactaagactttcaccttcatctcctccttactgcccgatggcccaagtcctgtgctgccagggctgcacggggctccacgtttacaatgtgctctcacacacaggctgccgaggcaggtgagaaggatgagtccagtaagcgcaagcctccaagtcacctgctggtgagtattgctccttcctgggtgaagtaccagaaccttctagactaggggcag

SEQ ID NO: 27375 - DNA, 1796 bp, Bovine  19866881041041
  misc_feature (1)..(1): n is a, c, g, or t
nccatattcatgcctaaggaagggctgcaaagcccaaactaaaggaagcatcgcatcctgtgcagagagccgattcaaggctctggctccaggacaagacagggccacaggcagccctcccccatcagcctgagggcacacgtggccaggcagcccttcttaggagccggtcggctcaccgctggtgaaacactcgtgaaccaccgggatctgatccagggttgcaaacagaggaaatgcaaagtaaatgtggggctaccataggacaccggggataccaactcactctaagcaaatacttaaaaccacgaaggcctagcctctcaaacactgggcttcaacctgtcctcccaggaaccggtcagctcacagcgtgtaaaaaaaagtcctcaagggttcatgattcattcactcagaagtaaaaaccaaaatttaacgatggccaagaagcagaacgtgcacagggaaaaggaaaaaaaagctactttaaaattctcaattctattcatgtgtgtgcactgagtcactttagtagtgcctgactctgtggggccccgtggactgtagcccaccaggcttcctctgtccacaggattctctaggcaaaaacactacggtgggttgccatttcctactccaggagatattcctgacccagggactgaacccatgtctcttaagtctcctgcactggcagatgtattcaccactggtaccagctggtaagccccaagtacagaccagggggcacccaccacaggcttcacctctcctgagataagcaggccagtggcttgggttctctctccaatgagcgtatttcatttcctccattgctgtgaattggccccaacacactaacgatcacgtgtgtgtgtgtgcctgggtgcacgtgtgttagccctgctgctctctgtcccttggcaggtaatgactttcacagacagcttcctgaacccgggaaggaacccaagtgtgccaatctcatgcactggcaggcaggttctctaccaagagcaccacaattctattcagccaatgactactgctaacgttagaacagtgagcaaaatacccccttattttgaaaaaaactgcaataactttaactgcaggaaaaagcagttcaagcctgtcttaagtgtccaaatctttctttctccaactacacgtcttgagctacagtcaagtttctgcctaacccaataggccatccctctcaggtgtccctgacacagacctggtcccaacagagccagtgcagcgggggtgtccagatgtttctccatggtccaaatatctgccaaggttcttctcagggtgatgtgcaggttcatgggcaggtcaagggtgatttggacctcccttgccctcccaggccacttcctagaaaagactttctttcctattttgcttgtttgttctggggcctggcagggttagaattacagctcatttccagatgaactgacttccctgtgggtttcctaaagtcctgaaatgacagctcctttccacggaaaggaggaaggaatgtttcactctgtcatgctcagggacctgctggagcctcgacagtcactgagcaaggaaaacagtgaccaagtccctgccagctgctctctgcccaggagctcatacaaaaaagccctcagctctcgggaggtgagaacttctgtctctgtctgatggatgaggaaatcgaagctctaagaaacatacagatctgcccaagttactcgtggggctgagaacagccgggtaccgctcagaccccactccagacccgtgtgcaa

SEQ ID NO: 27376 - DNA, 1190 bp, Bovine  19866881074045
  misc_feature (1)..(1): n is a, c, g, or t
nagttaaagcaattaacaggacagcagggggcagaggggaaagggaggtcaacactttgcagaatttaagacattaaataagccagaaataaatatacaacattcctacaagttacagcattatcaaacagtaggacacattacatagaaaaagaatcgacaatatttacaaccctcaattctgaaaaagttcagcaaaaactgatttttttttttcttttagtcatttaggctgtacaaaattttacaagaaagggacacataataattgcacagacatttggctcagttgataagtaaaatacaacttcctaatctaataaatagtcaaaatatatacaatattaagaaggagaaacagaagaaaattgtaatccgctatgtacatttttttttaaaccaagaaaaaaaaaatcttcatcaattcaggtctagggaggggcccagataatttgcaaattcactcatgaagctaatttcacgtgtttattgcattcctgtgaaaagtcacaggacagtttctacaaatgtcatatcagacaagtgatcaaggcacaaaacctgcattaagtttccaacaagggaccgaattatttttgctctctacaaaaagtcaaaggaaggaaaagtaagacatcaaaggtacacccggccatgggcataccttctgcagagaggaggcatcatgatcaacagacacgtacagtacagggatgtctagtcacctctcaagtcccgggggcaacatcctcgttttaatacctctacagttcatagattctctcatttcctcatcagctacttccacggccagcccagggggcctggaggcccccaagcccaaggtagacttgcacgtgggtgagcaagcgctcggccccccagggcactggtgctgaaggaataaagtgctccagtccaagagactggcccgtgaatacggagatcctgggggggagcggcccagaaccaaatacgtctttggtgtgtgtgtgtgcagcaggcccacggacgccaattccgtggaccgcctcaaccgcttgcgtggacttgaggatccagcggacgggttcaagacaaagggtccaagaaacacaagctgagactcaacacagcttttaaaacaagtcaagaccccaaaaagctacttggggaaaagaaaatgtttagaaggaagaatattggagtca

SEQ ID NO: 27377 - DNA, 1751 bp, Bovine  19866881088134
  misc_feature (1)..(1): n is a, c, g, or t
ntaatataaatgggataaaagagataaagtgaaagtgttagtcactcagtcatgtctgaccctttgtgacctcatgggctgtagcccaccaggctcctctgtccatgggattctccaggcaagaactggagtgggtctccattcccttctccaggggatcttcccgacccagggatcaaaccttggtctcctgcattgcaggcggactctttaccttctgagccaccaggggagccctaagtcttccgtaaagaattccagatgataatggccccttcaggagcttcattttccttcccttgataatgagttggacttagaaacctccttctattttaaagaatcaagtttggagatggaaaagagtttctttacagtggagaaatccatagatcccacgttaaccacatgattagggttaatatcatcagtaataagacaggttagtgatgtggacctctggtacgatgtgatgagaagagcacttctctcttcccagaacccacagccccagtccaatcatgaaaaaacatgtcacacaaaaccaaactgagggatggtccacacagtaccagactggtactcttcaaactgccggttggtgaaaaacaaggagggactgagaaagcatccgcagccagacgaggaaggagccatggagactgagtgcagtgtggcacctggatggcgtcctaggacaggaaaaggacgttcatagaaaaactgataaatctgaatcaagtctgcgttagttaattcttgttgtttagtcgctaagtcctgcctgactcttttgggaccccacggactatatcccatcaggcttctcagtccatggaatttcccaggcaaggatactggagtgggttgccatttccttctccaggggagcttcctgacccagggattgaacctgtgtctcttgtgtctcctccattggcaggcagattctttacccctggcgccacctgggctacagtccattgggggttgcaaagagctggacacgactgaagtgactgagcaggagcactgtactccaataaaaattatttctttcaaaaaaaaaaaaaaaaaccaagccaatctcccgagcctttcctggctgtgataagttcctgctttcttttgtctggagcgtcagtgttagcagagctggtccactttcaggagccagtgtgatcccctattcacacgctttcgtgtgaatggcggctaatcccctgtagggatggggaagctgaggctggtttgtgactggggtggggagaggggagggcgaggcttctagactcgggtttcctgctgttctagcgtccccaggcctgaactgtcgaatggggcggttccacctttgtccctcactgagggaccttggctcaaaggcggtctagtgacggtgcccccagggctccatcataacaaggccctcaggaaaagagctctgtacttgccattaagtacttgcgtgtctagaacaatcgtgtgctttgttcttggaaaacttactgtctgggccttatcccatttcggttttcattaaccttgatgtttgtactaattttgctttagataattatcagcattgaggaggaactatcagctgactctcattttcaggagggaaaatctttcaaaataagttaccaatcgtgtatctccactaaaaccaacttcatgttgcttaaaaacagatgaaacaaaacaaaaacttcagctttataaaatgacggagttttgtgtgtatgttt

SEQ ID NO: 27378 - DNA, 911 bp, Bovine  19866881301018
  misc_feature (1)..(1): n is a, c, g, or t
nagaagccccaaatacagcaagtgagaaatcaaggagatgattacgtgtactcactctctatcgggaggaaatcctttttgaaaagatcccatctatttctttcaaactgaaatactttggtgatgacaaaataataatgatggtctctgtgcttttttttttttcagtttcctggcatttaacatggacacagttggtcatctcacctttctgttgaaagcggtgcattttcgtgaaaggattcttcagcggggtttggtggcccgaatttattataaggtaaagatacattgtgttataataatatttttccttttgacatgtgtgtaaggcatattcttgctggtgaaagtgttagtcctttagtcgggtccgactccttgtgaccctatggattgtagcctgccagactcctctgtctgtgggatttcccgtgcaagaatactggagtgggtagccattcccttctccaagggatcttcccgtccctgctaaatgtaatagaggatgagtcagcaagtcggacacaactgaagtgacttagcacccatgcagcaataattacaagcttctggaaatggctagaatttctataagccattttgcatgacagcgttgctcactgtggaggtcctgatgcttctgatgagctctgtgtgtcatctttagagtgggagttgacgagtggagtaaattttaagccttactaaaaccaaaacatcattgtctgtaataatgaatacattattttcagggtgggggggagtgcatggggcacatgtggaaattaaccactgggctcgcctgagatgcactctgtttcctactgaagtgcccatgatgttctgaaaaacataaaaccttgcatcagcattgatgggaggtctagaggtaatttccaccgagtgtg

SEQ ID NO: 27379 - DNA, 1230 bp, Bovine  19866881393854
  misc_feature (1)..(1): n is a, c, g, or t
nttgaaaccaagtttcaaaaaaatgtaacatcttctggggcttggggagtcagtaagatcatctcttctttgtcatctgcttttcctgtatttgaagatgaaacaaagaaaagtatggattaccacagccaaaaaataaacttgcaggagccaggacctttggagaacgttccatgagctggtttcctacaaaaccaaatgaagtgcctcacactgatgagtttctggatgattcagctgtggggggtgtccactgcaacaaaagcctggcacccagccccaagagcccaggagactttaggtttgccatgcagctcgcatctatgcccttccacaggcttcccgtggactccatgcacccactggaagataaagaaaatatggtagcacaccagcacacccatgtggctttggattctttcaaaagaaacaaggtggaacccttgaaagagaaagttcagtccaattgaagagataagtcgagacttagtgtgccccacagatgtcccttctgcgtccttgctccgtctgggccagcttgctgcagccatgctgaccagcaaggcagagtggcaccccctgactttgccattgcagaggatccgtccagaagccagcgctgggctccaggctgaatcgatgcaggctggcttgcttgggaatgtagacgctccaaacttcactgttgagagaattcctgagatgaggagttgattctcaaacttttagctgggctttctaaaccagtgagttcctatccaaatacttatgaatggacatgtaagcttccagccatcaagcccaagactgaattccaattaggctcattgctggtctatgctgatcaccttcttggagaaggggcttttgcccaagtctatgaagttacccatggagatgtgaacaatagcaaaaataaggagaaatttgttctatatctgtacaatatagaagtgaattttagaaaaaaagttaagctgatgcaagtatgttaaatggagaacactcctgaactccaggtgtgcacgctctccaaaacaatgccatccagattccaaatgtcgagggccctcaatgtgaatagggagcaaaaaaaaaaaatccatcttacaaaggaaattgagcatcctacattggttcaatgaagtggtggaccaactgcacattccagaaggagaattgctttctgctgtcctcgagcagggagggaggaagaatacattacaatag

SEQ ID NO: 27380 - DNA, 2561 bp, Bovine  19866881499171
  misc_feature (1)..(1): n is a, c, g, or t
nctgtatgtgtaacctgtaacctgtaacctgcagactctgccggaccagtggcccaaagggtcctgggcactcaccatgcctccggtgcattctcgacagtcctgcaggcagctgacgttctcccaggtgctgtaggccttcagcccggccacaagcgcctgcagtgggcgactgtcgacgagctccttcccacggaagatgtcctcatccagaagggtgccggcatacctgcaagacaagcggagatgggcgatgggtgcagtgtgtcccgagcatacgtgctcatcagggataggggtctcacaactcctttgggttttggtgttgggatgctcctaaaattagttttcccttttctgaaagaatttgtgtaagatcagtgtgtttccttttttcaagtatttaatggatttcacaagcaatgtcaaagctattcaggttttctacttctttttgggtcactttcggtactatgcatctttcaagaaatttgtctatttcatatatgctgtcaaatgtattggcattacattaacatcacattaataataatgatatttaattttatcctttcagtgtctgtgggatctatagtaaagttctctcttttattctagatactggtaacttgtgtctatttttttctgcatcagtctagaaagatggtaccgatgatcctacacgcggggcagcaaaggagaataggcttttggactcagtgggagcaggcaagggtgggatgatttaaaggtctttcaattttatttatttattgaaagaaaaatagtttggggcttgtttattctctattatttgaccatttcttgtttcatttttattattctttgtacttactttgggtttaacttgttcatctttttatagtttcttaaaatagaaatttattccagtggtcttagacctttcttttgtgtggtaagcatctgaaggaatacatttttctctgagtactatcttagttgcataccacacattttgacatgctctgtttcatgtccattcaaaatattttctaatttcccggtgatttctactttgacctatgcatgatgtgtgttatttggtttccttgtatgtaaggatcattccagatatttttctgttactaatgttagcttaatttcattctaaccagagaacatactttgtgtcgtatcagtcattctaaatctacatggtctgtcttgatgcatggtctatgtaccctgagtgggtattctgctcgtgcccagcagagtgattgacagatgccactgagtctgtcagtaacgctcttcatacgatttacagcatcgctggtcttctgtttcatcagttacccagagagaagggctgacgtctgcaactatacgtgaggatttgctcatttcccctttcagtcctgtccacttttgcttcctctattttgatgccattttgtggaatccatacacatttagactgttacatcttcttgatgagtagactccttagtcatcatgaagtgagcttctttacctctggtaatgttcctttttctgaggtctactttatccaatattagtaaatccatgccagctcttttacagttaatgtttgcaggtgtaagttttttattctcatacttgtaacctatttgtctttaattttaagtgagtttcttgtagaaagcatctagttcagtcttaatttatcatatcttgacaatctgaaaataggagtgtttaaatcatttaattcaatgtaattattaacgtgacaatttaaaactgctgcctcacaagttttcccctgtttatcccatatgttcttttccctctgctccagtcttcttttgattaactgaataatctttagtattccagtgttatattttaaactgttactcattttttcagcaatttttctatggcctaaaacatgctactttaacttatgacattttccctcaaatagtgttacaccacttcaaagataatgtaggacccttgtaataatacagtacataattccttttcattctcccatccattatgccactgctgagacaaaaatatgttctatatatgttacaaacttcattgctatttttgctttaaactaacagtttctttttttctttatcaacgttactgaggattaatttattcccaacagattgaattattcaaagtgcaccatttaaagagttttgacaactctatgtacccacgagaatatcaccaaatcaacctacagaatgctttctaaagaatgcctcatccctttttgcagtccatctcctcctcctcctcccatctctggacgaccagcgaccagctctttgttcgtatggattagtttgcattttatgcagatggggttatacagtgcatgtcctgtctggcttttctcaatcagcatgttgtcatgagatccatccgtccacccatattgtaccacgtattagtagttgtttcttctcattgctggccagaattccattcaaacgcatacattacatttcatttatgcatccacttgacaaacattttcattccttccagttggagctacaaca

SEQ ID NO: 27381 - DNA, 1193 bp, Bovine  19866880503536
  misc_feature (1)..(1): n is a, c, g, or t
nctggcccccggtcccaggcctcccagcgagtaggaaatggccgaatgggtggggaagccacaaaagctgaccctcaggcacacaaaacccaccagagggcagggcaaagagagagcattatttttaaagacttgtaacaggagcctcaaagtttgctacagactccccagcccttgggcctctgcagactggaaccaaaaggagccaactctcaaaggcagggataagcccccagcgccgtgcagtccccacagagccccccaacagcgcagaccagcagcaccaggcccctctctagagctgcagcaaagatgcagtctgaagtctgccagaaaacctgcgagactctgtgtcacgctcacctgtgtagacgccagtgacgatgtctccctcctcgggacgcgggctgtccgggacccacggctcctctccttgctccagccggaagatcagatccggcttggggactgggtatcctggcccaaagagaacagggggcagctgcagggctgtactcgcaccccgacccgcacaggcctgcctccaccgctcctgtcccattccttccagaacctgcctccccacctccccgctggaactcccacacccccaactcccctgccaagccccctccacacaccaccgtccacagggggccccacccctctcctctgcctccggactcctcaccccttgaggcctctaaggggagcacagagaccagcgctgggccagccactccccaggacatggaacctgggccacggtgctgccgggccacagtgagcccctcgcgacacaccctggccggaagccaggctggtccccagggcttccctaggaggtgagcaggcaccagcaaccccttctccaggatcctcgggctccacaaaccaccctcagacagctaagccccaggcagccgtcaggctaggatgccccctgcggacggagggctctgctcacccaaggacaccaggatcccatagttttcccgcatgacctccttgtagagctcccgctgctctgcgtccagcctttcccactcctccagggagaagtacacagccacgtcttcaaaggtcaccagcccctaggaaacaaagcaccctggccactgcccttccctgagctgggtgagaggcaggggcgcacccccatgaagacaggacaggagatcacttggcgggaa

SEQ ID NO: 27382 - DNA, 1241 bp, Bovine  19866880527576
  misc_feature (1)..(1): n is a, c, g, or t
naaaaaaaacctttcagctagaatacatagatatcagatcagaatccacagtggccctttgtctgctgacctgagctcccagtgccagcctgggctgggccaggactctgtgcacttccccaggtcgcgtctcctgttgccgagggtggggtgtgcgtgagctctttggggggtgtcccatgttaccctgagcactgtcactgtctgtccccaggtcccacgatgtgaaaaatggaggcgaacttactcattccgcccacagccccggccagtcctcgccccgcccggtcatcagtcagcgggttgtcaacagcaaacaggcagcctcgggattcattggcccacagctcccctcgcacatgatgaaggtaacctcccgagcagagggtccagccctctactcagtgctgcagtggtggccctgacctcgtccacagctgagtttcgtatccacaaaaatggattcaggccgtttattagaaaatacttcaaacgtaggggaaatctctgaggacgaacaatgtgatccagaaggaagtaggggtatgagtctgtctaaacactggggatttgatctcccaccctggactccgttcacttcatggagtaaatattgaggggttctcgattcatgctggcctccaggaagagatgcttgtacagaaagaacagtcgcgttgcctccatttagccctttcaggggtgtgacgttttctgcctgctgtctggctgggccctatcacacccctgagggctgctcagagcgagcagagggtatgctttctggttcctgtgacatcagtgtcctcagtggaggcctggcttttgcttgacgtaaatgttgagaccgcagacgtgttgacatagcttgtacacaccgtggaataatcctgccacctgtgccatggtgtcataacagcctttcagtttgacagggagccacagcctcagtgctgtagggagctggccaggcagcaggtcctgtgctgggctcggcctgagtgacgtgggacaggccaactgcagagcatctgccctgtgtggaagggcggctgctgctgctgatttgtcaggaaatgtttttgcttaactatgaagccttcccttgtagctcagttggtacagaatctgcctgcagtacaggagacctgggttcgatccctgggttgggaagatcccctggagaaggaaatggcaacccactccagtatccttgccggaaaatctcatggacagaggag

SEQ ID NO: 27383 - DNA, 1112 bp, Bovine  19866880567929
  misc_feature (1)..(1): n is a, c, g, or t
naaccttctataaatctaatttttaagatgtcggtggcctgatatttcagaactgccctgtggctttcactcatgctaattaagccatctcccaaatttcaaattttaatattttcactgttggatgaaaagggtggtatttctcatccagtacccttcttttggacacttaattagactgttgtagagaaataacaagggtaagacgaaaaaagcaaaaaacaaccaacccacatgaatcttcttaaacatctgtttttgtttttttccccaaggtgtaaaaagatggttccagcttcaaagagattcactatacatagatcttctaatgttcttactctttctctgaaacgttttgcaaattttactggtggaaaaattgctaaggtgggtagataatattattaacaactgtttatgctgagcctttcaaggcttaactgcccagcagctacatggaagttttattacctgattttctaagttcttccagcacttgttagtggaataaaatgtcaaagaactgagctcaaagtttgctgtgtgtgtttacagagtgtgtgtgttttcgtctgtatcccttagctgactagactttctgaaggtcacacctggtgcttattatccgcgtttgggcgtcatagttggtgaaggtgctgagtgggttcagggaacgcttatggcatttcaagtccaaagatttcccagccagaccttgccattctttgaccagagtttgcttgtttattcgtttgttttctgattggtagtatactgacctttcccattttcttcccactttctgaaactgaaagtggtcagaaatccagtaacatgcggaataaataacctgctcctgaattgttaaaaataagcaatgacttcaagtccagacttgtgattgttaactgtccgctttgatgggtttggagaactcacatagtctggatccttacttgcgtaaagaaaacaaatacagggggattgcactaaagacacgtagagtcaggcgtctccgggttaggtctgtcttccaaaatgaggctgcggtgttgggtccctgctggagcaccacaaggcgccatgtgccctgagcctcccgccctgccctg

SEQ ID NO: 27384 - DNA, 2851 bp, Bovine  19866880605121
  misc_feature (1)..(1): n is a, c, g, or t
ngcatgggaggcaggtagagagaaaagtgaagggtgatggcctgtttccggactgtgtggtggggtgggctgaagtggaactgaccaagtcccagagggaaagcaggtaggtaatgcaggagacctgggtttgtttgctgggtcaggaagatcccctggagaagagaatggctacccactccagtattcttgcctggagaatcccatggacaggggagcctggcaggctacagtccatggggtcataaagaatcagacacgactgagtgattaagcacagggcatgaggttggaggtttggtgcttagtttggggcaggttgagtctgagaagcccctggggctttcaagtcgggctgttcagaagataatttgatatctaggcctgaagccccagacagagacaggcactgagagtagagatgtaggtaagggacttccctggtgggacagtggctaagactccctgcttcccaggcaggtggcaggggtttgatccttggtcagttccatatgccccatggtgagaaaagagatgtaagtatgaccaccacccctcggagtagatgggaagggccagggggtgtgtggactgagaaggagagagcccactgtcttctgacagatacctcaacgctgactgcctgcctgagcagtgggcatctccctctggactccactccacacatggaccacattcctaggctcgctccactctccggcaagcactgggtgcgccgtctacctgcatcaggtcttcctcccatcggccccttcccccagagcctgctgggcagcagttatgcgggtcaagtctggatgtgtttctctgcttgctgtgggacggcctctccttcgggagggttcttttgcatggaggaagaaagagagattgttcttccctgtgtggctgctcaccagagctggaggggagtaagcatgcttgtatacttggaagctcaggggttgacctccctccaccactgctttttagaaatgtctttaattgttaaatgactatgggcgcactgtaaaaaagatatatagctcagaacagaaacaaataaatatgatagactccctgcccctcatcctgctaatgtctttacaccctagtgacaattatctttccagatttcacacacacacacacacacacacacacacacagtatgtcatgctcatcaattggttttttgggtttataaaaatgtactagacatatttttacatcaaaatgtatatagctcaacttcccatttttcctttttcctataaaaatcttacaagtttatggtagaagatgtggaaattcagaaaaaaaaaaaaaaagaaagaaaacccaaatctgccagtatcctaaaatctcattacccaaagataatgattaacattgaggaaaacacaaaatttactttcactggacaatattagaagaagaaactaaagttcaaaagcactatggaacttcaagtagatttttcttcaaaataagagacactaatccttacacatttcttaactttaagttaaatcgagaagtttaagctgtaatgttttattttaatgatatgatttctagtttcttaatgactgctagtttaggaagaaaataaacatttctctggtaaaaatcaaaaggtacaactgatttctaaacaaacagactaaactcatctacctatgcatatatttttaaattaaaaataatttttaaaaaaagtaggcctactgttaggataacttgtcaagataaattattgacatattcaatcactttcaaaaagaacaaacacatcaggaggaaataattatcacttactcctgatacaaaaccgcacagatgatgtgtgagccccaagcactcaacagttaccagcttcttcccacaccacctgaccaatggcagcctggctctgtggaatgagaaagcagcatttcctacacgtctttaatggctcagaatcatgccacagtttagatcacattttatctggggtgtgactttcatgtcagctcattgcctttcccagagtcactaattacctttcttatccttgttgctcagaagtgctgcatgccttaattccatgatggtgcttagcatgctagcgtattccacataggattgactagcactgttttctttgaggttgttcttcacagactcttctgatgtctcgttctgattggagctaattgctcattaggtcagcttcgcagctgtcctactggtatttctgttcgttgttctcctggattagttctatgacttttggagtctgttgtcttctttcttggattctgttttcatttttctggggtacatcctcaaggaactttttcagaaaatgtggagtcccactccagagcctgggagcagcagcgccgtatgggggtggggaagatagatgtgagtggagaggccacttcctgtttctctgcagttttccccagctttgggtggtggccgttgttgggctccagcttgcagttggtgaagggaagacaaggaggtgtggaccgtggccccaggcaccctgtcctccaccaccctcagcctcacggtgagctcgctgcttcttgcctcagtgtgtctgccgctgggctcagtgagcaggccaggggcaggccatcaaaggcatggtggtgggagagctagctacagggaaaacctgcctactgatcagttattcaaacaatgaatttcttgaagaccatatccccactgtcattctgctaatgtcacgatagatggaaaatcagtgaatcttggcatatgggatatagtggtcaagaagattttgacagattatatcctctgtcctatctacaaacaggtattctctcca

SEQ ID NO: 27385 - DNA, 1226 bp, Bovine  19866880628163
  misc_feature (1)..(1): n is a, c, g, or t
ngctcgggccgggactcggcggtcgctttccccggggcgggggaccttgggggcgaccttcccccgcctcctgtcgccaagggcgtccacgccctcggagcccaaccgccgggtgaccaccctcctggcgtcttccccaggtggtgcggattgccaggggggaccccgggaaaccgggagggcaaagtttggaattggggataccccgggtccaggaagggcggccgcggagagaaggttgagcatcgtgacagttttcttggctttaggtccaagtggtcacgggggtcgtttaagtgaggagggggcagcgagggcacacgcgtgttagaaagtaagggaacgtgacggagtcagcggaaaacaataagtaaaaagtcagaggagacgagggtcggagtcgggaactgctgcccgcccgcaggtgggaccagagagaaccaggctgcccgtccgacgctcagtcacctcttgctggaagattcgctttgactgtaaattgtttagtggaatacagattcctgtcgtgtcatgctgcgaattacgcctttcaaaccgaataaggcgtctgcataatgtctatggatggagtgagtcgttggcttgggacacaaagggttaataccactgttttttacaggaacactggaagtgaaggatctctctgtgtgtgtttttgctaaagatctcctaaatgctgacagacggaatcatcagaatctcttgtaataagggagcgtttggggaaaagaaaaaaaaaatcttaattacaggctgccggagcagctgcctgtaagaatcagcagcattgaacgcttcgggatgaagtagttaatcaaggtgctttctagaatttaagtgatgctccagggggagatgtttgcctcgcagtaagccggcggggctgggagggtgggaagttggcccgagccctggcatttgcggagttcacttctcctggttgaagctaggggtagcactgtggccccgagtggctgtgttgtttatgatggaaagttctgtgggaagaaggagcccaggtgcacaccctcctccagccagactgccgtctgaagcgtccaagagatggattctccctggacgccctgcttcctgcctgtcacagctggggtaacggtacaggcagacaagcagctcctccttagaaaatgaagactgaaccactataatacttaaatgtttaacattcgcgtccaggaagcatg

SEQ ID NO: 27386 - DNA, 1594 bp, Bovine  19866880672802
  misc_feature (1)..(1): n is a, c, g, or t
ntgaaagtgaaactcgctccgttgtgtccactctttgcaactgtatactccatggaattctccagaccagaataatagagtgggcaaccattcccttctccagcgaaccattcccttctccagcgaatcttcccagcccagggatcaaacccaggtctccctcactgcaggcagattctttaccagcttccccaccagggaagcccagatgtttaatctcagaataatcctatgagacacctttattaagtgcattttacagatgaggaaactgaagctcagagaattttaggaacttgtctaacattgcactgctgctgagttccaaagccactgtttacttagttttttattatttacttttagttgtgctgggtctttcattgctgctcacaggctttctctagttgcggagagcaaggctactctttgttgtggtgcgtgcgcttctcgtttcgatggcttctcctgctgtggagcacaggctctaggcacgtgggcttcagtaattgcagcacacagactcagcagttgtggcacatgggctgagctgcttctcagcatgtaaaattttcccagacaagggatcaaacccacctcctatgcactggcaagcagactcttatccactgtgcacactcagctgctcagttcagttcagtcgctcagtcatgtctgactctttgcgaccccatggactagctgctcaggtgtcaccaactctttgccaccccatggactgtagtccaccaggcttctcgatccatgggattgtccaggcaagaatactagagtgggtggccatgccctcctccagaagatcttccagacccagggatcaaacccgtcggctcctgcattgcaggcggattctttaccactgagccactgcagatacctagcagacacacagcctccaaattgtacagcactcccacggtggccttggggccttctcagagtccctggcctcactgaccaaacaagagctcctcacaggcccggctccctgcgcgcccctgcggctcaccaaggccacgggaagctctggcgtgctggagtcccaaggctttgctgttcgatctcgactactatcaattaggacaacaataaagaagttaagtgcttttctattttccttacactcttagcttaaggcaaaaacctctcaacaagggcaggttacaggcccaggcggtcctgccaatacttgcttcactcataacattattaagacttaacaaaagctggaactcccccaccccaagacctcacagtcaaacatgacatcatcaggggctgctgtccaactcctaaaggctttctaaacagaaatgactcactgggcatacattttgttaaaagcttagaatgttaaaacaaataaaaaagaacctgaatgagattcaaagtcactacctggatgtgtgacccacaggcaactctaccacttactggctgaattttttaagtttcaacttccttatgccttggttttctcaactgtaagatgaatgcaaaactaccgactttcatcccaaaactatgtgagcactgattcaattttcagtctacaccaacaaactgcatggta

SEQ ID NO: 27387 - DNA, 744 bp, Bovine  19866880774358
  misc_feature (1)..(1): n is a, c, g, or t
ntctttccctgggaaaagatggaaaggacatcaaagaggctgcatccagggacaattccaaattacagggaccctcctgcacatcggtggacacagccataaggcccctcccatctaggtgcccagcctgagaccaaggtcaagaggaacctctgagaagtcacctttgagtcccttggcaccaggatttcagggatgctctgttcagccagctgactgaacagaggataaaagggtttattagcagggtacctggcaaggattagacacccagcaaatactaatttcccctcctctccttagccactgaaagccaactcataaacacagcagaaaccagaaaaacaaatagaccaacgcttacaacgtacccacgtgtataaataaatgtgactgtatttgaaaggcagcagcactcttcccagccctatttctcctttctctcgtaacatgcagtagcaggtagaaagatctcccgaaggttgctccaaagcccatgcgagtggatgttccggtaggcctggggctccgctgctgggggcctggccacgtggggacagtgctggcaccaggctcggtcgcctttgtaccactcgttagtggtctggttggtggcggccaggtacagacagaagcacagatagccccccaggaggaagctcagcaccacgacaaagcccaccaggaagacgatccttgggaaggtcaggaacaggtactggggacaaagaagcatcacgttag

SEQ ID NO: 27388 - DNA, 1020 bp, Bovine  19866880859627
  misc_feature (1)..(1): n is a, c, g, or t
ncttattgaaactttgtattaggcatcataaaaaacttaaaacgttgaataattttattaaatgacctttattaacattaaagggttaatgtttattaaccctttgacctttaatcttaataaaaccagattgtgatgcctatatcagccaaatttagggtggtgggttatttctttagaaactgtcttttgcttcttgcattttccgaactctcccattttttgttgtctgaaacttttgtttttctgatctcaagtgtgatacatgctaacgataaaaatgagaaacgctgcagagacatgtgtgagcctgtcccccagaatgaacactgctaacagtttgatataaactgctccagagcgtctgtttactgttggcactgacgggattacccctttagtctgttgggccacttgctatttccactccatcttgctgggcctgctgcgtgtcgtgcgtcagccagtttccatgcctgtttccttcctggtagatacttcgattttgtccctgttttatgctactgtaaataatgctgcggtgggcaacctctgtttttttgttttggccacactgtacggcttgcaggatcttagttccctgaccagggattgaacccaggccctcggcagtgaaagcatggagtcctaatcactggaccaccagggaatcccctgttgtttttttttaattgggggtggggagggcaatagcttggtgtgcacatgtgtaaaactgaacactataatgaaaaaagcctttttacataaaatttgcgcttggctttatcctctggaggcctctctccttttgcggacaagcggcagtgagtggtcatgtgctctcggtgctcttctgtccccaggctgctcagagtgtcaacaaggccttggagcagtttgtaaagccggaacagctcgacggagaaaactcgtacaagtgcagcaagtacgatggcggtgctggcgggcggggagggcaggcttggggtgacagggcttggcgtgtctgcctgaccg

SEQ ID NO: 27389 - DNA, 856 bp, Bovine  19866880895134
  misc_feature (1)..(1): n is a, c, g, or t
nctccctgcccagcccctctgcacaccctcgggcgcctgttgggggcgctgagtgggacgtgctggctggtcagacatgtaccaacaaggccccggcagggggaggctctgcgggagaggaggtgggcgctggactaacaggccccgataactgtttacctgactttcccaccaggaaaatcaacgagttctacagatgattattcaagaaggctcattccaggccttctgcgagcggatgcaccctggtcccacatcctgctgccctgagacagccgtcttacctagtctcctctgccgagcctttggctttgctgccgagtttgaaggtctctaagattttgtcttctggaagaggtggcaaaggagcaggcatcaactaggatagaaaaaaaagatgtttttcagcagtgagtgccacgcctctgcctcctgtaacccagccatgtgacccgctggacacgagggcagaagggaagcccgcctgcccgccaccccacagccgctcaccttcccagggaggccgtttgccttgggaaaggggtgttctgagtgcagcgcgggctggcctgggcaaggggccccgtccgagggcaggccgttttccgtcgggtcgctgtccagaccagtagcaccatttagagccacaggttcttggagctcgtgcggggaggcgtcgccgtcttcagcgtccagagcaggggagcacgcgctctcggtcagcccgcggccgttctcctggccgaggcccttggcctcctcgtcagactcctcggaggactcggcgccgtaggggaccagcacgccagcgctcagcctgggcctgccgttcatcagggccggagcaggcctccct

SEQ ID NO: 27390 - DNA, 1601 bp, Bovine  19866881006249
  misc_feature (1)..(1): n is a, c, g, or t
naatatgaaacatttaaatcacatggaattgtgtgtggcagaaagttggtgctgtttctgcttgtctcccagactttgctttgtattccttagactttaaatgcatatgtgtatatacaatctttctacatatgtttttcttttttttttttttttaacaattaggatcatattatatacactgttcaataccttgactttttatatagtatattgtagatatcttttttgaccgactggtactatattattctatatcatggtaccattgtatggatatactgtaattaattagcccctgcttaggtttttttttaatttcttacaactacagattgtctcagtaaacattttcataatacatttttgattgtttatgccactgtttttttagcaaggatagatttccagaggggggattccaacatcaaagggaacgtacatctcaatttttatagcagaaaacttggacattttggaaaggagctaagtgtcgttaagaaccttatcctctggagaaggcaacccaatctagtattcttgcctgggaaatcccacggacagaagagcctggcaggctccggcccacagggtcacaaaaagtcagatacgacttagtgacttaacagcaacaacaggagtacccgtaagagtattacttcattggctggcactgcacacacatacacaaaagaaccttacctctgatttctcttggataccgtgttgggagattcaactcatggattgttttgtcttattggaaggtgatatgagaaccttgagttggctgtgtaacttgaatcatacgattcttgtaaaactgaagtaaccttgagtccttgggtttgtgtgttttcaacaggagttcgccaagatggttcaggtgttacaggcatactgcatcatttcagcgggcgtccgtataagttgcaccaatcaggtcgggcagggcaagcggcagcctgtggtgtgcaccagcggaagctccagcatgaaggaaaacatcggattggtgtttgggcagaagcaggtagcggtgactgattgtataaaactgttttctccctcttgtgattatggcaagtttcttttgttccttttcaatagaatagagcattggagaagaccccgacgctgggaacatttgaaggcaagaggagaagggggtggcagaggatgagatggttagatagcatcactgactcaagggacacgaatttgagcaaactccgggagatagtgaaggacaggagaacctggtgtgctgctgtccatggggtcgacatataatttttttaatatttatttgactgtgtcaggtctctgcggcatgtggggtctcccttctgtggcccacggactctccagttgtagcgttctggctcagaagttgtggctcgagtgcttagttgctctgaggcgggtgggatactagttccccgaccagggctcgatttcacttcccctgcattgcagggcagattcttatcccctccaccaccagagaagtccttgtgggcgatgtattgataatggataagtaggagccccaagtgtttcgcttcgctaataaatcaaaattactctaaaactgcaga

SEQ ID NO: 27391 - DNA, 1529 bp, Bovine  19866881018951
  misc_feature (1)..(1): n is a, c, g, or t
ncctatcactttaatttacagttccagaagattgctacaaccatgtccgttctcagattcaagtggtttttcatatccttttggatagcagaatgattgactcttttttttaattggcagcaccagttgccgttcctcttactttttgttttgtttttactgagctcttgcatgatttatcttctgttaccatcctaaataaacattttattaaacctagaataaattgtctttttttcctgaataagggttttggaacatcctgtgtcaggatgggtttttagtctttgtttttcgattggcaacagctctatatagggccgcaaacatttgttcttcccttaatctaaaacctcttttttttttttaattgcagttttcctcctgattttgccattgtattgatttgctgcatattttttttgacttatgcaaaaacataggattttggtttttttgtgatgcaccataaacgttaaagtattgaatactaacagtgcttacaacaaaaagtagtagtcttgtttactgcattaaagtatcttgtgaaggaagggaactggatggatttgacttttatctagtgtgtctccaaacatctttctaaacaggtagtataactgcatagtttaacctcctgtccttatcgctctcaccccgcctccccgcccatgtctttgcttttgtgtatcagagtatctttctttcaggcattctagtttagtttctgttttcatcctttttggaagattctagtggcaaggaggaagggtgggaaatcctggcctacgtggagcagaccccagcgttcccaaactgggggccgggggagtcttgtttttgtgcatgtaaatcacacacgagctgggctcgttcttaggcgagcacagagcaaggatctgggacttgcggaagcatgggagtgtcgacacctccgccagccatctgcccaaggaaaagtaaagctggctgagatgccgccaccatcctgtggtcgaccagggtgacgtctccacaggtaccttgaggggcgcgggaccggggcagcggcctcacgcacgcgggaacaaaggcattgtctgacgcacctcactaagcactgtttctgaattactctcacttcctgaataaaggttatcaggtaattcatactttttatcaagctgttttatttgtgtgaatttgtgttttttctttaaagataaaaataaagcagaattaacagatttactcactaaataattctgaaaagatgctgggtgttggctgcttacagacaccaatccaacagtgtctagtccaatcacggggtttgaaggtttcccagggaattctctggcgggccagtgcttaggcttcagtgctttcactgcagtagcccaggttcagtgcctggtcggggaaccaggatcctgcaagctgttcattgtagccaaaaaaacaaggtttcctgcttccttacggtctgtcaaagagagaaacgggtagagaaaaagttgcaggtggaaagccttgctagggaagatcca

SEQ ID NO: 27392 - DNA, 1048 bp, Bovine  19866881087148
  misc_feature (1)..(1): n is a, c, g, or t
natgcagccccgcaggctaggccgcaaggaaatcccctgtgacctctctctccttcctccagctgcacggccgccactgccatgccggccaccaaccagggatggccggaggacttcggcttccggctggggggctcgggtccctgctttgtactggatgtggtggaagggagcagcgcacacgccgggggtctgcggcccggggaccagatcctggaggtggagggactggccgtggccggcctgagccgcgagcgcctagtgcgcctggcccggcgctgcccgcgcgtgccacccagcctgggcgtgctccccggccccatcggaggccccggcgcgggatccggctgcgagccgctgaccacagctttacgcatccagcgctcaagccgcggcctctatctgggccgcgagttgctacgcctggccggccgcaagcgcccagacgccgtgcaccgagagcgtaggcgcaaagcccaggagttcagccgcaaggtagggcgcgcagggcggggcagggccctaagggacaggcggtctggggtggggctctaggggcgctgttctgaggggctgggcactgtgggcccagagcgtcaggagccggacaggccctcctcaggccaggagtgggagtctggagctaaggaagcttctaacgaaagatttatcagaaatatagtgatgctcaagcttccagtcctgtccttaattttcgtaatttttgtttgcttgatttgtgggagttgcttttctttttctttttttaattgaggtaatacagatatacagtaaagcacattcattaagtgtacagtttaaggaactttacataggcatacacccttgtaaccaccagcctgatcaaaatgtagatgagtagaatacagacaataatattggtagaaagcagaacatagaatgattccttcaacccacaggttctctccatctcaatatgaagctccgagatttcaggtattagaagagagcaactcttaaggactctgggggcaagcggggcaggaagcgaatccctgcattttca

SEQ ID NO: 27393 - DNA, 1425 bp, Bovine  19866881100994
  misc_feature (1)..(1): n is a, c, g, or t
nttacctttgccgaacattttaaatgatgcaggactcacgagagaaaagcaaattaagaatacatcctataaaaataaaacacaaggagctgttggggagagtccacagcgaggaaagcgctttgtttctcagcgcagctgggggcggaccacgagcccagggcaacgcggcgcacggcggcctgctcccgacaccccccagcgcagccagccgcccagaccagacccagcgcgcaaagggcccgtcaggggagaaggggagtgggggagagaaatacggtcagctactcaggctccaggaggcctctgtcccccccttcccactcccaccggaattagcgtgacgctcagttcctgcacagggacaaggtcaagtgtcagggtcccacaccaatactattaaaacgttactacaaatggtccctttttcactaagctccctaccagaatgttaagtacattttcacaaggtcacagggttccagttaaactgcttcttacgaactgccatccaccctggcaccaaggccgggcgccccttgggcaggaggacagtctggggcggaggcggcatctcgctggcagtcagggctcctgaggccaagcatggcctctggagaacctgcagtgaatcgtggaagggcctaaacttggggacgatcctggtgctccaatgctcagcactccatactcccactgtggggggcgcgggtctgatccccggtcagggaacgaagaccccgcatgtcacgtggcatggctccccaaaaagtgaaatttaagtatctccctaaatgcctaagaatttctaggatgcccggtttatgaaacattgccctggaaaaccatgctacgtggtgaatggacacagtgcccgccaacacctgttcatccagttgatctctcgcacctgaaagggaaggaagagcacccacaagagctgctcgtcaacgacacgaaaggccagcgcatgcacgagtgtgtccgagagtccccgccacccgggctgatcacgacacccccaagcaggacggtaagctccccagcacgcagccgcgccccacaggccccgcaccggacaccaaagcgggaggaaggaaggagcgcccgcatgggtgagtcctgctcccgccaagcgctggggctgggtgagctgcagcgggggcctccgcgccccttccccggggggggccctgctcaacaccccacctggccctcaggaggggcaggaggcagttcccagactgctggactgcaaccagaaggcaggctgtcccgcaaaccccccaccttgagtagatcaaacaaagcactcaaggagtgtgaggctcaacaagaaatcctaggaaaactaagtgaaccgagagaagagataaagcttgaagtcgatcgaaagttttacatacggcaatcggcttctctttg

SEQ ID NO: 27394 - DNA, 669 bp, Bovine  19866881125533
  misc_feature (1)..(1): n is a, c, g, or t
nctcccgcattgcaggcaaattctttactgtctgagcaccaaggagtatgtgggataagccatataaggcatttacctcactacctaacacacagccagcacttaaatatcagctctcacaatcgctgaaattactttgctgtcattggaaacggtacaactgaacccctccgaactatgcatgaattgagagatcatctccaagccaaacacactggtttcagtacgtggactttgtaacatccattttgactgctcaaaggtcttttttggttcttcttacttcctggatctcagctgtgctccagggagacaggtgaggcctgaagactacagccaaagaggtggtgttattattctagaggcgaaaataggtagaaatcaatcaggtacatggaattctctgccacccgagtcatttaggactccatcttttactgtctctgcaaaaattaagttctttaattctccaaacgtttattacactgaggacatggcatcaaaaatatgtgtaaggaagactgtacttttaagaaatcatttaaaaattcgccattcttaagctcttagagctaacgaaacgcaaaaccgtgcaaggactagctgagaaagatgggtctcactgcctcccagcagcgtgtgcacgaaacgtgtactcgcgaggaggag

SEQ ID NO: 27395 - DNA, 1568 bp, Bovine  19866881178332
  misc_feature (1)..(1): n is a, c, g, or t
ntcacctgttcagagggttccccaattctcctatgttcagtgctggaactcgcccgggagcatgacctggtgttgatgacacgcccgcctttgctctttgagcgccggctcccagcccttgacggcagtcccacgtgtgcttcatatctccctcttagccttgatccgctttctctgggcccttccccagccatctgacgggttctcagcagagctgccctctttcctaagtgatgtcttctcttgggggcctggcgtgttaaagcaaatacggaagaaaaatgagaacccggtttccgagcagtggtagatgagagtgaggcactgtgactgtcctgccggcggccttgaacatccgggagcttctccccttgtcgtctcccagctgttccttaattctctgtccctttaatttcagacgacctgagaaccctgtgctccaggctgcctcataataagtaagtgccctccccagacttgcggctgggctggcataggggtggaggcggggtggggggtgtgcagggcagggcggaccccttgtcctggctgccttgggtagagctggtctgcagggtctagggcttctgtgtgtaagggaccccccaggacctgccgatcagtgggggagggggtggatgtgatagcgtaacgcacaggagaggaagccccagcagagcggccatcgggagggtgagaaaagcggccgtcttgctgggtgtcagtgaagaagctggagtgagctggagtgtcctttgatgttgttgttatttagtcgctcagtcgtgtctgactctctgcgaccccatggactgtagcccgccaggctcctctgtccatcgaactctccaggcaagaacactggagtgggcagccatttcctcctccaggggatcttcccggcccagggctggaacctgcatctcctgctagtgtcctgcctcgcaggcagatgctttaccgtttgagccaccacggaagcccctgagtgtccttcatcgctgacgaagtcagtgtgggtgtgtgttgtggtgctcttgtgtcaccattggtgacattatggtggcacagcccttaggggggcaggacagggacatgccctgggccacagcgtgtgggttaggccagcgccctgacattgggtgccacagaccaggttccgagtgcggttctacctgtggtttgtagtgacgctgggccgccttgtcacctcagtttccccctccgctgatttatgtgcctccagggtcatagtcaggtttaaacgaggtggcatttgcagagttccttgtccacggtgcccggcagtctccccctcagtggtcgtggttcttgtcctaatttgggggaaagccgtggtaaaagtggcgaggagcaggaaccgtgtggtcgcacagctgctggtaagaattccagccttgccacttcctatctgtatgacctcaggcatgttctcgctccctccgttttctctgtaaaatcaagaaaaccatggcacctgcctcgagccccccctgcctcccgtgccctgctcccgatcatgggatttttgtgacgattaattgagt

SEQ ID NO: 27396 - DNA, 608 bp, Bovine  19866881194014
  misc_feature (1)..(1): n is a, c, g, or t
ngtccccttcttctcctgccttcatgtttcccgcatcagggtcttttccatgagtcagctctccgcataaggtggccaaagtattggcgttccagcttcaacatcagtccctccaatgaacacccaggactgatctcctttaggatggactggttggatctccttgcagtcaagagtcttctccaacaccacagttgaaaagcatcaattctttggcgctcagctttctttatagtccaactctcacatctgtatatgaccactggaaaaaccatagccttgactagacggataatgtctctgctttttaatatgctgtctaggttggtcataattttcactttgctttaggaaatgtctaataaaaggactgaaatgacatgcagtgaggctgtaaagtccattttctttcttagggatgaatttaacattaaagttcttcaggcttttgtggaactccacgagtttgctgatctcaacctcgtacaagccttaaggtgagcattcatcccctgcgtgtgaagggaggctggttgggcgagtggctgggcggtgaccctgtgggtaactccagataccagagagagaaacggggtgggggggcgggg

SEQ ID NO: 27397 - DNA, 1440 bp, Bovine  19866881277565
  misc_feature (1)..(1): n is a, c, g, or t
ncaccagcagtatttaagcatcccattggatcctcaaccttgtaagcattttttttttaatttatctgttctgaagagtatatagccatatcacattgtggttttaattcgtgtctccttcctggttcatgtagcactgtgttcatgccttggatcagccatacagagctcctctggtgcaaagttcatgttcgtgtaaaaatatccccttattccatttctgcatgggcttccctggtggttcagcattaaagaatccgcctggccatgcaggagacagttcagtgcctaggttgggaagatcccctggaggagggcatggcaacccactctagtattcttgcctggagaatcccatggacagaagagctatgggattcagtccatggggttgcaaaagagtcggacacaacttagtgactaagcaacaataattccatttctgcacagcctccgatgcccttctctgttcgcatctacttaggtcacttaataaagaggccttcggcagagatggagaagcctgagccagaaaagaaggatgatcctgccccgttaaggactcgtggagaagagaaaagagtagtgaccatttccaggctgagagaaaccttttcccttcgtcactcgactgagaacaagtccccggggtccgaaggccactgatccgaggcggggtttctccgaagcagaaaagcagtgcccagtttcctagagctttggggccccccctgctcccagaagcacatttctgaacctggggaggaagggaggacttctgctcaggggccccacgacttgatgagcagagtggagatggaggaggactcggggcacggcagcgcatctgccggctccgaggaggcatccagcacccccgagacaagcagtcaccccagcactgaccgggtggcaagctcccccgaagacaaattttcccaagaaaatatggagtctcgggaaaagttacctgaaactgaccatcgtctctcaggcacaaagtgccatttaaaccaagaagaaagcagctccacatctggagtcttgccgcagcccacaaagctctcatccccaaatgcaaagcgttttacaaaagaagggattcctttaaatcccagtgtccttgcagagtcggtgaaagcccagagtgcgtcagctacagtggacgtagctgtgaaaattaacaagaaaatagtgccccttgatttttccatgagttctttagccaaacgaataaagcagttgtgtcagcaagaacagcaacaagaaagtcaacagaattataggaagtttcgggcaaagatttgccctggagaaaatcaagcagcagaagacgaactaagaaaagagatcaggtaacaattttctttaaagaactcttaccatgcagctctgcaacctgaaaccttgcaagaatttttttccttatatttcatacag

SEQ ID NO: 27398 - DNA, 1709 bp, Bovine  19866881421466
  misc_feature (1)..(1): n is a, c, g, or t
nccgccctcccggctccgaggacatccttctcgaagtcccggcctgcagctgtgcctggtggtccagccttgaatatccgcgggcagacaaggggccccacgtgctccttggtggcagtggcggtgttggccgttctggaagccgctgttttgtgtcataacaggaaaggaaaagctaccacttttttattgagtttttttctcagatatataggattatagcttttatatgcctttttatattctgaaattataatgaaagatactttctaacagtagtatttttagaatggcagctataaatttaacttctggacacacgtatatactgtgcactgagaacaagttacatatacacacatatgcagcaactggggagttgggtgcggtgctcaaggggaacccgagggtgcccccttgtggagggagatgcccgtgtccttgaggacacgcactgggcagggtagggctccaggggtccagtcttgtgagtcatccagctcagtcttcgtggccccacagataacttttctaaagacacaaatcataaactttggtttggggtgtttatcctgtaactgctgaatcccaggacggacagtgtatgtattgaaccacatgaaactgctcacatttgacccgtttctgatacccacaaacagcagtgtcacgtggtccaaccagacacatggttcaggccagctgtgacccctgtcttcactacttaaggcccgttggccaaacgaatacttacaatgatcagatatgttaatgtaatgtgtagacatataaggaactagagataatcttccgccgtgttttgagagatttgatctattacaggaaggggaagagcaggctgggggatgaaggtgtatagcacttaggcttttctgtaaatagtttaaaaccccaaatatgcactggtggtcagactggagaagatccctaaccaggaggttgtcagatgctgctggctgaaggagagatgctcaagcatgcggtgaggagctgggcccatcatgccgcatagatggcccaagggtgcacaggtggggcattcagggccaggccagtgacatgccttttaagtttcatttccaccacaaggacccctgcacattatatgtaggaccccctcgcccacatgggctgtttcggtggagggtcccttccctgggggacctctttccctgccccactgcgaagacacccaccttgttcagtctgtacacctgagaggtcatcacctctcctgtgcaaaagccaagttcaagaaagaccacctcagcctatgcatggagaggtgaaatagagaaaacgtttcctgggagttgccttgatgctgagactgaatggctgttggctcccagcctcgtgcagcttaaagtcacactagactgcaaagggggccacgcccaggaccctccaccagacatcaaactgactgttttggttcattcccaagcatttaggctttgctactgtaccgatacctcagattcaaacctctagttctgagaaaggcaagtcagcattcctgaaaactcctgactggcatatatgcaactctggctccagtcttccatgaaaagatgctgctgccgaccaaacactgctgacgacaaccggcagcgccctcccctcgggccagccacgctcctgggctgcctggggcaccggctccatcagtatttcgcgtgggacaa

SEQ ID NO: 27399 - DNA, 1010 bp, Bovine  19866881435844
  misc_feature (1)..(1): n is a, c, g, or t
nattttcctaaggggatgccaggccgcgcgctgacgccaggccgcgcgcaacccccgccaggttgccccggggcggggtttcccggcggcatggattaatgctggccgtgcctttctgatagatgctgtcggttcccgaatataagacccgcctgcgcagcctccacttccaggccaccctccaggagaagacagaggagatccggggcagcctggagtgcttgcgccaggcctccctcgagctcaagaacagccggaagcttgctaagatcctggaggtcagggccaccccctctcagatcagtctgcctgcccctctggcccctggggcttccagcttggaggcccatccccagaggggccagggagtgggggaggacctgctctcttgttctctccccagtttgtgttggccatgggcaactatctcaacgatggacagcctcaaaccaacaagaccacgggcttcaagatcaacttcctgacggaggtgagggggccggtcaggcagtcatccatctgtttgctctagcactgaggctcccaggcaggaagagctggctacctgaagccagaatgtaacagaagctaaggttggggcttgaaagggtggggaggcaaggtggcttctccaggccttggagagacagagtggtgggagaggaagggacaggggagaaggctccaggaggaaagggagagtctcacctggtggaatctgtgccctcaacaccagaaccactgtcaggccagtcctaccccagaaagatctagaaccagaaaaaggacaactcaaatatccagccttctccctgtgtgtctgggactttccaccacaacacctttggttgcttttttaagagaggaaggacaagtgcgtatagatatgaacggtttagggtgtctgaggctcagctgggccacagatggttccagaaaagcacaaagcggaaaaaccatgaatgatgctcccattttcgctggggttagaaaatcttgggctccatctg

SEQ ID NO: 27400 - DNA, 2640 bp, Bovine  19866880557324
  misc_feature (1)..(1): n is a, c, g, or t
nagactggtaggctgcagtccatggggtcacgaagagtaggacacaactgagcaacttcagtttcacttttcactttcatgcattggagaaggaaatggcaacccactccagcattcttgcctggagaatcccagggattctggagcctggtgggctgccgtctatggggtcgcatagagtcggacacaactgaagtgacttagcagcagcagcatgaggttaaagtatgtcttttaattagaaaccttggagtcatctttgagtctgtttttgtctctcatctactcactcaccttggtcaggtccttatgcctgaaccccaatctctgcttcccagttgttatacatatgcattgttacatatgagtaagtaaacataaatatacatatataactggagaaagaaatggcaacccactccagtattcttgtctggagaatcccatggagagaggagcctactgggctacagtccatggggtcacaaagagtcagacaccactgatcgactaagcacacacatatacacacacacacacacatacatatataacatctatatctacatttgtgtatgtaaacatacaaaattttatatgtgaatacaatatatattcatttatctctctgcctttgtttgttgctatgagacagtcatgtttccaaaatgaattattggtttgatctaaatgatgttcttactaatcacttctacagtggcataaagttagccaagatagagaatttagagcatagagagagagaaagagaatttgctgatggggaggtggggagaaatgggcacaaataggcaatgaatcagctttcattgaggaagtttcttctcactcaatagaacaaagattttgaaacagatattaggaagatgtgatgcagaagtatagcatcctgttggcttacgggtcttcacagactctggtaggagctgactcatcttaaccttccttcccctggaaccctaggaaacgccaggatccccagttgacaggcccatttctgaaagactgtacaactttcaagagtaaaatatgagtgattaaaaaacataaaggtactagatattaatcaatgtcatactggtgttctggattatcatatttctgaaaataattagatttataaatatcacatgctccttgattaatagtctaagtatcaacaacataccatcacatgaaagtgacgagtcatggcattagggaagcgatggaatctgtgatccacgtgtggatttggtgagcattctggctcatgggtggtgccagtcacacaagcctcacatgtgtgcccgccactgcaggattctgccttttataaactctgcccacattctgcctgggcagtacagcactgactaaaacactgaaaatacccctccctgccaagaagccagcagtcacttctatattctgtcttcctccctacaataaactcttcataaaaaatgtccaagcttgttctctctccaaacttcacaatgtgatttaaaacataaaataatctcaaacacataatatcttaaagaggaaaaacacacatttgttgggaaataggttacaaaaattctcttctgcacaagcctagtatatcattttttagtacagacctttacaccaaatttgcttggaactactagatgtgactacaacttccttatgcactattgtgtgacaatcactatgaaaactaccactttacaattcagttagttttaaaactcactgtcataagcaagaagaattctagagttgaaggaaaaacacaaaggaagtaatccaatagcattagatggcctcaaagggaaagaaaaaaaccacccaggaaaatacagaattcccatgtattgctatcttctctttttgcataacaaatcaccccacaacttatcaacttgaaacagaagcaaatatttaccatctcacagtttctgtgggacaagaattatctgggagcatcttaagacataacgtacatgacagaattggtaacagttttagagatttatcagtcctgacaagaatgcaatgactgcatttcagagttactctacagaagtcactatttcctcacacgtaaagaaaatacagttcacctgctcgttaatgttgatattaaaggcccacagatgccatctttcagggcctttgtcccaacgagaactatgtaagaagtaactagacctgcctcaccccttgactcagtaacataaaaagctaaggtataactggatcctctggacctaaatgaataggcatgtgtgcatgacaagtcgcttcagtcatgtcgcactctttgtgaacccataaactgtagcccaccaggctcctgtgtccatgggattctccaggcaacaatactggagtgggttgccatgcccctcctccaggggatcttcccacccagggtttgaacctgcatctcctgcaactcctgtgtcgcaggcgtattcttcaccactgaggcaccgaggaagacccctaaatggatagcaggaagagtcaattaggagaagacttttctttaagagaatccagccatcaccacagacatcacgccggttcagaggatttgtccccgagagagtttatcaggatgtaccgtagctcccagtcaacaga

SEQ ID NO: 27401 - DNA, 3497 bp, Bovine  19866880568008
  misc_feature (1)..(1): n is a, c, g, or t
ncatttacacttcccctgacatcaatgcctacgctagagcaggaagacatgataaaatcatccgtagaatcagaactagaggcgacggcagaaactgcatctgatcacttttaggcatctcagagatgactgggggagacgaacaaacaaaaataagagcacacacgtcaaatcaatgaaactgacttcatttgagatgaggcatctctaggaaatgatctttatctgagtagagcttttctaaaggggagatagggaattccagcttcctctggctcccaatatgttgaatattcatcttgggcaaccgaatgcaatttgcataatacggggcccaggtctgcagcaagaatggccttcagggaatgagaaagaagtttgcagaaagactagagcatgtctcagctcaacaggaagggaatccacggctcacattttattttccttgacaggattttcccagattttgctgaagaaaatgtatcatatttcatgggagtccccagagaacccttctgctctgcttaagttttagtggtgtgtgtgtgtgtgtgtgtgtgtgtaaaatgtacgtatgtatacattttttctgacaatatttaacaacagagttttaaagaattcataggaagatgacaggaaaacccaaataagagaatctcctctgaggctccatgactttaatctgtcagtttttgctcaagggataatggaaagaagtatttccatcttaagtctctattgcttggacctctggcagatgcgaattctaactgcattataatatatatacacagcacatctgaatgcaaatcacttgtaaacagtaaatattgcagaagagaatggaaaggtgctcagatggtaatacacattaatacaaaaccaagatttgtttacatttaaatgcgatatacattttgatattagaaatattttcccagtaaaaacacttaactcaatctcaattcttgttttttaaaagaactactctctcctaaattttctcttctagaattacatttactctgtttctttttgcaaaataatcttttataagaaactccctaagaaaagtacatttctaaataataatagaaaaggattacattaatatcaatcctttctaatagcaattaggtaataaaatttcatttgggtttgaaagtggacagatattactgcatttttcttagcctataaagtatcagcctattgtgttctttgccttacatttaaaaagaaggaaagaaaacaatctgcttatataacatcaaccacttaacagaaaacttaaaatttggaatatttgaataaagtggataagatctcttaaaaaaaagtcaatcccttcaaaatttctcaattttcgatgaactgggacatataaaaatatgcaaacacacaactttaagaggtaatgctcctcttctgcttgatacactgatacattaccaaacattgctgaatcatgaattaacagctcctaggcattgtcataaaggtcagacactaaagccaaactgaaagcattctcctttttgtggtggctgcatcgctgtgttggtggccaagaccttggatgtgttacttactgatgggtagaggtaaccttctccattcatggctacgtacaaccccgtcttcactccctggattgcaacgacgcgcagtcccactggtatgaggttgaacagtgctgcgaagagaaagacggtctgtcaccaacgggcaggggaagcagagcacctccccccatcacttttctgtttcatttattctatttgagagatattatgtccgttataaccttctgagaggctcccaattcattaccttctatctctctatttaagaagtttctgttatgagtaaagatagcacttgagctctgatttgtagatcttagcaggctccctatagcattctgaagaatggtgggataataaacagaatcaggcctgtaatcacgactccagcatcacagtctccgacaccatttgataccagaaaaaatcagctaggaagactctcaaagagcagagttttattttaaagatttttgttttttttttagtgtggaccgtttttatagtctttattgaatttgttacaatatggtttctgttttatgttttggttttttgctcacaaggcgtgtgcgatcttagcttcctgaccaaccagcaatcacatccgtactccctgaattggaaagtcttaaccactggaccaccagggagtcaccctaaaagaggagaattttaaaagcccaaattgagtgtttatctggtcttttaggtggaaggtttgcttcattactgcaatgttgtacaggcaagaagttaaaaaggtaattccaaagctaaattactcttgcagaaccaacacgacatgccagcagagcccagaaaagatgttcacctgcccaagtgctaaatttagaaagaactaatcacaccgaacggcgtaagaatttcagagagggaatcttcttcattaatatttcataaaattatgagtgaacacgaaaacaaagagggaagagtgttcaattttaccccctgaagagataagaatgtttccatgttctatttcttcctttattgaccaaaaatgtattcgtatgtaagtttcacattgcagatagcaatgttatcatgattttttttaaagtcctaattaacatccttaataatgcatttccttgccagggttatatatgactgtgtagtgagcattttagcatcattcctatttttccctttggccacatggcatgtaggatctcagttcccagatcagggattgaaccctcaccccttgcaattaagtgcaagagtcttaaccactgaatctcctaggaactgtctaatatcattcttggtgaagactgcttgaagattttattatagacacatttataagattatcattaattatgagaggttatctgctcctatttgcattcttaattcaagtctagaattaagagaaccatcccagaagaggcaatgaaagcactaaaatgttgaagtaaatgtacaaggaaaatatcttaggtttaggctcttgcttgtattccacgaagaataaataatttgaaagatgtgggcaattttgacttaaatctgtgggtctactcagtacataattttaaatggactttctacattgtgttctatttaattccgaggcacatggtttctctgatcgagttgggggagattacaccttctcttccggttactatatgttactgatcttgggatctcaagatgtctgtgctactcagatgatgaaatgagaatggctggccatgacccttgagaattatccctacaagaacattcaggggcatcaggttttgtgggtattcactttcaggatgcaaactagcattgaactgtcttctgtaggattctaggggcttataatacccttatggaggaatgaggcttctgttgcttatttctattatattatttaatgttaaa

SEQ ID NO: 27402 - DNA, 1263 bp, Bovine  19866880569448
  misc_feature (1)..(1): n is a, c, g, or t
ntccataggtttgcaaagagttggacacaactgaagccacttagcacacacatgtttttatcgctaattcatttacgactaaagaaagcagcatacaggtaaatttgagactttccttctgataatactttccatgatcgtatgaatgggagaaattcaagctcaaagtctggtcggagcagaggacagcatggtttccattcagcctggataagccggctgtacggaccatgctgctgtacaatacaaaccacacggaagaacagggaacccgtccaagctccagcagatactcaccctttcccgagcacaatatgccatctgccgattcacacagactattgctctgttcctctgtcaggttacacttcctcggatgctggcagagcgtcccgaaccatcctttctcacaaacacagcgaccgcaggaacacgtcccatggcctgcgaggcagtcacggggtggggcgagaggaggagacgggtacacaggccgtgagtcacactctttaaaggagacatatgtcaaccagggaaatctcgtttcctatcgaacaaacacactctccttaaccacagtcgatctggcatgtgagcctttaaaagaacttcacacccaagttctagctgaacacagtcctcttgaatgtcgcatcagagatggactccggagagaaagaaagcttggaacaaattaaaatgcaaggtgatcatcctttctggatacacagtagggcccgtttgcttcgtcaccaggatgggtccccctgcttgtcctcactgtgcacaccctgatacccagaccggtccactgcctgccacatttcttgatccctctcttatttccaaataaaaactgaaggttaacttccatacgaatggcatccaggattgtacacctctctccctgtgcccctctgtttgctaataacaacagatataagtgtaagtaatggtgtcttccgattgttgaacagaacttaaaaacagcaccaggcttagactcatattttttttccccttttgtttgtgtcactggttcctggtttggggatgtttatctttggtgtagatgcaacatgatatctgtgaccattaatccctggcatatacatcgggccaatcgctggccaccaacaccccacgtgattgcaccatcttccacgttcgtttctcttttttccaatcaatgctctgttctttttacctcgatgtgcatatcggaggccagatctctccaaagaaacaaacaaaacagctatt

SEQ ID NO: 27403 - DNA, 2751 bp, Bovine  19866880631124
  misc_feature (1)..(1): n is a, c, g, or t
naaaaaggaaatacgtgctcttctgctagcggcccaaacctgaagcagtgaggcttgtcttgctgccttgcttccttggcccccagtccacatccactgaagtcaccggtcacttggattctgatttatcaataccctctcagtccttctgctagtccctattccaattgctgtcagctcatctctggctgctcttctaacttgcattcctgcaggcagcccctctctgaccctctgacccaatttccctgtgcagcgaagagtgacattgaaagtcatatcgccttcagataaggggcaggcctgtcacgtgactggcagttttgtggtccgattcctctcgctgtccctggcagctccaaggtcctagccacagtgaattacctgcacctcctcacaccacctgtctgttaagtggactctgcctgtgtttctcttccgtgcatgtgtgctaagtcgcttcagtcatgttcaactctttgagaccccatggactgtagcccaccaggctcctctgtccatgggattctctaggcaagaatactggagtgggttgccatgccctcctccaggggatcttcctgacccaggaattgaacctgtgtctcttacaatttctgcagtggcaagcaggttctttactactaatactacctggaaaaccccatgtttctctccctgttgggatcaatcttctctctacacctaattctaactcagcctgcagttcttggcctagatactactcctttccagaaactctttctaggaattccctggcggtccagtggttaagacttcccttccgatgcaggctgtgggttcgatcactggctggggagctaaacaccaaaacacaaaacaccaaaacacaaaatagaagcaaacttgcagcaagttcaataaatactttaaaaatggtacacataaaaaaaaaatcttttaaaaaagaagaagctctttctgctcaaatgccctcaactgggcacaatacccttctgatagacccctggcaaggctccctcagcactcccgacccagacagagatcagtaggaaggggtatggtggaaagagggacctcctacaggtgagaactttttctaaaccctcccccaacccactatacctgcctcccatccttaaaagacctcacacatcttggcttacaagccagcgcctcagactttcctccacacactgtgctctcctgtaatggcctgtttacctctgagtcctccatacaaggcagtgagctcactgaaggaaagtaactctgtattttgttcatttttgtaattcccagcatagagtgcatttcaagcatctagtcagcacatacatattgatatttgttcttttaaaaacatccatgagtctttttatacccagttcaatgatttttaactctttatggtttcctttcctctgtgtttcttagtttattttaaactctgtgttatgatgttgaactcagtacatctgcatgtggtgtgtgtgtgtgtgtgtgtgcacgtgcgcacatgctcagttgtgtctgactgtttgtgaccccatggactgcagcccaccaggctcctctatccatgggattctccagcaaagaatactggagtgggttgccatgccctcctccaggggaatctttccaacccagggatcgaacctgtttctcctgcatttcctgcattggcaggcagattctttatcattagtgccacctgggaaaccatatctgactgaacccacagtttgataccccatgcaaaattgtggttcatattaccccactagactcactttcctgtacacttgaaacctacaaaacactataaaccaactatactccaataaaaattaaaaaaaaaaaaaaaaaacgacctggaaggaattttattgtttcttaatattttgattcagtaaagaaaaagtggaaacttaaacaaaggttgccaatgcagctggagctgtagcagccacaacgacagtggtgaacaacacttagtaagcacttgctgtttgcaaggcactgtcctaggcttacatttgttattcacttaattggcaccaggaccctatggaggaggaacacttaatgtgctcattccaaagataagataaccaaggtatagagaagcgaagtctactccataattaggaagtggtgcaaacctgagcagaccgacttctttaactaattaattaattacttttattgggaatgtgattgctttacaatgttctcttaatttctgctgtacaatgaatattactcagcataaaaaagaacgaaattggtcttttgcagagatgtggatggacccacgtctgtgatacagaatgaactaagtcaaactgactttcaaatccaggctttgaatcaatactaggttttgtagggttgaaagtgagctaaaacatggtattgtgaatgttttctcctggaatttttcccagtgggaatcacatagtcctgctggacttgtgttattaacaatgcataagttaattggctataccccaacacaaaataaaaagttgaaaaaaatgcataggtgtgagtgaatttcagggatttttccattcagggaaattttcacttttctctgaggatctggacccaaacagtcaattgcgtcttgtaaacaaagacatctagggtcctttcaagatgggagtcagccgtaggggcaagggttcaaggaaaagcccttcgttgtaggatgtccctctcttttgcagccaaaccctt

SEQ ID NO: 27404 - DNA, 1536 bp, Bovine  19866880747357
  misc_feature (1)..(1): n is a, c, g, or t
nagcaattcataacaattgttttagtttatccctaaggttaataactttcattttcattcaggtcataaattttaaaattgaagaaatggcgtataatttgttttcaaagcagtgagtgtgtgtgcacgctcagtcatgtctaactctttgtaacttcataaactgtagcccaccaggctcctctgtccatagagtttcccaggcaagaatactacagtgagttgccatttccttctccaggggatcttcacgacccagggatctaattctgggcctcctgcattgcaggcagtttctttaccatctgaacctctagggaagccccttttcaagagaagactagaaatctcaattttatttaagtcctcctgatttttaaatgtgggttcaattggttcagattagatcagatcagttgctcagtcgtgtccaactccttgcgaccccatgaatcgcagcacgccaggcctccctgtccatcatcaactcccggagttcactgagactcacgtctatcgagtgagtgatgccatccagccatctcatcctctgtcatccccttctcctcctgcctccaatccctcccagcatcagagtcttttgaatatgctatctagacaaaaatgaagggggaaaaaagaaaatatgtgtgcacagactttgtttcatgatgttagaattatgactaacagcaagcctgatttttgatagccctcttgcagtggcagtctggggcagaaagcaatattttctttaatttttttttccttcacaaaaatgaccttgatcttagttctcctcatgaaataagacttcactgtgctgttcagagtttttactttttgccggaaacttccaaggtgcctatctgtacgataggcagcgatgagttgtgacgtgtgtcctgtatatcaattgtcaacccaagtgacactaaaatgaaaagctgtcatttggtaccagaaaccgctttgctttatttcctattatttcagcgatccaaagggtgtgtaggtttgaatcggggctctttacctctgatataagggtttcaccagacgtaagaaaatagcttatagttcattgtaaatggtcatctttttattacctcccctaattctgtgtttcttttcttttgacctattctgcctgaattcttcttagagtctgtgttgttagtaagatgacttctggcttaatattccctgtgagaattacagatctttttactgtacccattttgatttacaatttgctttctcatttgtcacaaataaaggctaaatgaggcttcaataatatcttctatttagccttatcaggtgccatcattcattatactcattctctaggaaaaggtaatgctgtgttcattttgactttaaacgccaatatataacatatctagcttctcatttgaaatccagagaactttactttccaaatggatgaactggactcagtggcttcatgcccttaatgttcataaatcctaaatctgtaggacctttttatactgtaggtttcaggaacat

SEQ ID NO: 27405 - DNA, 684 bp, Bovine  19866880752778
  misc_feature (1)..(1): n is a, c, g, or t
naaaaaaaaaaaaaaaaaagcatagcaattctcagacgttgcagacatagagccattttgttcccctgtgggttgtgaggatgcattttccaagtcccatataaatccatgaagaattaaatttcttgagtttacaacatgcctttcattgagatttaggaccatagaaaggagctgaataaaactaaagctagacgtgtgatgcagtgcaagatgagatttagggcctgaggctatcatcaaatgaaggaaatagattcagaaaatctttttttttttttccttttctccattccattttcatttttatttagctgtaggggtagtagataattgctatttccttttagaaatgtagactagctccttaggtaagaatttgtgttccctggggatttgacactgaccgcaaatgaagggtatcattcaagtcaaagatttttaaaggaactcggaaatttttcagtgagtttgatgtgcacaaaggaaggaatttcagagaaaaagagtaacttcaggcagaacatcatggagagttttaaattgacaaattctgttctcctattctctaaatgcctcttagctcaatcttgtgccctttccctccttttcatgttgtcactcactttattttcctctgagtccctacagagacgtgaagctagtttccagagatgagagtac

SEQ ID NO: 27406 - DNA, 835 bp, Bovine  19866880779755
  misc_feature (1)..(1): n is a, c, g, or t
nttacttaggttagttttacacaaaaatatgactatactgtacctgtcaagtgtcacctttttaaaaaatgttttctaaattgcatcaaccaactggtaaaacaaaatctaaaaatatgtaaagaactactaaaacacactcttagggtcaatactttataataaaattttctttattatatttcttcataaacctcgagtttgttttatggcttctaggtttttccagtgattttgatgacctgtcttatttttttgtttgtatatcttccttagatgagaacaaatcagatttagcatattactcaagcgcattaaatttcacaagagaaatgtgtggttatagctgtaaggcagatgttatgatcctgtcaaattgctcgtgctaatttcgagccatgtcagggaggttgctgggagacgtaagaggagcacaggaaattacagggagcctgttgataacaacatgtccttgtaccgtcacctaagataatccctaacctgtcacattaccaatgctctggttaaaacagaaggcctctattgcaggtttgaaacttcccaggtggcgctggtggtaaagaacccacccgccaatgcaggagacacaagggacatgggttcgatccctgggtagggaagatcccctgaaagaggaaatggcaacccactccagtatttttgcctagagaatcccatggacagaggacgccacgtgatctatggtcagacacaactgaagtgacttagcatgcaggcacattatgttattaaatttagttctattgcacagttaataaactacagtatagtgtcagcataacttctatatgca

SEQ ID NO: 27407 - DNA, 1249 bp, Bovine  19866880786127
  misc_feature (1)..(1): n is a, c, g, or t
ntctgacaatctgtttgttacttctggcagaaggttctcaaaattaccttattttcctaaatatcctgcaacatattttaccattttattgaaagtcttggtcttctgttcctatttttattttctaaacagattcactcagagctggtaaccatgtgactggactcagaactgagtttcacagattgctacagaactagtgacttaattgccagtactcttgcttggaaaatcccatggatggaggagcctggtaggctgcagtccatggggttgttaagaatcggacatgactgagtgacttcactttcacttttcactttcatgtattggagaagaaaatggcaacccactccagtgttcttgcctggagaatcccagggatgggggagcctggtgggctgccgtctatggggttgcacagagtcggacacaactgaagtgatttagcagcagcagcagcagcagtagcagtgacttaattgtgcagtcctgagcgagctattgaagtctttctttctagttaaagatttccaatttcaacctcataaggtgtactgttttgttatgtgaaaggaaagttttttcctaaaagtcccattttataaaaataatgcattccagtgtcagaactgttaaaaaaggaaagtagcatgccttctttatctttcttttatatttataatcccagttaaagtcaatagatgtatatttcaaaaatgaaggcacatttcttcatcttcacctctaattcagttcaaggtgaattatgggttaattctctgctgatgatggttgttcccagagattcaaagtccttcactgaccactgtatccttttggttcttataggaagagttggtttaaggaccagagctgcttattaagtaggatgacctctggcttcttatgtggtagaatctatgtggctaatctatgtgtaaaaatcgtgatgttttctctttgcatgaatttaaaatttgacatgcacagttttgcagttacttgtgttttagaaattattttcctcatatataatgtcattgaaaatgctggaagactttccttttgaaagtctgttcagttatgatacaacaattgtagatagcttatatcaaattagcacttgattattccctccacagatttttttggaaattattcattttgtcttataatgccatgtgaaatttatttttagggggatagttcctacgtgaaagatcgctggtgtgtttttgatggattt

SEQ ID NO: 27408 - DNA, 781 bp, Bovine  19866880813686
  misc_feature (1)..(1): n is a, c, g, or t
natgttagagatcatatgactttggtgttcatctcataaaatgccttaggaaccacaaaaatcaacactcactttccttagtcagttaattctttagggccctacccacagctactagaatgagtctaaacctccacgcttttcatgcatgtatattgtgcattacactgtaaatggtgagaacacaaacagggcaagactcttttccccactggcattgatagtcagtatgaagtgactttggacaagcaaccaggaagagttttatgactcacaggaacaagactagcaggataaaaaaaattcttgagtcattgaattcaataatgtgctttgcttatcagagtgctggattagacttgctgttttatgccatactcaccattttttcctttggtgtctaagtagaacattattgaaaaataaataggagttattttgtgtgggtgttttctagtttgtttcttttactataaatgaatttcatttctcttgtactcaaataaaataatgttaatatacttctctaaacactctccattttggcaggatttcctgttccaaaaatgcattagggcaaccaagaattttattaatgcaccaataattcctggggtggtttgggggctctatgtagctctatggagaagggctattacttcaactgttcaacactcagaggctttggagcataaagacatttatagctataactgatccactgaaggaaatttcatatgtagaaatttgggtcataggatttaacatactttcagaagga

SEQ ID NO: 27409 - DNA, 2139 bp, Bovine  19866880814975
  misc_feature (1)..(1): n is a, c, g, or t
ntcattacacacacacacacagctaacttgctaacatgtgctacagcaaagcttacaattttgtacatggaaatttagaaacacagttcagttcagttgctcagtcgtgtccgactcttttcaacccccatggactgcagcacgccaggctttcctgtccatcaccaactcctggagctttctcaaattcatgtccatcgagttggtgatgccatccaaccatctcatcctctgttgtccccttctcctcccaccttcaatccctttcccagcatcagggtcttttccaaggagtcagttcttcggatcaggtggccaaagtataggagtttcagcttcagtatcagtccttctagtgaatatacaggactgatttcctttaggatctagaaacacagccaaattaatttatcagattaaatttttaaaaattcatttccccaagctttgattgtgcatagagtaaaagtctgcagttgatagcattctctaaaatcagatcacttttcaactaagaaaaacaaaataacaaaaataaaacccagagcatgctgactctctccactgatgaatgtgcctgcttctcaccttgagttttctggatgcccaaagctgcctgcagactgcaagcagccttacctgccaccagtcctacatcccccaaacccagcctgtcagtcaaaaggtcttcacaaacttgtaccatcatgaccttctcctgacttgagaagtccatgtctctttccatccccacatccctgtccatctctgattagcccacacctcactttctctctgaagtcttccactaaccacgttggtttagaaggacagctcttagtaggtagtatgtgtgtctctagcccacattcttcagctagtcaatcaagaatggccatcttctttgtccagtggctttcataaatgactattaagtcttttattattgttgagctgtttgctgtctaatctctggagaaggaaaagccaaccactccagtgttctggcctggagaattccatggactgtgtagtccctggggttgccgagagtcagactcgactgagcaactttcacttcagttttgctgtctaatctaccttgaaatccacataacactgtaaattctatcaggaaggaagtgccttaaactccctagtaaatttgggttctcacattgtctttcacacagaattggaatggaatgaagagttttccatttgtttccgtatcggtgggctgaaggactgaagccggtttttaaaactggtaaaaatgttggaatttctaggctgtgtgaaatgatcttagaaaaaaaaaaaaaaaaaagcacatgcttaagcggtgtttctgagtgtagtgatttcaagctcagctcttggtcttggttgtgctgctctttgtcacctgcgaccaggatcgctaagcagtgactgcagactgtggatcgtgttctcctctgtggcttcaggctcctcgacttgtctggttcttctccaggacactacgttttgttttgttttgtttttcccagggggcagagcaaatcagttataggtcagaaacgctttggggtgaagaagaactttgtgtcttgaagaaagcaaaagagtggatgtgagtgcacagaaccagtggggacgggcgagaagtagttctctgtcccatctctaaaggacttgtgccaaaatgcgctctctgagtaatgcctttcccagtggggttttttttccctcttctttttatagaaattaaaagtatgaatgtgatgccaaagccacaaaccacaaatccaatttaagcagaggaaatcaggacttaagactcaagcgtgcatttggaagggtgggggagggcggaaggaggctgactctcaaccaacttctcacagacttctcttcctcctgcccactcggcaccctgaaaacatgtccaaactgcaacattgcttattaaattagcatactatgactctataactctgtgaagttgaagtagaaccaaaagaaaatggaaatacaaaaaaaaagaataaaaagtgtaaagtccgtgcaaacttgctctcagacttgagtggatgaaactccctttaaaatgtgcctggcttataaacaacagggacctacggtaggacttcc

SEQ ID NO: 27410 - DNA, 1420 bp, Bovine  19866880856819
  misc_feature (1)..(1): n is a, c, g, or t
naccttctggtgctgcctttaaaatgaccggagtctcagaagggacttacccctgagctgaagcccagaggcttttgtttcttctgctagtcggctgggcatccagttgctaggggaggttgtttggcgagcatgtgggatgtttccgtgggagaaatggagatggcttgcttttcatcactaagtgggctcggcaggaaacactgaagaatatatttacgttaataggagtatatgtttgtccagcacattatattcccggtgcccagctgtatttattttaagttccctgttgttccaaagacgggtaagagaagcatgtgttttaggtgtgtatctatgtgagggtgtgtgtatcccacacatttgcagatttatgaccaaaagtttcaatgcttctttaaacaaaagctagaactgtattttttttaagccactccttgtcacagatagaaattgaagttaccggctcttagaatcaagaaggcaaatttctgagcaggatcagagaggaagttctaaggtagataaattatagagctataagagaagagacttcctgatgaggagtttggggacaatgatgttttcagaccagtgttgaagctgtttaagaaaatggactttaatttttcactttagcctagagccctgtccagccagacacgactgaagtgacttagcaacaactgcccagcaaacctgggtattataagaccaactggattgttttgaaccttgttgttccatggaaggtcacgttatcatgatttaacctgtttgcttctcccctaatttcatctgaatatcttttagaacccagttttaaccagctctagagctccaattctgccatctatttgagtaaataagcacagttcttctagataggattattttgatatgaacgatgatgaaaacttagtgtgttttctttaaatgtaaaccagtggattattttataaatatgaacaataaatgttctgaatcatatgagtcatgaagaaaggtttgctttacacttgtgaatgttaggatgggggtaaactttttaccagtgaaaaagacatctgagctgtctatttcaacatttgcaaccctggatgctcccttgacattcgtgagtttgcagtgatatgcaagcctcagtgatctgcaagaaaaatatatttgagggcacttttgctaccttatttttgatggaagaatggaaaagaaatagaatagaaggaaggttcatcaggaccttttcttttatccttatatattttctatataaagacatatattctttagtgaataaaatgtagataaaccctgtgagtattagaaaggaatcatttttaatttaagcaaaataaatgttgaaactatattgtgtaaattgtatattaatatataattacatgggtatatacta

SEQ ID NO: 27411 - DNA, 1537 bp, Bovine  19866881017091
  misc_feature (1)..(1): n is a, c, g, or t
ntaggagaaaaaaaaaaaacaaacaagtaaattccttattctgcttcagaggacctacgtgatcatatctttgcctgcagtcctgacctctgacccttacccatgtcactccaggcacaacagctgtcttctccctgttcctcccgttgtccactcagggtcaccgtgtgtccaggccccagcgatctctctccagcaacctccccatgcggacgctcgctccctcacgtgctgtctctctgtcctcctccctctcatttcatctaagcctgctgttccttgagcgtcccatggaaaatggagctgctcccacacaaacgttgtcattctcttctgctgctttattttactttcaaagagttttacactgcctgaaattgcatgcattttcagttggcctgtttattttgctttcgttcactggtctatgaacccccaagaagacaaaacttggtcacggtctttgatgtaccctcagcataacgcaatcatgatagaaacttcaagtttaaatgaatgaatgagtgtcatgcatgaacactgaataggggcctttaaaaaaatttaaactccttattgaatttgttacagtacttattttgttttatgctttgttttctggggctacaaggcatgtgggatcttccactccctgaccagggatcaaacccacaacccctgcactggaagggggagtcttaaccactagactgccagggaaatccctatagtggctttttaaggttgcattacatttctaaggaaatagtgaagagttgggaactaatacttagttgcttggcatagcctctttatcagcacatttacttatctatctaataacattgtagagtatctgtcaccttcacttaatagctgaagcctcagattttagaatttaaggaatttgcccaagggcatatactcagcaagagactgccagaccctgagacctggtttttagcttccaaatttgttaatttcatcctgacacagatgtgaaataaaacttacagaacttttaagaacttaaaagactttgtcagttcttaagtaagcgtttattattataagggaactctgattcagaagctgggatgagagaaataattaaataaatgtttatataagcagagaatcaaaccaccatgtgaattaataaaacctaattatttctcattcttctctggctctccgtctttccaatttcccttgattatgggtgtctctttaaaattcagtatgtgttcttttcgatccatagtttgtccttcagaaaattcattcttttttatggctttgcaacttaattttgcatttctaaaaccgatcttgtgcttgaactccaatcctatctcctaatacatagtgaatgctatcatattgtaatctaggcatcctgtccctaagcaaaggcaatattcctccaggaccaactggctctttgtcctgaattttctctaccactgacatcgtagtccagtcatgaaggagtcaccgtattaacactaaccaaaaaggagtaatttcatcagtt

SEQ ID NO: 27412 - DNA, 1033 bp, Bovine  19866881054362
  misc_feature (1)..(1): n is a, c, g, or t
ntgaacttgagcaaactctgggagatggtgagggacagggaggaccagcatgctgcagtccatggggtctcaaagagtcagacacgacttagggactgaataaaaacaacgtatctgagcttatagaagttaaaggtttgacaccttcccagtggtgtacagtgggattgggaatcacatttactgtagtcaaacagtatgcaggaaagactctaagagttaggaaagctttaaaacactgagtgggagaagtcaaaacttttgcttctcagaggagcatgaattctgtttactatgtatttctggctaagattactcatagcagacaccgtccacacatatactgaaagatcttcagagagcaggctttttcatctggtcaaggcagtgtatcttttgataatcatctgattgataaatttgttttactgaccaattctatggcatatatttccactgaatttctgaaacagaaatccaaaaccaaaaaatcatttggcagcatttattcctttggaaattatatttgaagatttatttatatttttctgcaatgtttaatcatgccaaataataagatttattaattatgtagactacattagaattccagcatgtcattaaagttttacaaatgaataaattaaaatccatgaataattcaaaaatctaatctccactgagctagcaatataacccaataaaattattcactgtaaactctccatgtcattgtcacccaaagtttggtctataggccaacagcatccacaggagaaattctcagatgtgaaaaatctaagacctcccccagaccttgtttaacataaatgactcaagatttgtgtgccctttaagaaggacagccctaaggatctataaagatatatagtaatttttttcaactggtctcctttccaaatttaggatcatcagggacctgaatcaaggaagaacattcatttatttttctgatctcctgagcccttagttcttagctggtgaaacacactttctagagaaaagtgtatct

SEQ ID NO: 27413 - DNA, 2034 bp, Bovine  19866881092834
  misc_feature (1)..(1): n is a, c, g, or t
nttttttctgaggaattgggactggtttgccagaaattcagccgagtgactactccaagacatctgttagctccctgtcattatcccaaccatcataattacacacccactgaaatgatcataagatacttcagggctgaccctgcaatgctgttagtcattctgttactgcatttgtgtcatgctaaagaaattctgagctgggatacgataggaaaaagaaaaattagtatttagaatcgtatcacttcagcgctgtaattaaagatagtctaacacagtgattcataatcttttctggcagaagtgtcagggtcatggtccctttgagaatctgatgaaagatacagcaatagatagtgctcttctggcctcccttcaacccgtctttctacttggaggcagagctgagttcagcaggagacagagccctccccctcccgcaatgatacccctcttccaggggactggtggaccgagcagggacacacccagacacccttggccagggcttggattcttgagggtgagagcaaggcacggggactgtggcagagtggcaagtgtgacagcacagccatgagcctccaggggcgtggaggctgacgctccaaagtgacggctggttcgtggcagtgccttgcttccctggcttgttgtgtgagcgagctgtccactctgagcctaagcccttggaataaaatattttttcatctcagtgaatgaagttggtgacctttattagcaatcaagaactctaactggtagaccccggatctgtccctggaaaaatacataccagcatgcatttatttttttgtaaaatgtcataaggatccatgagtctctacaatttatttaagagacgaggaaactcaagtacactgaggctaaatgacttgccgaaggttagcaaagtagacattagccatgtagccgtgttggtgttagaacccagattttctgagctgtgcataatattgcctgctctgcatgaacacactggtcctctcatgggtagatgcgtgaatgacaactatgatccaggctgtggacagaggcaaactacatacagcagcagtgagcgtagttgacgagtccacggcagacagacgtgggaaacaccagtcacaccattcctgagacataatccactcccggttaccagggcaacatcagttcttaagtttgagggtacatgtgtttatggtgaccatttaattaacattttgaggcatataataagtttcctgactacgtattactggtttctttgacaaccatgaacacactactggcatatgtgtttattttatttttcacttgaggaagaattaattaatttactcaatatctattacttagtcatagttcaaaagattgaacacaaatatctatcagatccagactcattaataaaattatggtatataaacaaaacagaatattatagcatgtgaggttttaaaaactttttttggttgctcctcacaacatgtgggattttagttccccaaccagggattgaacctcagcccttggcagtgagagctcggagtcctaaccgtggaaccatcagggaactccccataggggtttaaatttctacacttcactggccgtatattctacaactttctctataaaattcaacctagtgttcactagcctatttaaatttaatctctccataaaccctcccttgtcctccctgattagtttagtcacctgtcagaatgcagtgttctatctaatcccacagtacttagtccacaccattagtagatcactaaatgcaagctttttactaaatacatgcctgagccctactctaagtagtgatctctttgtttcaggctgtgggtggattcatgcactgacagactttattttcttgggctccaaaatcactgtagatggtgactacaaccacaaaattagaagatacctgcttcttggaagaaaagctataaccagtctagacagcatattaaaaagcagagacatcactttgcgaataaggtctgcatagtc

SEQ ID NO: 27414 - DNA, 2740 bp, Bovine  19866881242682
  misc_feature (1)..(1): n is a, c, g, or t
nttcctcttattagaaatgaaaatacctggaaatgttttattaatatagccagcagttttacataaagcaattggttcctgcctttcctgaatcattacttcagttctgaaattcagtatgtttcgatgctgctccagatgtatgtatttaccatttagaaaagaaagtgtgtccctctctagactccgtgaaatcaaattggcatgaaatgaactttggctccaaagcttctgctgacatttatttgcaaaggtttctgtggccaatattcctgctgccgaggtgacattaaacctggctggtcaccagggagaactgtggcttttctcttcactcattccgggtgtgagaaaaaaggaactacttcaggatatgccaaccttgtttgatttggctttttctgccccaagcaatccttgatatttacatttcagcaaaagaccaaaaaaactaaactaaaataaaaaactgaattcccagcaccagggagacaataatcagggggagaacttaacactgcctggctttttcttaaaatgtatgttaagtccctcttcctaaagcctctgatggtacatagataccttgtgtgctggggctgttgatgtcgatcatttttatccctggatttggggtatctttaacataaaatataaacatttatcttagaattctggttcccaatcttgactgggaatgctttttaattcctaatgctcaggctgcatcacagaccagctgatcaaaatgtctgtggttggaaccaggagtccagttttttaaacctcctaggtgcctacagtatggagccaagttcaagagtcactgtctcataaacccacatccccaagtgatgtcatccgtcttgatgtgtgtagcagatgaggaccctaggctacaggtctagatgttctggaaatgcatggtgttttcttataacttgatttaattttaataacaagttgcacactccaacctgtgtaattcggccactgtggggggaaagttgatcttagctaatttaggtttctttctttccctaggattgcaagtgagtttcaagggaattgaaactagctggagagggtgctagtccaggctgcttcttaaccccttgagctggccttagccaaaaggacatcagcatatctgtccagcgatgggtctgtggtccactgggtctcctaagcacttcccctccgccttgctccatcccacatgaagggctctctttctcccatgccgggtggtgtgtgaggcattgaggtgaactggctgaatctgccctgaagccccatccaacatttttctcttccgcatcttctccacacttgcaaagtggctcccacgaggtttgctgtttcagacaaaatgagagagatattgaatgaaaatattaagaaaggaaccagaattaaactggagcttctgatcagcaaaaccagagtctcctcttcgtctttagacaaaagctgtacattcctttttagttgaaaagaaaccataaaaagaagcctcttgtcttgaagcagttttttcacatgggaatgtttgattgaaaattatcattgataagtatattactatcaaagttcaacttcacattttttgctgctgctgctgctgctaagtcgcttcagtcatgtccgactctgtgtgaccccatagacggcagcccaccaggctcccccgtccctgggattctccaggcaagaacactggagtgggttgccatttcctcctccacgtttttttgctagacacgtctaatttgtctctgtttcctcaggtacctttgtcatttgtctgcacaggatgaatcacctttaaaactgtatcaactggtgccacctccactggatcaggcagacttgtgttaatcccattggtgcttcctctcttgtcattgagaaattctccctaattattgatgtggatgaattacttcattttagagaatgtttgaagctgatttatggatgatttcttaattagtatctttactgagtacgcctcagcttgtctaactcagttctgcataaccttggccttcagaaaatatgattctcccttacaaagtccaagttaaagatgcatagcttttctgtttctattgttgtaaccacaatatccactaatcatgtgcctgttatgtaccagacaccatgttcctactttacaaagattgtcttgtttagttcgacagtctccattttactgtcagatgaggaaactgctcaaaacacttgtccaggtttattcagcttgataatcacagttaggacctgcttcacactcttaactattagacttagacatacaaattaaggcagttcttgatgtttgaaatgtttttgtacacatatgcgtgtgtgtgtgtgtgtgtgtgtgtgctcagtcatgtccgactctttgtgaccccatggactgcagcacaccagtttcctctgtctttcactgctcccagagtttgttcaaattcatgtccattgagttggtgatgtcatccaaccatctcatcctctgtcaccaccttctcctcctgcctgcagtccttcccagtatcagggtcttttccaatgagtcagctcttcgcatcaggttctaaaaattaaatatgttcaaattcataatggaatttcaagagaagcttggaaatgttttggaaataaaccctttggaggtaatgtgatcggtactatcgagacttccacagaaagtgtcttgatcctgtgtctg

SEQ ID NO: 27415 - DNA, 2015 bp, Bovine  19866881259106
  misc_feature (1)..(1): n is a, c, g, or t
natatagatatagatatatagatagatattttttttttaagtctgactctgaaggaccaatgggatacaaaggttaagtagtggaggaaagggctattcttaagaaaattaatttttaagtattaataggaaaagcatgtgatcacattgggtaaataaactctccattggctttagtactttaggttggaccagatcattcatgaatttatgctctaaggttttgattaaagaaaccactcgtgttacaacaaacataagaatcatgtgccccatttgtcagtaatgctttttcccggtatggtagatgttgttcatttgtttatttcatacttcaggtttctacttctgcctttccctccctgaatgctcacgaaaaactaccacacctatgacaggttgcgtgattacttccccgctctgtgtgttcaatttgtgtattattgtatcatatgacatcttgaatcaagcactgctagtaccaagctgttatcagcagctgatgccagaaatattcatttataacacttctcagcatgcaagtgagagcccttcaaatcacagccgcctaatttccagtcattgttcttttcttctttgcatattatacggcaaaaagaatgcaaaaccaggggagatttattagaaaataatgccttgggaaaatgttgtaaaacattcgagtccttgttcgtgaaggtcgtgagacttgtgctgctttagaggcactgtcttggaggcctgttctccttcctttcttttttccccaaaggttttcaaggtggcggttttttgttggtttttttttgcagtctttgattacattaaagtgcaaaccatttagatgtctggaagtaagcaacaccctcagcagagaaccaggaaatgaggcgtggagccaacctttgccccagatgtggtccctgtgtgttaacacgtgggtcgggaccatcagggggaaccaaggcaatggaagagtcagaaggctttcttctctaaagaagggccattaaaaaacaaagtcaataagtaaggtttgtcacttcctcatatggggagtgctgagcctgcagctctcagtggatttctcatacatgaattcattttgcaaagtcaatgctgagacttggtggccaactgataagacaccagaggctgccatggtggagaagagagggccttcagtggctttccagacacctgacctccgtctgtcaccgttttctggaggaagaacctcggagcctactgactggtgggtgaaggggataccagaggtggaaacgtgggcttggcgaggggacagcaatctgtggacgctgtcttcctgctgcctgaaaaacttggggttcatcactttccctcccaccttcactgactccagagagactgagcagagggctgtggaagaggacgaggggagttttcatgtcatctggatgaataggtatcaagtgctctgcaaatccctggttcctgcacagtctccagcagagcgggcccagagccacccccgccagtggaaggaatccaggcctgttgctggggtctactgcgttcagaagagatgctcaaactgcctcttggctctcagtgctgtcttctgctctgctgttttttccataggttgactccatatttttttgtttttctttaatttttattttatttatctgtcttccctgggctttgccgcagcatgtagaatctagttatctgaccagggatcgaacctgggagccctacactgggagccttatccaccagaccacctgggaagctccctgactccagatttttcaaaatgtattcatgtatagatgcttcatattttgttgcatctcaggctcagtgttttaggtgaagtgatttcttctgtctggttttgttaacttttggcttggaaattaccaagtcttaccaaagccttaaagaaaaagctaagaattcatgtttgctgagcacttactaagtgtctgatagagtaaatacttcatatacgtgaaagcccaaaa

SEQ ID NO: 27416 - DNA, 846 bp, Bovine  19866881260202
  misc_feature (1)..(1): n is a, c, g, or t
ngtaagaggagtcatacaaaataaagtaagtcaagatgaaagaaagtggcccatagtaacatgcaaaatggggataagaatgcatcacaagatgcattttttaaagttttatattaatgtgtgatgggcaggtgaggaggaagttaaaattatatcattggggtttgcaatttggtgtatgtgttagattagaccatttaccatgattagcatatcatcagagaggtggcatgtttaagacttaaaataatgaattacaagaaatgttcaaagaaataatttatttaaacagtaaatgataaattttatgcaagctgaattaaaaccaaagtacactgggctaagcataactttaaagctcactgaacttaaatgctaacaattacatttgttttcaaatcttaaaccctcacacaccatatcagcttcattatgtttaaggctaagtcaaggtactttcttttctgcctttggagtagttttctatcagaagcaatactgggaacacagtttaatcaacttaatcaacactatttgagcaacagaggaccctgaatatatatctaagatgtattttattgaccaaaaaattggcaggtagagatgccagttcgatccctgcatcgggaagatccttggagaaggaaatggcaacccactccagtattcctgcctggggaatcccatggacagagcagtatggtgggttagcatccatggggtcacaaaagagtgaggcagaacttaatgactaaacaatgacaataacgatacatggagcttcaaaaaaaacaaaaacaaaaaaacaattaaattactccctagaaacatatttaataaggatgc

SEQ ID NO: 27417 - DNA, 975 bp, Bovine  19866881313342
  misc_feature (1)..(1): n is a, c, g, or t
nattttgtgatggtaaaacattctttttgtcttaaatttaagttgatctagacgtaaaatgcataaaatgtgagcctaactctacactcacaaatatgcaatatcggcaataagatatttataatatataatatggacatatataaaactaaagtggacataattttaaatttatgtggaatataattaaaaattttaaataaattttacatgcatgtattataattcatatttccattttattattatatgcaattttgaatataattattttaggaaatatatgcaaatggttttcaacttttaaaaatttttccttgacttgcattcttggtgacatttaaattttgtacactttgaacacagttacatgttgttttttaattctttagaacattgctgccaataaaatatgctacagaccttttttaaaatttaagcttaattagtgattttgctaaaatgaaatcaagaaaaataaaatctaaggagtaatgatatcattgtttctataaattacaaatgtgtttcttaagaatactaaatcactggcccattgacagaacatccaaaaataagcaataataatgaaattctgtcatcttgcattgtttgcttacacttactcacgcaaatcttatagattgatgggtattttaaaatcttgtctttatgaagacatatttgcttcccttgtggctcagacagtaaagaatctgcctgcaatgcaggagacctggggtttgacccctgggtcaggacaattccctggagaagagaatgacaacccactccagattcttggctgggaaatcccataggcaggggagactggcaggctagtcagtgggctcacaaagagtcagacatgactggtgactaacacttcactcctttgtcaggatagaagagagagatgtagtccctttcagtcaaggtagtccaatgagcttgacgtctgaggttaggggatta

SEQ ID NO: 27418 - DNA, 924 bp, Bovine  19866881372609
  misc_feature (1)..(1): n is a, c, g, or t
natagtttgaaggcatgcatgcatgtatcctggcagggtacagtccttaagagtcatgaagaactggacacttcaagtaacttagcatacatgcacagcttcaaaaaataaaataaggtgtaagaaattaagaatttcttctccataatgtgttttaaattatacatgcatatttatgtatatgtaatacatgtataattacataatgactgcattaatttttgtgaattgagaagaatagactagagcacctgtaaatcatttcacaattttaaaaacaaatttataatcctttttaaatagagacagtcaatatttcttcttaaaatcagattcaaaatgtcagctagaatccactttaccttggacttacttgaactaatatttcacagttcaggacaattctcatttgccaagaagagtttgaggtttgtttttccatcaataatgtcttcattggactttgaatcacaagcatttataaaactaccagtgttaaggggacactaaaacatatcagctgaagaattgatttcatttgctcccaactctgtccagaagggtaggttccttgtcttatttatttagacaaaacgtctctagagctaggaagaactatctgttcggttttacaagcttagagcaaactttctttcttttttttccattttgagtctatacatgtggagtgatattctaaatcacgtgtcatttaccggggcttgctttaatattccatgaactataattcagtttaaacaaaagagagcagtcagaaaaacacattagacaaaagttattcaaattatgcttaccgagagtattctgaatcatctctcagtttgttgtggcctttatttagctggaagtgctaaaagttgagtttaagtttacctttattatgactcataattttacatttct

SEQ ID NO: 27419 - DNA, 830 bp, Bovine  19866881666570
  misc_feature (1)..(1): n is a, c, g, or t
ntctgtatatatacatcaagacttgtttcttcccaactttccaaagtttgcaaatgagggttgggccttacagaatacgttcactgttatgacttgatctctggcctgaaggctcaatatttccatttttgtttctttttcattcaggttgcctgaaccccttatagacctcaagatcttccagcaaaatataatcatgacctggagtcttggtttcacagttcataaaaagctagatttttaggtaatagaaattcagagttacaaccgttctgactattatttcacctcacttgaaaagagataaggaagctgatcaaggccagattgaagctaagcctaaaatgagctgtgcctactcgttgaaaaatgttcccacactctagagactttattctacctttaaaatgctcttgtccatctcttcacaagactttggagactggagattttcagagtcttaacgtgttgatgtgaagataatatggaaagaaagcttttttcaaaactttttttaccctcaacagcttctctgggggaggaaaaagaggattttatctcagtcaaaagggaataaaactgttggccctgacaaattagggttggaggggatcattgaaatcaggaagtgggaaagttgggggattatccctaaagcctggatcagacaaggaaatcagctggaggcagtgcagatttaagtgaagatgggcacgcttgggtcaagggcccgggctgattggagcaaagagatagaacaagaagaaatgggaggaaatgttttaatggattgaagacagggtggatatgagtggaaaatctttatttca

SEQ ID NO: 27420 - DNA, 1031 bp, Bovine  19866881870600
  misc_feature (1)..(1): n is a, c, g, or t
nagatcctgccagacgggccgctgcctccttcgctggactgggtctcatgagtgtaagtggggcccgaccagtggagctgaatagtcgatcccctcttggcagtcctgtggcctgtgtttgtctgtgtctgtctgagaatcctttgcctaagtggttccctttctacgcacgtgcagtttgagccctgactactgataaaaacaagtcagagcactctacaacaaaggcgtggctctcagaggtcctgataccggtcacactgtgttagtattacatgctatgctaatcctaattttacaagcagaaaaagttcctacctctgagaggcacaaatagaaagaacaacacagctggggaaaatgctgactgagaaaagctactttttcatcacatatacaaaaatcaatccccatttttcacttgaagtagttcagtgtctagtagacttttggaactggagtttacttgtcaaatggtccatccaagataccatattaactttagctgagcttaaccagttttaggaaagtactttgttatagcctgaagctaaacattccagaagcaagagcagtaattagaatagtttcagggctaggggggtaagtttaaaaatgaaacgtgagatcttttcatgagttgtgacaaaaaagatatcctaggcataattgtgaatatcatgaacatagaaagtcatttacttctgctgctttgtagaaataattttgaaatgtaaaggggacaactgttttacaaacaactaaaaacaatcagattcttccaataatcatggaattaaagaatgaaatatggtattttctgaagcagttaccatgaaaagtcaatgaaatgccccaagtcttttttgtttgcactcagatcgctaaccatttactaaatgagcttatggtaaacacttccatgcctagaaattggaaagaaagtttttaaaagtacgacaaatacatttctaaaataaggtaacaccgtacctgaatgagaccaagaagaagccagcatccttcacaga

SEQ ID NO: 27421 - DNA, 1101 bp, Bovine  19866881891255
  misc_feature (1)..(1): n is a, c, g, or t
naatgttcttaataaccaaagaggaggtttttaattaataacattaattaaataattaattgaaaagaggagaaatgagtaagtaatgcaaaagatactttgaccaagaccctgaaaagatgaacattttgagtgattagagcctttcttgattatggcaacaaattctaagaatgagatctgataaggcaaatatacatgagttactgtgtatttttggcactttaaagagctacccaatatgcaggcgtgtccctatttaaagaaaatcccgtaaacaaaaatccagaattgtaagcacaataatttagtagttcttttcgttataaaatgcatccccacctaatagaacttgctattcaattcctaaaaaaaaaaaaaaaaacacctttaaggcacaattgaattcaggaagaaaaaagaaaaaaggaacatctatttttgaacaccttttctgaaggccatccataagaatcagccacattctgccctcattgacatttcaaccaggcggaccatggaacatttgctcaaggctaattgcaactgtctagatctgtaatgaagcctttcctggataacctttatgaattacagtaagtcaggctcccctctgagtgactggctagtcaataaacttctccctttgataggttattaaacatccactgtcgttgcattgatgatattctgttctcaaccgaaacctttagttaagtgatgacggcaagttgtgccctttctgattccaggctcctgccactgtggaaagtgcctttgttctgctgaagaatggtacatttcaggagaattctgcgactgtgatgacagggactgcgacaaacatgatgggctcatttgcacaggtgccgtatcaaccaaccctaatcgctctttgtcatagtcggcagtggagaccacactcactgtgccctgccgcagatggcagggcaggagagcctccttgcaatcaagacctactgttcattgaaagtcactacagaaggggaggggcattgattcccaaatccagaggaatgcacaagaataaagccaaattatatggctgttgggaaacttccacaaagtaacccctctccc

SEQ ID NO: 27422 - DNA, 1144 bp, Bovine  19866882066048
  misc_feature (1)..(1): n is a, c, g, or t
ntgattttggatctttattcatatatcctcaataacttgtatatactgttcaggtttatattattggagctaatccaaatatataagaagctatggatttaatcttctttacttgagtgctttcagattaagagacgttttttctgtccctaccatctatactaatgaagtatttatacaacagcaagaattgaaatggagccacattttaagtatttctaacctctgagaatataacacaatcatgttttcagtcactacgtcatgtccaactctttgcaaccccatggactgcagccttccaggtgcctctgtccatggattcctgaggcaagaatactggagttggttgccatttccttctccaggggatctctccagctcagagactgaacccatgtctcctgcattggcaggcaattctttaccactgagccaccagggaagaccaacataattatactctctttaaaataaactttgagagtttttttttttttttactgcatataactatctgacatgacataatgttgtaattaacataagtaatttgcttatgattaaagtggagtttatttcaaagagataatatttctattcattctattaaaatatatatattattttgttttttttttatttggtttatttatccagatatttaacatgtgtttaattttctttggtttgaggttttggggaaaggggggtcaggggtggggataggccactgactaaatcttttgcttcatataatattttgggctacaaaagcttgagaaactcttatttgctgaggttgcacagatcatttaggcaaccaaaattattttttttaaagtatgcatgaatgataggaaacttcccagataattgtgcattctcattttctttttgactatataatatgtaatttacatgttcccaatacagctgttacagataagacatacccatgaagctacaaaagacaaataaaaatagaaattgagtctacttgcctataaaatgaattctttaaaaggagcccgacattggaaacacacacacacacccttattttcaaaaggatctatatattttttctaaatgtgggaagcattggcccttggtgatatcacagaacatgaaaacctcactg

SEQ ID NO: 27423 - DNA, 1602 bp, Bovine  19866880390224
  misc_feature (1)..(1): n is a, c, g, or t
ncattatactaagcactttaattattatatatatgtactattaatgttaaacatacatgctaactatataaatgtctgctatatctatctatctaactataatatttcaaattcatttctcaaattacccctggtgctagttttcacctatctttggtttattttttgtttgtctgtggcggttttttctttaagatttttttgatgtaaataatttttaaagtttttattgaatttgccataacactgcttctgttctctgccttggtattttggctacaaggcacgtgggttctgtgccttggtattttggctacgaggcatgtgggtcccagctcccaaccagggatcgaactcacagcctgacactggaaggagaaatctaaccactgaatcaccagtgcactccctcccttatcttgggactctgttccttccctgcatccctttcgtcaccaaccagattcaaaggcatgtcatctcttccttgagttactgcagtcaacacataaccccgtgtcttgcaaagtgagctttctaacatacacaactgaccactgcttgcttaaaattcattagtgcattcctgctgcctatggggggaaaattccaaaaattctcatgtaatatacaaagtcactcactagctgattccctgcccagcctcagattccacttccttctctgctgcttccttttagctgtcccaccctcttctgaggcttctacacagccactgcccctcagtgcctgtggcagtcaccctcgttattctatacaaccctgcaaacccttgcagagaactacccagcccagaaaatcagatgccgctccttggtaagaaatctcaaccacactcttactcccgtcctgttacaggtgtcctcggctattcacttacaaggacacaggcttcctgtgaacaggaagacatcgctgtgtcttacagatagcctggcacatacatgaacctcatgtatgctgtacacatgaatgaatggacagataagcaaaaagcaagtgaataaatgagtaagtgcaggataagctgggctgcccaaatacatgaccaggttctagtgttgatacagaaatctcctggagacatgtcagaaatgggtaaacactgcttcatggactcatgtcaaatcattattgattccccagttcatatactagtatgatgatcttgacatctgttgacatctgcattattatgctgattttgacattttctgtcctgtatgctcagagcttcccagacatgatgtccaaaggttatgttagtcttaatatcttcagtgaaggcttaggagttcagttacaccagttgcttcctgatggaagagaactgaataaatcatcctctaagacaaataccgttaagtcccctacacacaaaccaattctgttctgaaagcgcgttttgtcagtccagcaaagttagcctaggtatccaactaacacaatcagttgtatagtactgtactgtaataggtttataatacttttcatacaagtagtacattaaaaagcaaacacaaaaaataaaggacacattttaattttttttttttatctttatttttatttatttttttt

SEQ ID NO: 27424 - DNA, 1005 bp, Bovine  19866880408146
  misc_feature (1)..(1): n is a, c, g, or t
ntggctacacactcaagcccctgttcctcctcatgctcctacttcttcattctagtgattattcaagctctcttcccactgcccatgtcccctggttctggaagcatcagatttccaagcctagacagccttggtctcaaaggatcccaggcagctagggacatctcccaccttggcatcccagtgagggaagaggggataaaacactgacattccccaggcaagctctccttcaaatgggccagaagatgggacatcaaagatgggtaacctgggtttgtccaatgggctatccatctgacagcaaatatctgagattcccctagacagtcaactcttttcctgtggaagccctgacaattttgcaatggcagttttcctgaagactgagcacatcaccatgcccaaggctcatgtgtgcagacctccagccaactactagatctagggctgaatggaatggctcgggaccttggtggctgctctttgtggcatggcattccaccaagcccacagggtccagggaacaaaacaactgtgccctaaatagaatcaggacaagctaattcccaaccccttttgtgtaaaaatagtggaaaatggaaacaagcacacagagcaaggatgctactaccatcctgtcccctgccccagaaacccagagctataaatcaccacgtcactacagtcgcacctggagaggatggtgtaaattcaggttcacatttatagggaatcaaattattgctttattcccagggagatgaatgagagtgacagagtttccagagttgtaaaaatagatggatgcttcctataaaataactcacagacgcctacgataatttacaagagatctggcagtctgggagcaggcaagtgaaattccagacagaataccacactattttccagtggtagagtaaatggtttggctattatgataatacatttcagcacagcaaatatatctccccttaatagaaatacattagacaccattta

SEQ ID NO: 27425 - DNA, 836 bp, Bovine  19866880472712
  misc_feature (1)..(1): n is a, c, g, or t
nttcccttgtcctttggtcgagagttgcaataacccgtggttgacttatggtttcaacctacggttgagaatatgtttcttatcttgtgccctgcctatgaaattgaccctgacatagtttccatcccgctcattttctcttaaaatagggaggaaatgaatgaagcattgtctccctcccacccaaaatgatgaagcccagagtggtaggagttcattctgagaactggacaaagtcagcaacccaccttttttgcaagccagcccaggctagttctgcctaagcagaaagaaagtgttagtcattccatcctggccgactctttgtaaccccatggactgtagcctgccaggctcctccgtctatggaattctccaggcaagagtactagagtgggtcaccttctcccttctctttttgacccagggattgaacccaggtgtcaccatctgaaccaccagggaagccctgagcagatagaggggctctcaaaaccaagaaggaaagttgctttgtagttctgacctgaggctgtggttgacttcacactatggagactgagttaagttggcaaatttctctccattatcatccatttggcaactcctatagtctgaatttgtgtcccccaccccagccccagattcacatgttgtaatgccagtgcccagtgtgatggtattaggagatggggcctttgggaggtgattatgaacagtaatgaaggcagggccctcatgaatgagattgatatccgtattaaaaaggcctgagaactctcctgttccttccactatgtgaagacactgagaggtttgcaacccaaaagagagtt

SEQ ID NO: 27426 - DNA, 903 bp, Bovine  19866880517174
  misc_feature (1)..(1): n is a, c, g, or t
naaaatgtgttttattttaattccatgattgttttcttcccctggacaaatattttaaatgtgtatgaacccccaactgccagtctttccattttcatttccttcagtgctttaaaggagagaaggatctcatctctcagaatacggataaacattctgctttgtattgtgttccttttccatgactcttacgttttgctcctccatccatctagagtttattttcgattatggtatgaggtatgtaccttttgtttcaaatgtctgtcccttattctttcaaaatgattttggaaataactttctcttatttggagctgttcaatggaatatattttgtacttttttatacacaagtgggcttgttttctaggctccgtgctatttcctattttttttccattttcttttcttttatttgttttttttttttttttttttaaatcattgaaaatgacttttgacgcaagtccccagtctgcccgagttaaaggcatgatgaggaacagggcacagctcggccccctggggagtcaaagtgggtggggcagtcaggtggtgttttgcagtcctgtgagttgttttcagaggacctgagaccccaaggaaaggtaaggaagtgcccgtttctgggagagtcagacggcagtgaagagatgaccttgatcttattggtgggcaggggttctcctctctagagaagacagaacattggagagagtgagcagcacatgcaggagaactggggaagttcttaatttgggggctggggaaacagcacagaaactttgggctgagtgatagaatctccagagtgaatcatggaagaggctggagaggaaggaggaagcagattgtggagcatgttatatgccaaacctgccttgggtaggaactttcatc

SEQ ID NO: 27427 - DNA, 1690 bp, Bovine  19866880518964
  misc_feature (1)..(1): n is a, c, g, or t
naaatatttaaggaggaatgagtaggcaggttcggggaggaccctcaaccctcaccccttgtggtggcagctgctagcttggccacaaaaagccactcctcagcccgtagtcaccctgagaattccactccagggggcagctacagaggggtgctaagctgctgatttttagttactaacttttgggttgaaaggggaaagaaataagatgaaaaggagggagaaagaggatgtgtgtgggggtagacaaggaaggaagcagacccccgtgaaacaggccggggggacagagagccgaataatagtcacatgcccactgaccggggcctctcactttcctgtctctactggcaggacgggctttccaaggctgggaccgtgagcgaaggatttgttcatggaaatccaaagggagagataatgagactggccggaggccccctctcatctcttttctggaagctctcactcccaggggcccctttcccctccaagaacctcccaggacctggatttcattaaataccaggaggtaaaatgctttctaagcatctgtgagatttgaactcttacaagcccgcatcagtggttctcaaaactcaggccttggacgggcatcgctggcagcgcctgggggcttgttagagcggcagaggcagctggattcaatagcagtagattggaaagtgtctctccttcagtagttaccctcgtctgctgatgcccagctaaactgcccttgtcctgcagaagcaaggggagaccaatattgaccaagcacatcgctgtgccagggatggcggcaagcacctcattaagacacctctgttctgcagaggtagagactgaaggtcagagaatttcaatggcttgcccaaggctgcactgctaggaggtaatggggctggtgtctctgaacccaggtctaacccctctcttctgactgaacagtttttctggagaagccgtcttccttgggggagcctccctgctgggaaactgagtccaggaggccggtcagcggaggcagtgtcttaaaacgcttaaggccctttgagcagagcagctgttttcatgtcttttgatttgggggtatctttgcattctgaaaaattatcttggacctcaaaaacctttttttactgtgtgtgtgaaacccagtgatatttgccagagtagagactagagctaagcaattcttaaaatattaattcgttgaaggcctgatgctgaagctgaagatccaatactttggccacctgatgcaatgagctaactcattggaaaagaccctgatgctggcaaagattgagggcaagaggagaagggggtgacaaaggatgagatggttggttggcatcatcaactcaatggacatgagtctgagcaaagcccaggagatagtggaggaaggggaaatctggtgtgctgcaatctatgaggttgcaaagagttggacacgacttagcggcttaaaaaccacaaacaacaataaacccattacatattaacataagtaatgtgtttgggggaaaaaaatcaacctagatttttttttaatagtgagaaaatggcattgttgtacagtttcgtaaatctctactatctggctgcattccatagctgcatctaatctattgagatatccaatgtcatttagcttctaaaaattccactgtgggcttgtgag

SEQ ID NO: 27428 - DNA, 789 bp, Bovine  19866880568468
  misc_feature (1)..(1): n is a, c, g, or t
nccctgtcatcctatctctcttcactctgtcctccaccattgcagggtggccaggggtcttcttcaggggatcttcttccttttctgtttgcccatgagcccagcaaaatagttggtagataaacagttagtgaatgaacagataaaaaccctcctgtcttcccaatatattccttccactcttcttatgatcaaaggcatcatttatctcctcttgcaattagaacatcggtgatggcacctccacacttaaaaaggacaggatcctgaacacaactgcctactgtctcccttgattgactaatctgagctcaaattctgaaggctgctggggtccagtgcattaaccaggcccaaattctcttttttccttccctcctcatcaagccctgcctatactcctaggaaagagggatatcatttttcgtaacagcaaaccttgcaaaacaagatatgggctgaagaaatgagatgtatgaggcccctcttttggatctctcattattcgggaaaatgcacactttgctggatggcttaattttctctgtttgagctcaattcatccaggaaggagcagcacacctcattaacttactttccacacagagcagtctccgaaacgaactgcccacttcagcacttgagtctgcgtgcaccctgcctatcaactgtattggggcaattttcatgaatcaagactcagcctgttccatgcacagcaagggttcttacctcggggtccagggagccccaggaaaagctccagaaattagatacagggtgttgtgg

SEQ ID NO: 27429 - DNA, 2288 bp, Bovine  19866880582014
  misc_feature (1)..(1): n is a, c, g, or t
nctgtctccctgtctccttctctgtctgtctgtctcccctcctctcacccccacctcctcccagaacggcgccatcatgaacagaggcacaggacgctgcctggaggtggagaaccgaggcctggcgggcattgacctcacgctccgcagctgcacggggcagaggtggacgatcaagaactccatcaagtagtggggggagccgggcccccgggacagggcctgccttgctctggaccagccacactgggagagaaacagcaagacaccggggggtgctcagtggggcttctccagggcagcctggggcccccggtggagactctgcgtcttcatcaggcatccagcttcctgaggctcatgcacccagggaaagacccctgaccgttctctgggaacccagaagccgtgtcttctgcagcccgatgtggatctggtaccaaggagcaagacaacacacctcttggtcatcttcccacctgccgtcaggacgggactggcaggggccactcctttttctcatctcacagcagcttctctcctcagccttcaacaaaggggagggggctgggccacatcctagctcctcctcctccaagaaggcagcgaggccctgggactcagtttcccccaggttgcctctgcccagatgcccatttacagcccaagatcaccaccccaaaccttccagccggtggccttggactttgctggactcccacccctgagatgacctgggaggatgcttccctggtcacctgggcgccaaggtgcctatgtgccagcttttccgcttgtgtcctcaagagggagccagagagcatacggccggcctcggctgtgaggggccccggctggagctgttctgccctgcctgcccagggaccgagcatcccccagacacgccgttaactgccgccgcgggggcgccaaacagcctccacctggaacttaaggactgccatcagcacggcacggggggccaggactctggagggtgctcatctcgtgtctccccgcactctgctggctgacgggagaaggcagccgagtcctcgcggaagagtaatcctatttttccgattgccctctggttagggtgcacttataaatcagagttaatatatggacgcgtgtgcatgcgtatgaaggtgtgtgcgtggtgtgtgtgtgtgtccgggtgtgtgcgtctgagtgcatggtagaagaggcgtagaggtgtgaccctggacttgtcgctttattgcccacccggctcaggtcaaggatgcgaagaagcttgcccgaggtgggggagggggtggccacggtcattggccgggaggacgtggctgggccttgcccgctgtgccgccccagatggaaggctgcccttccgccggttcccatctgtctccctcatgctgtccggacaagcccggcccagaaccaaactctgtccctgcccagtttggggttcacagtgtctcatttggtggcatcttactggtgaaggttccccccaacttgtgaaataaatacatgtgagcaattcccaacgcagcctggttcgctttttttttttaatttttaattggaggataattgttatgttggtttctgctgtacaacaacgtggatcagccataagtatacatatattccctccctcttgagccttccccccacctccccccagtcccacccttccaggtcatcacagagcacccagctgagctccctgtgttacataccagcttcccactagctgtcatgggcttgtctgatggctcagtggtaaggaatctgcctgccaatgaaggagacatgggttcgatccctgggtcgtggaagaccccctggagaaggaaatagcaacccactcccagtattcttgcctgggaaatcccatggacagaggagcctggcaggctacatttccccggggttgcaaactagtcggacacgacttagcgactaaacaacaactagctgtctattttatacgtggtagtgtattatgtcaatgctactgtctcaattcatccccccgcctccccttgctgtgtccacaaatccgttctctagtctgcctctctgttcctgctctgcaaatagactcatcggtatcatttttccagagctcgggccaggaggcagttcctaggacttggcagagggcttctggttgattaaaggcaaagatggttcaccccgtggtgctgggacacagccagcctgcccttgcactcatctccacccaaagcaggacagagcttgacacttggcatttgcttgctaactcccta

SEQ ID NO: 27430 - DNA, 3113 bp, Bovine  19866880614301
  misc_feature (1)..(1): n is a, c, g, or t
nttttcttattactttatcatgcaaacattataatgaggatggtgattagcagctactgtttactgaattttatactaaatgccgggcccaaagggagcatacattacctcagctctcacagcacacttaggaagcgtcaggaaagcagaggggaagcagaccggatggagaggtaagtaaggagtcaaaccaagcgtgaatctggaagtccaacccccacccccagtgacttactctcaagctctcctgcctgactgtaagcacctaccccagggggatggagaagtctaaaagaatgggcggatgggccgtgaacagaacgtggagggagacgaggtggtaacactgccgttttacagatgacaaaacggatgtgagctggtgaccaaactgggatatgacctctagcggcaatactggagacactcagaaaggaaaaacaagccctcctgtttccaccccacgaagccgtcgttctcattctctgcacattccttccaggccctattcatatgtacacatctttataaataaatcacagttcggacagcatcttacattatgcttactttcacttataagaggttgctattaatatttcagatatatgcatgcttctacatggtattcataattataatgttaatgaatgcatgatactctgattcaatgtaccatcatttcaacggccattccattcctgttggcctttgaggtggctcccaaattcttaatattaaaagcaatgaggcaatcagcatttttatgcatgtggaactttttttttctttcagattgatggccttaggatagattcccagaagggagattactagctcagaaggtatgaaatatttttatggctcatgagatgcacttccaaatggcttttcaaaagtgtgactctaaatttacaaggccaccagaatgctgggagcctatgggtcctggcaaaattttaactatttcggggaacaagtatttctttgcaaaaatttctcctctcgaaatttcacaattcacgctagccttcacctactggtttcctatgcttttagagtgttttctgccctttattttttcctcaatttttttcatttccagaaagctaatttgaaatactgatttacacacagggtttcatttaattatctctaggctttgcccatcagagagccaaaaatcccaaacacccaactggtgcagtccccagtatccacagaaccgttcatagcaacacaggagtaacacaagccttcaggggccccaccacttcccagccagtgtttctccaacggctcgcagcctggggctgtatattctgcctgcctcttcctttcccagcagcccaaggatttgcttgcagggtctccattaatgtggacaacctcagacccttgccctcctttacatcttgggtgacaggcagtgcaaaggaaaaaatggcccagcagtccccacatcaagttggttttgaaaagagcccatcttttcagcacatactcttaccagggctgccacagaatcctctcgattactatgcagagtgcattcagttagaacaaaccacagatcgcaatcacacgatttgtgggctgtgacaaaggttccacacagccggtggggagaagacgagggtgactggatgcccaagactggaatgtaattactgaatggcttgttgtctatgactccataaacaacaaacacctgggggatttgggagtgtctagggtggggctatgggacacggacgaattgcttttccttagaaatacccatttcttcatggggcagtccttcccaacagatggatggtttctttggttgatttccaatccaagttttggcaatgttaggcattccacaggctgtgttcattctgagagcttcatccccacaaagctctcgtggaaactcttttattcgtcaccccaagcctaagaagttggaacttggactatcaccattttacagatgagaataaagaggctgaataatctgctcagctcaacacagctaacaaaaagcactgtgtgcgtgcgtgctcagtcgcttcagtcgtgtctgactctttgtgaccccatggactgtagcccaccagagtgaaggtcaaatttgtgtctctatgacttcaaacctcagctcctgccctccaagctcccactctctcctaaaagaatgaacaagtcccagaatgggatgcaatggtctcagatctctgagggctaggaagagctgacagggtctgggtgctcagtcaaagccagaatgacaatggcaagctttctccatgatgagagcagacccatgatgagacacccaagaagaactgatcgagaaaagtccagacaatgcctgcacagccaggagaaatctgtactgaatacggatgggcatggcgtggtgggggctggaccccggggcaggggtgggggcagtgggaggtcaggagaattcaaggaagagactagactgaagaccaaaggtggatgggcaggaaaacacacaggcctgtcctaatgagataaagagagcattttctggggccagaaggacacgttccctgtccgcacctggaagaaacctgagcagagtcttccacctcccacacgcatcccctgccttcaggggaactgccctaacaaggcagcgtctcctgcagtgccgtttctctacctgcctagagcccaaggtcggcccctgcaatgttcttttttctttttttttagttttttttgatgcatgtgtgcttagtcacttagtcatatccgactctttgtgaccccatggatggaacccaccaggctccctgtcctcggaattttccaggcaagaatattggagcgggtttccatttcctacttcatgggatcttcccaacccagggatcgaacttgagtcactttcatctcctgtattggcagcagattgtttaccactagtgccacctgggaagcctagtgtggaccatttttaaagtctttattgaatttgttacaatattgcttctgtttcatgttttggttttctggccacaagacatgtggaatcttaactccctgagcagtgatcaatcttgcacctcctgcattggagggcggagtcctaa

SEQ ID NO: 27431 - DNA, 2174 bp, Bovine  19866880660090
  misc_feature (1)..(1): n is a, c, g, or t
nccctctcaaaccccccccacccccatcgcacccctgatttctgctgttttaagccacccaagtcatggtactttgtaactgcagcctttgaaatgaatgtgggtactatataagatagaataagaggtggggcctaatttagatcggggtatgtgtccgttagagttctttgggagtaaacaatagaaagatgtgctgactcatttaaaaacaaggaatttaatcaaatgaaatcaatttacttttagcccagaaaaatcagagtaaacgctgaataagcaagtcttggaaaatcagaaaccatggcggttctgggatctgggagcccaaatgaataggcagactcaccagggcatcactctcagaagaagtgtgttcccactattctatttccttggactcatctgaccaaaattcaaagttctgagagagagaagcaaattggtttagctttcatcatgtgtcgactccttggaggcctggtgggaattaattaggaaaaccgggcatcttgacagcccaacccatgaagactacttgcttcgccaaaagcaaatcggagtgctagtaagaaaagaacagagatacctggaaggaaatacagagtaagtgactctctggggaagtgctctttctgctgactctgaaaggctgattagaaaataggcagacggggacttgcctggtggttcagtggttgagtccacactcccaatgcaggagatgctggttcaatccctggcggggaagctaagctcctgcatgccttgcagccaaaaaaacaaaacacaaaacaaaagcaatagaacattaaattcaatgaagacaaaaaaaaaaaaaagagagactacaggttgagggatgacaggaatgaagacaaggtcatcagaaaaagctttgtatgttcaaagaactagccagtatagagggatatcatgggtatgacattaactgagagaagaagcctggaagaagaacacctatttaggtgagaagacaaggattttcatttgggtgctctttagtttgagaaatcccctaaaagcataggaagtcattcaacagggggttgaatatacaagttatggcttgtgagacaggtctggatgcccatgtaaattgcagagttattgacatataaatggaaacggggatttagggagacagtgtaaaagaagagaatgggtttcacagtcaagccttgaggatttccaacatttacattagtggtagcctctaaagcaattcaaactccacctccatcagtagagatgtttagcttctccttccaatatgcacatttacttaaaattaggtacatgagccgctgtcctcaaatattctgtacattatggatttttttaattgaaaccaatttaaataaaaattaatataaatctaaagaacactgattcggaggttggggtagaagaaggtgagccaaccaaggagtagccagagaggcagaggtaaaactagcagaataggatgtcatgacattttttaaagtgtttaaaggaaaaggtagtggttataatatcaagtattgctgagccatctagtaagattaggaccagagaaaaagtctttaggtttggtacctgatagatggtgttgactttgataggagcagtttccatggagcgatgagtttcaaagccataccagagaaatgaaaaataaaggcatgcactcatttcattgccccacctacactgcaaggtgaaaatcatcaccgtcattgatagacgagagaatcaaggctcagagctgtaaagactgccgtggcttttatactgcaggagaaagagtgaaaatttaataccaagcctgcccagatttataatgttgggttcttccatggaagaaagctaaaaggtataaaatgtcattaggtagaagcagggcctgggttaaagtgggaacgattggtcataaatagtccaatgttggtggcagagcattctgggaactccagttgaaaagtagagcagaactcctcattcaagagtcctgagcagaaaggcaggttcacccagcctctaagaggtgatataggacttccctggtggtccagtgattaagactccgagctcccactggagggagtgagggttcagtcctggttggggaagatcccgcatgccacgaggccaaaaaaggcgggaaggat

SEQ ID NO: 27432 - DNA, 667 bp, Bovine  19866880748088
  misc_feature (1)..(1): n is a, c, g, or t
nagagaaaggtacagagatattctatgtatgcccagaccccacacaggcactgcccccgcttcccaatcacactcaacaccaccccccccaacatttgtcacaatcaatggacctctactgaacatcattatgatcccaagcccttggtttccatgagggttcactcttgggattgtacattttgggagcttagataccatcagttttgagttacagaattgcagataaaaggctacaaaagcctctactacaacttctgttagagtaatgcttattgatctgaaaacaagaaaagggtattgggtctaactgaatataacacacactggccatggcatccctctgggggtgatgtcatgtatgataagaccatgggctactcccagtgagttcagaaactcgacagcctggaggaagcaacaggaacacccctgctcagatgttatcagtgcctctactgaacacgcaatttatacactcccgtgccgtaagcagatagattctaggacactggtttcacaaaactagcccccatcaaacagatcagagacttaaaagattttggccaagaacctgtgcactgaggatgacagagagacaaacacaagacgacaacccaacagggcaaagtcgaccgtttccctgcagatgggacctggtcttcag

SEQ ID NO: 27433 - DNA, 1603 bp, Bovine  19866880772345
  misc_feature (1)..(1): n is a, c, g, or t
nagattgaacctgcaccccctgcattggaaggcgaggtcttaaccaatggaccctgagggaaatcccaatgcagctgcatttttacctaactttgtgaataaaacaggcaatgacctctatcttctgggacacccagaagtttgctggttatggagtgtcaaagaactttagaggagttataaatataaaaatatgttatgcattctttttttaagctcaaaatttgatgacctattcttagatgataggtgactatcaagagcatatggcatccagaagatatttccaggaaaaataaacatacttaatttgttccctcaaggtacagatgacattttaacagtagatgagaaagcaatgttttcccccaaaaatagaagtgttctattggagagacattttgaaaatggacgttgagaaacatttccatgattaatgatttgtagctgaaagtgctggagtttgatttataaaaattcatatctgcacacttcaaaaacttggaaatggatctgtctagtcttttaaacattttccaaatgaagaatttcgacaggctttgaacctatttgttaaaaatattaaaatatggcacctttcagttagtttacaagaacaagtggctgacatcatgaaaaatggaaatttacttgctgaatttcaacaaaaacctttgcataatacatggatgagattgaaaaatgagagtcataatttagtaagcaccgtcatcgatgaacttcttccagttggctctacacatctcaaggtaccttttcagctactgagcccaagaataagtgaattaaaaccagacatttgaattactgtaacacaaagtattaaatcaagattttgaaaacagtaaaatatatcgcctcacactgctctgattgaaaatatgactagtcatgatattttaatgagaacaaaaaggcctcctatactattaaataaaacactatgaaaactattttttaaacactgcttatttcatcttatcatctcatgcttttacagatgatcccctcagtactgtagtctgtgcatataatttataaatcaacaactatacaggtatttgagagtgtgctcaaaatttttcaccaatcagcataaacatttttttttaatgagaaagcacaatctgttaaatggggagaccaaccacatagcttaccaacttcaagagagaaaacaataaatacgaaaatgctttgaaagaaggatagagtgtcaaagaaagacaaagcatcatataagaaaagaaagggacttccctggtagtccagtgcctaagaccatgttcccaatgcagggggcccgggttggatctctggtcagggaactagatcccacatgtcacaactaaaagattctgtgttgcaactaagacctggagaagccaaataaatacttttttaaaaagagagagagaaagatctaactagagagagctattgttgtttctgacccagctggtcaaaaatcagtattgctttggtgtcatctaagctgaaagtatccagtgttcattataataaggctttgttgaacaaaggcaatagtttaggtatcattgcagaaggcatgcttatccca

SEQ ID NO: 27434 - DNA, 883 bp, Bovine  19866880914078
  misc_feature (1)..(1): n is a, c, g, or t
ncgaacttaattaactttttgttaacccaactaactcattttcgccagctagttcagccaaattgttgaactgggagccccatgtagacacaaagaaaacatcctgggaagggaaaagttaccaggagaaaggaaaatgaatccagtcgagattctaatatgcctttcttcctacccacaggggaaagcacttacatcttcccaaacataattaccttcctggtgtttaatgaatacaactttaactcacacaatacaatttaaatctgctagaattcaagacacgggggaagtttccttgcgctcactgatctggaatataaaagtaaagctttaaatgtctagagattattgatttggttgttgacttgggcaagtccagtggggtgtcttttgaagcaattacccaaagtgtctcaatatgttaagcaaatctaaaaagaagccccagagaaggaccctggctggtgggaccagtggcctggcaaggctcatgcagtctgaggaccagaacagaccaatggttttcaatttttggaagatgtaagaggcccctggggagaacattaaaaatagagatgcccacttcaattcatggactctgaatctatgacaagatactgaatctgagtatctacatatattgttaaacaagttagcagagaattctgatctacatcaggtacaccaagtgtacttgaggactttcgacctaaaccagtggtgaactacatattacttagttctgcagcagaagagcctttcctggattcttttagcttttgttgttgctattgtttggttgctagattgtgtctgactctttgtgaccccatggactgcagcacaccaggtttccctgtccttcactatccccggagtt

SEQ ID NO: 27435 - DNA, 1055 bp, Bovine  19866880932346
  misc_feature (1)..(1): n is a, c, g, or t
nacagtggataggaaagggtcaagggggcagtatgagggtcagcaggacacgctggccaatggagatcgaaccatggaatgctggctctagaaggagcaaaatttacaggttgtttattccaaccttatcgttttacaagagaggaaaccagggcctgaggtggtcaacccacagaccaaaccccagatccataacatagaacagaggtgatgacagaccagggttgggaggaagcttgggcatatttccaaaggcctggagacacatgtacgggggaaagtggcatgtgccatcagcagcgctgtcctttggagaaactgacttgcttggaagctagagaggtcttctgtttgggcttgtactgctgcccagaacagtgaagcgtgtgggtgtctactcagcctttgagcagcacaccatgcaaaaaaaagaaactcctccctccccacattatttgtttttccatttgtttctcatccttgcatcctcgactaaggagcagctatctttcttcagagagaatatgacgaagaaggctgtgcttggttcaggaggagttctggccccccaaaagtatgtgggctgccacataattactctgcaggagagtgcgtgtttagggaaattacacccttctctccccactttgtcctgggcctgaacaacagcgtgctgactcatactaatgatgctgtcagaggctttacctgtgattttccgagcagcagcctttgggtcagcagagcaagggttgtctgatcaatccacgggcccatctcctcccaaagacctgtaaagaacaaaatgtcagcacgcccagaagggtgaacagatgtagcagactcaggcaacagcatgcaactggttttgcaagtttgtaaagctctcggtgacagtggacacaggaaagggacgaggggaaataggatcagggctggcaggacactctgggcgatggagttagaaccacagaatgaatgttggctccagaaagagcaaatgttatagatcgttgaattccaactttatcattttacaagaaaggagattgtga

SEQ ID NO: 27436 - DNA, 1118 bp, Bovine  19866880955975
  misc_feature (1)..(1): n is a, c, g, or t
ncatagagtcacaaaagagccgtgactgagcattttagtgagtgaatgagcgagaggcactgctgataaaaaaaaaaagtattcatataagtaaaaacagaaagaaggcatttcccagcactctctactcccgactctgtctctcttttctttctagccctcatccctgtcttacgtaggtattcgtttgtcagtctccccagaaaataagctttagtgtcctggaacattgtgttcccagagcctacggcatgcctggcactttgtagatgcgcaaacactatgttgggtaaaagaacaaactagccagtgaatgaatgaatactgcttgactactgctgattctctgacgaagcagtgcttgcaaacatcaagcttgtggctacccaaagagtaaaacgactcagtggtgaagaatcctcccaccaatgcaggagacgcaggtgcgatccctgggtcaggaagatcccctgaaggaggaaatgggcaatccactccagtattcttgcctgggaaatcccacagacagaggaggtgggatacagtccatagaactgcaaagagcagaaaacaactgagcgaccgagcacgcgcgcaaaagagcagaaacaaggcgtgctttgggtccatctagcaaggtgtgcctgagatgagtcagagagattaactctgcctccattcttgagaggcatcctcgtttcataatttaacggacccacatccacatgtgttccctaagaccagcgtggaggaataagagctgactcttgtttgcagacccagacaactcaaatgtggttgtttttaaaatacctgtctcacagctgtccctgaggaatttagctattatttgaatcctggaaagaaaaaggcaccaagatttgttgtcggacttctagaaaagagaaattccaagggctaatctcaaatgtgcggggtcaagttttgcaaggaacgtggctcttgatcaaatttaagggcttcctctttagagggtgtgtgcgtatgctcagtcactcagtcatgtctgactctctgcagccacatggactgtagtctgccagattcctctgtaccgtgggattctctaggcaagaaaaccgggaagggttgccatg

SEQ ID NO: 27437 - DNA, 1247 bp, Bovine  19866880958418
  misc_feature (1)..(1): n is a, c, g, or t
nctgtaataggtggagaagcccatggagaagaagcccaagtccccaagtgaccacaaggaaggctacctttccaccctgagcatccacaatggatttttgttgaattctcaaagagagacttcccttgtggtccagcggttgacagtctgccagtgcaggggacacgagtctgatccctggtctgggaagatcccacatgtcgtacagcagctaagcctgtgcaccacaactcctgagccccgctcctacagacagtgctctgcagcaagaggagctcccgcagtgagaagcccatgcgatgcagctaaggagtagcccccgttcgtggcaactagagaaagcctgcaatgcagcaatgaagacccagtacggccaaaaatgaattaaaaaaaaatacttaaaaaaataaactcgcagtgaaaccagcgagattaagaggtttgcctcttctagcagccagaattaccagccctagagacgccccatcccttgttttgacttgaaagtgtgtagaacttgaaaatgtctacaggaaccccaggctttgaatggattagatgacctgaagcaagtggcctcccagaggttccttccaacctggtaatttcatttctgtttctctctcagaaaacaatccacttctgagcatcgttggaggccggttactgagtctgcatgctgatgatggccgcgatgtgcccccatcccatgtggtcctctgccctgcatggggtcactttcatgttaggcaaatggctgaaatgtttggccagcagcagcacggataaagggaaatagtctttaaaatttttcaacagttctccccagcactgctttgttcttgctctctgaaagcggtatccggcatatcttccaggcctggggtctattggaacaattgtaaaatgtcatctcttctacctgctgacttctgcggctgtaagctgctggtggccgggctcccacagagtccgcgggaccgaatgtgtgaactcacttcccattcacagaaagcatggtccaaaaaggccagcctgaccgaactatgtctctctgctctctggctcaaagaaaacacaggaatgtcattgtatcatctcgaatgtatccccttcttttcccttttgtgaaaatcctgggatgtgtggggttgggttctgatagtcctcagaatgccagtgaatggcattgatcttaacaccttaaagaaccagcagctccaggtgcttcaaaggccgcctccagg

SEQ ID NO: 27438 - DNA, 676 bp, Bovine  19866881165589
  misc_feature (1)..(1): n is a, c, g, or t
naatgataacttgttggctttttcccgtaagcctagagagatttctttttttttttttttcctcttgttccaatggaaggtagacattaataatctttaggagagaaagttaataattcaatatgatgcatcatgggcacatctgtacaaaagtatatctgtcaatgtttcaggacatttagagaaggaagtgacaagtcatgttctaccgcctctaggccctccagaaagggtagaggaagccttatccatcaagaaaatggctggagttctttctaaactttttggtgaagcatgactactcagaatggatagctttctcttttccctgttggatgtctcttttgaaataggcatgaagacttgtttctgatttcactggatggatgaaatatacattgaagcttgctgttatactcaaacataagatatcatacattttttatttcctatgccttgaagacccaaattcatcagaaacttattaattcaaacttgccttaaagctcctgattgccacaggttttaaaaagattatagctttgctctacaagcctacagaagagccctcacattattaataataatggctaacatttataaagttcttactctgagccaggcgctccgctgtatattttacgtggcatcatttcgtttaattctcatagtaagt

SEQ ID NO: 27439 - DNA, 1376 bp, Bovine  19866880083657
  misc_feature (1)..(1): n is a, c, g, or t
natggcatctggtcccatcacttcatgggaaatagatggggaaacagtggaaacagtgtcagactttgtttttctgggctccaaaaatcactgcagatggtgactgcagccatgaaattaaaagacacttactccttggaagaaaagttatgaccaacctagatagcatattcaaaagcagagacattactttgccaacaaaggtccatctagtcaaggctatggtttttcctaggtcatgtatagatgtgagagttggactgtgaagaaggttgagcactgaagaattgatgcttttgaactgtggtgttggagaagactcttgagagtcccttggactgcaaggagatccaaccagtccattctgaaggagatcagccctgggcgttctttggaaggaatgatgccaaagctgaaactccagtactttggccacctcatgagaagagctgactcattggaaaagaccctgatgctgggagggattgggggcaggaggagaaggggacgacagaggatgagatggctggatggcattactgacttgatggaggtgagtctgagtgaactctgggagttggtgatggacagggaggcctggcatgctgtgattcatggggtcaccaagagttggacacgactgagcaactgaactgaactgaactgaatgttctatatagggcttccctagtggctcatatggtaaggaacctgcctgcaatgtaggacacctgggtttgatccctaggctggaaagatctcctgcagaagggaatggctacccactccagtattcttgcctggagaattccttagacaaaggagcctggtgtccagaggagcccaggacccatacagtccacaggctggcaaagagtcgaacactcaacaactaacacttttacttttcactttccctggtggctcagtggtaaagaattcaccgccaaacaagagacgcaggtttgatccctgggtcaagaaaatcccctggagagggaaatggcaactctctccagtattcttgcctggagaattacatggaccgaggagcctgacgggctacagtccacgggctcacaaagagttagacaggactgagcatacacacaatgttatattgtatacgtggtattctagggcttctgaaagggccctaaactttacaattccataaatagtaagctttttcttttttttttactgtcagaaaacagagaaaaaataaaagaaatatcggttagaggaccagctgatttttcatcccaggtgagagaagacaggcagccattaattcacagaagaatataaaatccacgtccacgaacacacagtcttccaaacaacaactgcagttattgggaaacattcactca

SEQ ID NO: 27440 - DNA, 1204 bp, Bovine  19866880405119
  misc_feature (1)..(1): n is a, c, g, or t
nacttttgatatatggcagttgtaattccacttttactgatctacattaaattgtattaaggtgagaaacaccccttaaataaataaatgagagcttactctggttgaataatttcaatttagaaattaatgtgttaacatggcctgtgagtcactgcctgtcttctccaagtaaactctagtgatggaggcaggctgtgttcactttatattctactgccctctggctgataaaacttgctgccagaataagagattagttaacattcaacatatgttaattaatgtagtttattaaaatgtgttattgttgcctttattcattcttagtacataattcattgctgtaagggatataataaaactattagggctttccaaacagtcatcaaaacctcacacagctgacttagattttaaatagtaggattcctttattcatctcttgctgcttaaagtattttttctcactgtgtggcaaaccataattcaaaagtttattataccaagtgaataaggagaatgtatttgcaaaatgtgtgggagatttatcccaagaaactcaattaaatatacttaaaatacttacttaaatagactaaatcttgtaaatctatgaatttgggaaagcatgcaacagaactttcttaatcaatatagttcattccttctacaaaacatgatgtctagtacctggataggctgagaactttcttttaatgaagtgtgatgacatacatgtattcccaccaggtgaactgatatggctaacaaaaattaaccatattagcttctaatcttcttgtatcgcttatggtaagctgggaagtttttgtggaaacaagcctaaaatcttagtgcgtgtgtactcagttgcatccgactctttgccaccccacggactgtagcccacccaccaagcttctttgtccatgagatttttcaggcaagaatactggagtgggttgccatttcctcctccagggtatctttccagtccagagatcaaacctgcatctcctgtgtttcatgcattgcaggcagattcattactgctgagccactggggaagcccacaatcttaacacaaaagtcttttgctagcatattcaaggtcaactgcactactccataaaaaatctagattccaccaagatagcacaagttgccatcatgtcatttgtgttatcttttcaacatgtgc

SEQ ID NO: 27441 - DNA, 2660 bp, Bovine  19866880438869
  misc_feature (1)..(1): n is a, c, g, or t
nattttttacgctcctttttacatgtcagaataatggaaatctgctgggctgcaacggagagaactggtagatcgatacggttaaattcatcaaaacaaccccaggatccagactgtgccagtccttagaagggaaattaaatagaaaactccaattagtacatccaattagaaagtcaagaaaaatagccttatgcaactgccaagacaagccagaattaaatttgttcaaacaaaaagttgaacaaatagatcatatattaaacgcccctgaaataatttgcaatgtaacactttttagcaatgcaaacacccaacctgcagggataaaggaacagcacaaaggtgagtgatattgacatttgacccacacaacactggaaagattcgggtttttccaaaagttttataaagttggaaaatgacactaaaatgcagccagttgttgaaaaataaatcttaacaagatagtccacattagcttacatttttcagcgaataaaaaaatataaccctcacctttaaaaatccgtccaagtcctcggaaatccatctgatctgaacaattgaaaaccacgacgtatttcccaagacaccgtcccatatctttggtcgtttctgtttttcctgttcctgcaggaccagcgggggcaccccccatgctcatgcccagagcttgagccagtgtgatgtaacacctggaaggatacaggaaccactagaaccacaccactggcagctgaaagaggcctcggaggcatcacagtgacacgatattcacacaaaatttaaaaacgaagatcctgcccattgtcgccacttaacctttccagaacctcaccctaaagtacacttatccttaggtatattaacatgtgttgaggaaaaggcagtagtctaaggtcaaacacatttgaaaactcttaaagatattcaacaagattccttatgataatgtatattgacaatttccagttatgaaaaagcatacataggatttccaaaagttatttggcaactatttcacaactacctcgaacatctaaacaagagtattctaggaaacagggcctggcttccccggtggttcagaggtaaagaatccacctgccaaagaatccacctgccaatgcaggagataggagttcaatccctgggtcaagatctcctggaggaggaaatggcaacccactccagtactctcacctggagaattccatggacagaggagcctggtgggctacagtccatggggtcacaaggaatcagacatgactgagtgcacacacaccaccacacacaccacacacaaagtagattaatccctttttgaatctaagaatatataatttgaccaacatgagaaccaatgatcacaggagatttaaatcacacattgctaaataatcacactgtaaatttatttctgggagcatctactaaacctgcaaatatcttctgctgtatcgtaaagtacgatattaacaaataaaagattctggtgagagaatcaagaatgcctgtgaaggaaaacaaaggaactgataacttgccaatgaatccttcagtttcccagcatcatccaccgctgcaaaaggaggtaatctacaacagaatgcatctgagggctttctgatggccaaactcaaaagctttcatctggacttgaaaaaatatttcaaagaaaatgaagtgattgtccagcaataaagcatgggaatgagcagcgagcacacccactggaaacccctagggtctcaactttatcagatctgggttcgtaaaaagacaagtaaatgactcagtcctgaagcaataaatgagcctggattcacagaaggtaatgtggatgtaaaaccagaaggatgcctgatctcactttgattctgcctttcaacccaaggtcttatctttcctcttgaacttttgttatcccttcagagcagtctctgtaataacagctaacatgatgttataatagctctgactgttagaggatgcacactgactgaaaccgcccaccctggccaggcaccatagtaaccatttttgtgagttattttatgaaaggaggtcctggtaagaaacagggaactaataagcccccaccaatgagaagagttcgagaaaggtcaaaaggagacgccatgtgtctgaccacctctcagaatcctcctctctggaatccattttgactgaacaatgtggacaccaccagaaagaaccctgagtcagaatgattgctcaaagacaacccaaaagctaatcccatcaccataaaactcaagactgtgagccacgaggcagagcggttctcctaggttcccctaccctactgctctccaccgggcaccatcccaatacagtcttttgcattgtcagtatgtgtgtctcctcagacaattcatttccaagtgctaggcaagagcccactctcaagccatagaaggggttttccttccttcaacacaactacaccatgtcatttaaaccccactgaagttgaacggttctatgaagacctacaagaccttttagaactaacacccaaaaaaagatgtccttttcattataggggactggaatgaaaagtaggaagtcaagaaacacctggagtaacaggcaaattggcctggaatacggaatgaagcaggacaaag

SEQ ID NO: 27442 - DNA, 1916 bp, Bovine  19866880455292
  misc_feature (1)..(1): n is a, c, g, or t
ncgactgagcaacttcactttcacttttcactttcatgcattggagaaggaaatggcaacccactccagtgttcttgcctggagaatcccagggttggcagagcctggtggactgccgtctatggggtagcagtcggagatgactgacgcgacttagcagtagcagcagcatataccctcccatatatttcaaatcatccatagatcatatatgatgcctaacacaatgcagacgcaatgtaaatagttgacataatgtggcaaattcaacttttgtttttttgaactttctacataattttttccccaaatatatctgatctgacattagttgacaccatggatgcagaactcaaggataagcagggccagctctatatcactttttctgggcacacattaggacttagcaggtgaagacaaccttcttatctgcttaacaattctggagcactactgggataagaagaaaaacaaaacaaatagattactgtctcagaaaactcaccactcaatctcccccactcagacttcaaagaagttccattttgcattattcagggacatagtgttttattttcgaggaaatgatgctttctgcaattcattctaaaattttccagaacaaaaactcagaagaaacagaaatattacagtgagttacagtgaaatataaatttatgacaactatgttcataaatgattacgtttatgacttatttacttagtgtgcagataatggtttaatttattgagactttaaatctaaaccttcacattcattttaatttcaaagatttccccccaccacattttcactagtcatataatcctttctgattatttcttctacatgtaaataaggtttcctgtttatttttaatttttaaattttatctgcccagcaactatcacttcatgaatgcgtttttctagcttttttgaagactgaaattatttttagcaagttatgtttgtctaactctaaatgtgtttacacttttattctctaaaatactgttttttgtcccattgtctctttttttgttttttctttgcaaccttcagctccattgttgtggactctttgccaacagcatgcaagatccaatgacaacaatctgccatgcaatttgcatgaattgctttcaagacttgcttataaacatgacagtttgcctagctgctgtcacatgtactgtgttaaaatttcttcccattgacttcatgttgggtggaagaagagttacttgtaatctagggagcaagtctatgtttctatcttatggttaaactatgaaaattgccaagggttccagtgtcataactaattaggtcctagtatatgattccttagtggttaggcttttctcctagattcccaaacaaaaaataactaaaaaatgatgagttatttttttcaggctgcaataattccataaggataattaaacatttttaaagctatagtgaaggtaaatggttattagcaatttccccctccttttactatactcaagaatttatatgtgttgaatatgtagaaaacactgtttatgacatgatttcctttaatctttacttaaaaatacaacacataccagtttctcaaggatacacctacagatggatcttattgtataatatatgatattatatggtttgtaatgtttataactagaacttcatgagaccctagaaataacttcgtaacaagtgaattaggaaaaacatcctatatgattatgatgaaagttatattactcaggaatgatgctgagacagtgttccaccccttatccaagagggatatgtcccaagaccatgagtgtatgtctgaaactgtgggtactaccaaatcctatacatttaggataggataggatataccaaatcctatacactatggttttggc

SEQ ID NO: 27443 - DNA, 1989 bp, Bovine  19866880494620
  misc_feature (1)..(1): n is a, c, g, or t
nattataattaattaagagagccaagtctctgatctcagaaaatacattaaggatgagttgacaggaggaagacatttctaaatcaaataatatgatggcaaatagatggggaaacagtggctgactttattttttggtgctccaaaatcactgcagatggtgattgaagccatgaaattaaaagacacttactccttggaaagaaagttatgaccaacctagacagcatattaaaaagcactactttgtcaacaaaggtctgtctagtcaaggctatggtttttccagtggtcatgtatggatgtgagagttgaactacaaagaaagctgagcgctgaagaattgatgcttttgaagtgtggtattgggagaggactcttgagagtcccttggactgcaaggagatccaaccagtccatcctaaagaaaatcagtcctgaatattcattggaaggactgatattgaagctgaaactccaatactttggccacctgatgcgaagagttgactcatttgaaaagaccctgatgctggcaaagattaagggcaggaggagaaggggatgacagaggatgagatggttggatgtcatcaccaactcaatggacatgggtttgggtagacttcagcagttggtgatggataaggaggcctggcgtgctgtggttcatggagttgcaaagagtcagacacgactgagtgcctgaactgaactgaactgaatatgatggtgcttagtagcatatgatataaacctaataagcagagtttctacataggttatatatatagttatattgataatgagctaggtggtgaggaaagtattatagaagacagggagatattacaaaagagcatcccaggaaaggcaaaaacattgccaagggagaacagggagaaagacttgatgaagttgaccttggaagccaaggggttcaagtttccaagtatagctagagattactgaatgactttacagtgggagttgcatgatctgatttaaggttgtaaatgatcactatgatcactccaactgctccatggagacaggctgtacaagtgcagaaaagacttaaaacatagaagactattcagattacaggagtgcaggggagaaattaagacatcttaaattagcactaggcagagagaagtggctaagcttgaggtattttgaatgcagtcaatcaaaattcttgataggttaatagatttgctgggggcagatggcaagtgaaggagaggtgagaatccaagatgacactaaggctgacttgaacctttgcatcagcacttttgcataaaacgccttaggctgctgttcatatctgcctctgccaatcctaacaacatattgtgggagccaattctccatgtgtctctcacatttctgtacattttatgagcactaactgcattcattctggactatcttttcaaaagtacgtagagaaaaagccttcaaacaaagaccatgtgcccctcagaaacaaagcagaggttcgcttgctatttgatatcatagtgatcacgtctgccacagaggggaaagccagacaggtttacttctcactattaaataaattgggtttcctaagctcatggttcccatcttgtaatataacctgtgtgtcacaatcacttcgggctcagagaagcagtataaatgctgtatgctggatactcctattactttgagtaataagcagtcccttttctctgacccaggagcctcgtgtcttctgatagcattgataacgcccatgaaagtgtggaaagctcccttgttaactcgcaagtagagtaaaacctcagattcttcctagttcttggtatttcccaccaggagagtgaaggagatactctctcttcattcccatggtagacctctgcagttttctaatgagtcatttcctcattcttatcaccttctcagaagcttcagttactgagaagtagcaccatcttaccagacgtgttgaga

SEQ ID NO: 27444 - DNA, 1281 bp, Bovine  19866880528566
  misc_feature (1)..(1): n is a, c, g, or t
nctaaaagaattatctttctggttgatgaggcagtcaaatcttgagttttctatgacggatgagagagaaaaatgtcacaaaaattcctgaactgcatttaacatgatgagagtccttggtaggtaagtccattgtgtacataaagccacctgcctatacattggagaaggcaatggcagcccactccagcactcttgcctggaaaatcccatggatggagaagcctggtgggctgcagtccatggggtcgcgaagagtcagacacgactgagtgacttccctttcacttttcactttcctgcattggagaaggaaatggaaacccactccagtgttcttgcctggagaatcccagggacgggggagcctggtgggctgccgtccattgggttgcacagagtcggacacgactgaagcgacttagcagcagcagcagcctatacatatgtgattttgttgtttgtatcccaattctaatttagtttcatctttattccaaactcctgggagatcaggaattcctgatgggaaattttgaatactgttttaagactccaagattggagcagtagcttagtacaaatatccatgaagatccaacgtgaaagtagaagattatgcatagtagatgatttcccttcattttctgcaatgtattatagctcttagaggtttcattttttaatgatctttgtactaattcattgtttgtgcctggggatatcttaagccttgactaagtttctctgaaatgtctgtgcctttgccaggctgccatcatatcctccgccatagtcttcataattcctctctttttagtgagttcttgttcacgtttcaagtcacagatcaaaggacacatgtcttccttccctggtggctcagtcagtaaaaatcttcccaatccagggattgaacccaagtctcctgtattgcaggcagattctttaccatctgagccactagggaagccccttgaaaacatacttgtatgtaatattgttcttaatagctgaacaaacttgtagagaatacttttgagtctcagcctgtgaaccctttgccagatttttcctcttgcctgtcttggagtgctcaaggacactgctgctttcaagagccgtgttacaatgcatttccaactgtctttctgctattaaatgtacagtgcacaacaaggagtacatttctgcaatgtgttctccaaaaagtagctttgaacatgccacatcaaaagcaaaatgagttttggcggtcttaacacaacatctgctcaggga

SEQ ID NO: 27445 - DNA, 1457 bp, Bovine  19866880568741
  misc_feature (1)..(1): n is a, c, g, or t
nccttgactagatgaaccttttttggcaaagtaatatctctgcttttgaatatgctatctaggttggtcataactttccttccaaggagtaagcgtcttttaatttcatggctgcaatcaccatctgcagtgattttggggccccaaaaaataaagtctgacactgtttccactgtttccccatctatttcccatgaagtgatgggaccagaatctcagttaggtgcactcaataatctgctcacactgccttgcaggtcacaaggcttcacttagttgtaaagccttcacttagccttcacaactaatgcttcacttagttgtgctgaagtttaccaaatattgacttgcaatgtaaaactgccatctctgttcaaggctcatgattctctgggtgctttaaataaaaatggaaggagtaatttttttttaatcttattgctatttttggctactctgattctttgttgtttcatgggctttctctagttgtggtgctcaggattctcattgtgatagcttcccttgtttcaaatcacaggctctggagtacgggctcaggagttgtggttaatgggctcagttgccttgcagcacgtgggatctttccagaccagggattaaatccgtgtccccagcattgccaggtggaatcctaaccacaggaccaccagggaagtactggaatgaatattttttaagtaactgcatgatacttttcatccaaaaaagattaattttcaacttctgatgtaaattttaaaaattcaccacatttatagagttttatagttcctctttcatttcctctgtccctagaatccatgactaattaattgaaagttaaagagcatgagaattttcatctctcatgcagtttcacagcatcgaaaagagttgcagtttgtgagcactgatggccaagaactgttcctatctcctgcaaaaagcagggttgccatttctaatgtttcctaatcttattttcaggcttgtcttacgaagtacacacagatattaaaatgactgcactgggagaggtgagaggtgaaaaatcctacatattctatgtgcatcctgcctgaggattaagggagagaatttgcttaggaaatcaaatcaaattattggctgtagaacaagctttggctctatcatggcattgcactggagatcaaatgtttactttaataactaaacctgtgacctgaacctgaatattttccgcaccaaaacttacccccattttgatccactcaatttaatcatcccacagacatttacttctgacacaaaatgctgcaaagtagaagtgcaatagtctttccaacacattccacaaacagaaaaatatcagagggaggaggcactagaaactcctttcctcatagtgatctgagcatcaaaacactaaaaaagaggaattttattttgaattacagacaaagaaatgcagt

SEQ ID NO: 27446 - DNA, 2259 bp, Bovine  19866880718754
  misc_feature (1)..(1): n is a, c, g, or t
nagagttggactgtgaagaaggttgagcaccgaagaattgatgcctttgaactgtggtgttggagaagactcttgagagtcccttggactgcaaggagatccaaccagtccattctgaaggagatcagccctgggatttctttggaaggaatgatgctaaagctgaaactccaggactttggccacctcatgcgaagagctgactcattggaaaagactgatgctgggaggggttgggagcaggaggagaaggggacgacagaggatgagatggctggatggcatcactgactcgacagacgtgagtcttggtgaactccgggagttggtgatggacaggaggcctggcgtgctgcgattcatggggtcgcaaagagtcggacacgactgagtgactgatctgatctgatctgagtgcaagtatagcactataggtttgaatagcacttggtttctacagttttcctgcagaattttcttcaggcatgtgagagagcagttgatatgttaataccatgagtctttaatgaccacacctgtgtatataagctggtgtgtctaatatacgtgcaaaatcatcatgccacattttctttcacatattctcccacagccttgctctgagagacctgggggatttttctatctcagaaagtactgttaacatttctcaagttcttttttccccttgagagacatgccccacggttcctaatatttcagagatgcacttgtcaagagtcactcagatatcatcaccaatgtccctcagaagcaaagaatgggtaagcccttctgaataatgatacgcccttctccctggagtcattagcaaaatacactgttctttttctccagcttcttcggttctacagaacggaacattcgatgcaaagtttcttcagctgtgcactctcatattcaagcccgaggctatagcatttttgactgctacaatccagctggttttcagtctgctctcactattaactctattataatatttataatactgtctattaaactgtgggtttcttttccccacagacactatcaaattatcctctatctttagttcattctggtgtattagttctcttctgaaagagggcagacctgttgacagggaggactgttactgacattctttgccaaaattacacccactgtagctagaaaaagaatattctgtctgccttgactcaaagccaccaatgccaccaattccaggagctgttagatgcacagctagagtcttactcaaaatattagctagggtgggtctagcgcacttgcattttttgtttcttttttgattgctgaatttgttcttgttgatgttactgttcagttgctcagtcatgcctgactctttgtgaccccatgagctgtagcacgccaggcttccccatcctccactgtctccctgagtttgctcaaactcatgtccattgagttggtgatgccatccaaccatctcatgctctattgctcccttgtcctcctgccctcaatctttcccagcatcagggtcttctggcaggtgaattctggctacaatgcttgcaaggcaccatattctgaaataaattgaacttctttcaccttctgaaaatagcagagagaaaattgtgttttagagatacgttaggtgacattagcaaagtgatgcatgcatgcatgctcagttgtgtccaactctttgccatcctgtggactgcagtttgccaggctcctctgttcatggaattttccaggaaagaatactggagcgggttgccattttcttctccagggtatcttcctgactcagggatcaaacttgcgtctcctgcttctcctgcattggcagacaaagtgatgacagaaataaaatgtgttcaagacggatcaatgtgcaagaagggtccttgagaccatttcttgctaaggaaattgctctgaacatttttataatggaaacagacaggtactgtgctgaacacacaatggctattgcagaggccacttgagatattagagtgaagataaaggtaagctggcagggatttttgagaacccaaaggccatcttcgtatggagagagttctctaggaagcatagtaactggatattgttttgtactggcaggaagtatttttgctcatggaggcaaagagcaaatccagtaaatcaactgagacaaaatggctctagcagatcctaggggctcaggcatatgggcatgcactcaaggcattaataataaaattttaataa

SEQ ID NO: 27447 - DNA, 2396 bp, Bovine  19866880854952
  misc_feature (1)..(1): n is a, c, g, or t
ntgttatcctcatatgtttatattcatctagtgactaagctgtttatttgttctgagtgtctgttttgtatcagttctctgcttcccttttctctctctctttttgtccacgtggactcttagttccctgaccagggacaacaagaactcatgccccctgcagtggaatcatggagttttaaccactggacctccagggaagtcccacttttcttctcttttaatgccccagtgaagaatattctttggagagatgacagattgggcagatttagatccaaatgctcttttgtgtagggcattatactcagtgccctatactcaatcttattttgtgtttcaaagcatttaccttattccatgaatctgtttcttaatcctgacctaatggacagcatatgagtattctcagaaacacactctgtataagaggttcctctaagactgagtttctcagcttcggcaccattgacatttggaactgaatacatttttgcaggggtgggggacagtcttgtgtagaacggctaacatcacccttgtcctctacccacaagatgtcagtttcacctcctaccccattataacaaccttaaatgtctccagactgctaaatatccctggcgggaaaatcacttccaactttaaagtcttgctccaagaaggaataagattttgccaggaaatcggggggaaaaacttgatttgtgcttccaagtaactacattttctgtctctgaatctggaattcattagatcattatttagtgatctcttttgcttctcagatttacctcagggtgaaccaactaaagcaaaacagccccaaagagctaaatatatcagtatatttagaggttctgtgatacatacatgtaatgagtttaccatatatcaccagccctacacttttattaattcaaatctacaaatatatttgacttaactgtattatatgtgtctttaaatcatttgcactgaagaggagaagtgtatacgaaggtataaatttaggtatgcctgcacatatatttatttatacacatctcattttataagaatttgagttcgctcataagagggcattaagtaaaaaggaataaaataatggactagaagggaggaaaaacatgaaaaaaagttaaagtatacaattctcacatagaagtatatgtcaaattgtaggtaagttttcttctgttcaagtagctggggtactatttatctgctagttctgctgttctgcttcttaagggcttcccgggtagctcagccggtaaagaatctgcctgtaatgcaggagactctggttagattcctgggttgggaagatcccctggagaagggataggctagctaatccaatattcttaggcttccctggtggctcagctggtaaagaatctgcctgcaatgcgggtagacctgggtttgatccttgggttggaaagatcccctggagaagggaaaggctacccactctaatattctgaccctgagaatatcatggatgatatagtccatggggctgcaaagagccagacacaactgagctactttcactttcatataattatataatgtaataataacgtatcacatttgtataatatatattaccttagtgattagttcatagaaatgaaatttaagataaataattctgcctgctgttcccatcctgaacaaatgaggacttgagataaagtacttgatagtttctatgagaaggagaggaatcccattatacaaacacagcatttgctttgaatttattctttagatgtgttgatagtgtgtatgtaataatgaggtttaaaggtgccttcaataaagaagatgtgttatagatatacaatggaatactactcagcagtaaaaaaggatggcattttgccatttgcagcaacatagatggatttggagggcattgtattaagtggagtaagtcagacagagaaagataaacattgtgtgatactgtttacacgtggaatctaaaacaaactgtattcactacaacatgctagtgaatgtaacacaaaagaaccagagaacaaacccctagagcacaaactagtggttccagtgggctgggagaaagaccacctggggtgggggtgtgggaggcacgcaccactgggatggactatacaacgtatggaatatagctgatgttttctagtagttggaaagtaatcttcagattcattttgatatttggcaaaactaatacaattatgtaaaggttaaaaataaaataaaataaaaaaaaaaactgtgtaaaaataaaaacattttaaaaaagtggaaaacaagagaaatgaaaagacaaccttgccttgctgctactgctgctgctaagtcacttcagtcgtgtccgactctgtgcgacc

SEQ ID NO: 27448 - DNA, 1907 bp, Bovine  19866880862344
  misc_feature (1)..(1): n is a, c, g, or t
naacctcaggtatgcagatgacaccactcttacggcagaaagccaagaggaattaaagcctcttgatgaaggtgaaaaaagagagtgaaaaagcactttgtgaatgaaaaagagagtgaaaaacttaaaactcaacattcaaaaacctaagatcatggcatctgatcccatcacttcatggcaaataaatggaaaataatggaaatggtgacagactttattttcttgggctccaaaatcactgtggacaatgactgcggccatgatattaaaagacgcttgcaccaggaagcttgggctttactggtggctcaactggtaaagaatctgcctggaaagtgggagacctgggtttgatccctgcattgggaacattccctggagaagagaattggctacccactccagtattttggcctggagaattctatgaactgtaaaaagaaagctgagtgccaaagaattgatgcttttgaattgtggtgttgaagaagactcttgagagtcccttggactgcaaggagatccaaccatcctaaaggaaatcagtcctgaatattcattggaaggactgatgttgaagctgaaactccaatactttggccacctgatgtgaagaattgattcatttgataagaccctgatgctgggaaagaatgaaggcaggaggagaaggggaagacagaggatgagatagttgatggcatcatcaactcaatggacatgagtttgagtaaactccgggatctggtgatggacagggaagtctggcatgctgcagtccatagagttgcaaagagttggacacgactgagcaactttcaattttctcctagaaagaaaagatatgacaaacctagacagcatattaaaaagcagagacattacttggccttcaaaggtccgtatagtcaaagccttggtttttttcctgtagtcacgtatggatgtgagaactggacaataaaaacgcctgagtgccaaagaattgatgccttcaaactgtgatgctggagaagactcttgagagtctcttggacagcaaggagactaaaccaggtcaatcctaaaggaaatcaaccctgaatattcattggatcaactgatgctgaagctaaggctccaataattttgccacctgatgggaagagctcagtcattggaaaagaccctcatgctgggaaagacaggaggagaaggggatgacagaggctgagatggttggatggcatcactgacttgatggacatgagtttgtgcaagttcctggagttagtgatggacagggaatcctggtgtgctacagtccatggggtcgcaaagtgtcagacatgagtgatcgactgaactgactgaacagatgaaaagaacaatggaatgttaatttcctatcactaacaaaacacctctccaaccacaaagctatttggcagcaagtttccaccaacttctattgaaaccaaaaaaagacaataaagaactgcaattttctttacttttttattagcactttggaattcacagtcaccttttctgttgcttatttttatttcctctcttacctgcagctaatgagcatcaccgctgactaatgcccagcagggtgagtacagttcttccacaaaaatgtgttcttaagtcataaaggactgactgtattataaaattattgctttattactaccatgctgagatgttcaatgtcacatgaggaaagatttttacacattagtcacaagaaacaaaaaagtaacacctaactgaatgtgagaaagatttttctttcactttataagggaaatatttttgcaacagtgttgactagatgcaacaaaatttctaaagtattacttttggctgaaagagcacttgactattaattctataaaataatcacccccctggga

SEQ ID NO: 27449 - DNA, 1623 bp, Bovine  19866880868491
  misc_feature (1)..(1): n is a, c, g, or t
naggtgtttgggctgcaccccaacgcggacatcacctaccagagcaagctggccaaggatgtgctggacaccatcctgggcatccagcccaaagacagctctggcggaggggatgagacccgggaggccgtggtggcccggctggctgatgacatgctggagaagctgcccccggactatggtccttttgaagtgagttgatggcatcctgacagaatagctgtgggtgtgcgtggttggttggttgtgggggtggtgaggaagcagtgctacactaagtcactcagtcgtgtctgactctgcgacccacggactgtagcctgccaggctcctctgtcaatgggaattctccaggaaagaatactggagttggttgctagttccttctctagggcatctttttgacccagggacggagcccacatctttgcatcccctgctttggcaggtgcttctttactgctgtgccacctgggaagactgaggaagaaggcaggagggcaaaaataatttttctgaaattaaagaaattatttaaaaacctcacttcttgaagaagcagtaaaagaagtatttgaacctatcgatgtaatcatttcaaaatacaaataataaacctgatgagagagttaatcttcatagttaaattataagtgtgtactgatgggttaggattatttttctataatgtctcctggaggcacttcacactgtcatttgttcaaacgaaaatgatgtattcttagagtaaagcatcgattattttacaaaaataattcaggccttcttaatttcaggaagtctatagttatatcattaactctgcagcttcttcatcacatcggttttgaaaattgatttatcatttttttaaattaatgtattttatttaactgtgctgggtcttgttgtgcatgcaagacgtgagagctagttccctgacctgggccccctgcattggaagggtggagtcttagccactggaccaccagggaagtccccccaacttgtccttttaatatcaagtaacttctaagtgaaactgacagttatgaaggttaatttttttgacattttagcatgtattgtgggaagatttaccctgaaaacatgtttaactctttgctaaaagcaaaagtaagtggcttactttccttgtagtcttaagagatttcttggactaaccttgtgacatttctgtcataggagcaccaagtttctttatatattgccctttccacctggttttcagaaggaattctgcattttgtttcttatagcatcctattgttttccatgtagcaggccatttcggttgctagtttttcactatagactgaactcaaagaactctcaccaggggaatcatttcccctggaagaaactctgatcacttggttggagaaaatcaatactgtaaccagctttcataagcgcctttcattatagcatcaggaaagcagtcattcatgtctagcagtggctgaaatatttataaagcaacgaaagtgcctaaaatatattaagtgaagtggtagtcacacagacgtgtctgactctttgcgaccccatggattgtagcctgccaggctcctctgtaccatgggagtctccaggcaagaa

SEQ ID NO: 27450 - DNA, 1322 bp, Bovine  19866880892555
  misc_feature (1)..(1): n is a, c, g, or t
nctcaatgagatgttgattgatgctcctcccattagtgagtggaacctccaaggcctgcccaatgatgacctgtctgttcagaatggaattattgtcacaaaagcatctcgctatcctttgctagttgacccacagactcaaggcaagatctggattaaaaataaagaaaaccagaatgaactccaggtaatctttgtttgaatataaatgggcttccctggtggctcataacctaaagaatctgcctgcaatgcaggagacctagatcgaaccctgggttggaaagatcccctgcaggagggcagggcaacccactccagtattcttgcctagagagtcccatggacagaggagcctggtgggctacagtccattgagtcacaagagtcgggcataactgagctactaagcacacgcatgaaacgtgctactaagcaatttcattgcccaaggtcaacagtatctgagaattatttcatatttagtataaacagtatctgagaattatttcatatttcatatttgttattaacatttagatattaatatttataaaagagtgtctaaaaattgcattatttggattcttgtttatctctcctaatgctgtccattaaagggttcagactcccttctgttagggcctaaggctctccttgataaacagagcagggcagagctatgtcacactaggtgtgcggcaaataaagacactctatagttattccatgattatttgtcacaaatgtggtggtagtggggaaaggcagtattgtcacacagagcttttacctgcttcctagtaaaaggaaatgatgccgtcaaatgctctggagattctttagaaaactgaaaatagagctaccatatgatcctacaatcccactcttgggcatatatctggggaaaaccataattcaaaaagatacatacattccagtgttcatagcactacttacaatagcccaggcatggaagcaacctaaatgtccatggagaaatggatagagaaggtatggtatatttgtacaatggaatattactcagccatacagaagaatgaagtagtatctttcacagcaacagggatggacctagagattatcatacaaagtgaagtaagctagacaaagacaaatattatatgtcacttatatgtattagtagaatcttaaaaaatgatataaacaaacttatatacaaaatataaatagagccacagacatagaaaacaaacttacggttaccaaaggggaaaggtgatggaggagggataatttaaaagtttaggattaacataaatgcactactatatataaaa

SEQ ID NO: 27451 - DNA, 1497 bp, Bovine  19866880928929
  misc_feature (1)..(1): n is a, c, g, or t
natcgctgctgtagacctcacgacagcccaggcccccgaacactgggtgctgcgtggagttgcccttctctgcgatgtcaagtaatgtggggcgtgtccctcacccagtaaatgcaggatccagagtatcacaagctctgttcttctgtatggatgttgtgtacatcaggttgattgtacggtgtgtgaattgcatcggggttccctgctccttcgctggatgcttgcttatatttagtctgtttcaccgttaatgaccaatcactgtgtgttttgaaaagctatctggtgatttaaaagtaaggtttataactttctattcaagcttggccctcaaatccagagtaatatgttttcttctttcaacgccaaagactgactagggtaaatagatggtattagtatttccctggaagggattattcttctgttaatgtggtttcggtgacagcccagttctctaagataacatgacaagtttgtgctaattctgtttctgttgccttttgcatttaggtcaggtaagagatttcttttcatgactgaagttgccagttaaacagatctgaaaaatggaaggaaatagaatggtgggttaagaatgtgaatagatgaatagacaatgcatgtaatcctatagaataaacatatggaatagtgttcaactccactgataattactaaagagcgacacttaccttacatttgttataattaaaaaaattaaagctaaagtgaattgtgatgaggtctttgtaaaagtgatacattcagactccttgaacaatagaaatcaaccaatccttttttgtaaaatgattaaataactaagcacagaaggaatcataaaaacattcacatgctttgacccttattttctctcctagaaacctaccaaggaaacaatttgaaagactgaaaaaatgatatataaaaatgtatttaatagcataaaaataataaatgcccccaaaggtaaaaataagtctatgcttaaggaaattagaggatattagacagccatgacccactccagtgttcttgcctggagaatcccagggatgggggagcctggtgggctgccatctatggggtcgcacagagttggacacgactgaagcgacttagcagcagtagcaacagcagcagacagccatgaaaaacaatagtgaagatttcataatgtagaaatggtgagcacaggctgttaagtaaaagataaagttagcaaaatattgagtattataactaaaatgtatttggtgtggacaaaagttagaagataatgtggaaaaataaaaacagatatgatcgaatggtaaaggttccagttgacttgaaaaaatgtaatgactggaagaaaaattaggaaaaggataaaagtcttagtgggtgaaaaattcacagtgatcttttattaattaggaaaatactagtgtaaggggcttctcagatgtttttactttaaatcagactatagattatacactgtttcat

SEQ ID NO: 27452 - DNA, 959 bp, Bovine  19866880982896
  misc_feature (1)..(1): n is a, c, g, or t
naatctgcctgcaatgtgagagacccgggtttgatccctgggtcgggaagatcccctggcaaagcgaatggcaacccactccagtattcttgcctggagaataccatggacagaggagcctggcaggctacagtccatggggttgcaaagagttggacatgactgaacgactaatactttcacagtataataacttaaaaaccttctatcttgaaaaatgttaccaagttaagaaatttgcaccagtctttcatatcaaataagatacttagacaagctttgttattcttgctatcagaacagctgtattgaacaattaattctctcaacttccagttaactttgggccctggagtatctagatgaggtgacagataacccagatattttttgtaaattttctccacaatgtgttaagtaaatgtatctttgtaattatctcagttgcatgcacgagagttgtttatacacaacttttacactatgctctggccataatgtagatgtcttatccaaacagactaatttgatcggaaacataaaacttttatgtagaatattagtttgttggtcattcagaatgaattagtattttatctaggaatggttttgttttaatttaagggctgaaaatgaatactttttatttactatctggagaagaaaatggcaacccactccagtattcttgcttcggaaggtccatggtcagaggagcctggtaggctacagtctgtggagttgcagtcacagacacgactgagtgactgaacacagatgagaccaatttgaaatgaagctcagtatattttaactttttattttatctattttttaacaggacagttatatttcatggacaattttgtatcctaagactgtgcattcctgtacaaatgccagtaacgttccccacatcatttttgcacccaagaatgtccttttttggtgatcacata

SEQ ID NO: 27453 - DNA, 1550 bp, Bovine  19866881032595
  misc_feature (1)..(1): n is a, c, g, or t
natcctcctgccctcagggtctcgaatgccacattctctttacagtggaacctgtttttgtctttaatatatgtgaagaatcattttgctggagcatctatgagctctttccattttcaaccagctgcaccattaactcagctagctggacaattacgtcaagaatttcttggcattcaacactacaaattaaaatgaaatgtacagaaatatatgcaaacatgtgctcactcactcagtcgagcccagctgttcgcaaccccatggactgtagcctgtcaggtacctctgtccaaggaattttccaggcaagaatattggagtgggtagccattactccaagaaggggatcttcttaacagagtttgaacctgcatctcttgcgtctcctgcattggcaaggggattctttctactgagccacctgggaagctcacagaagtatgatttaagtcaatatagagtacagaaacttgatttcctgaaacaattcagtgcacttttttacacctatatttcactctaaaggactgaacaaaaagctaaaattttaatcatcagttttaaaataacacatatatttatgacactgttgtttatttactagatactcaaggttttaaaaagaaatgcttcaatagacttccaatatctagttcatgttaatatctgaaatttcttgtatttcattaaagttgatgtgcctgtggcattattcatgtttgttaatgttaatgcttgtggtgttgcaaaaattgtgtaagtcacgatgttaggtttgtggctgatgatttgagtttcttggatctaattataaattatatgaaagatgttccttggcttcagtggagagtaaattctattaaaaaaaaaaaaaaagaaacttttggtcatttttttaatgatattactggacttatccattctttgaaagagccctgttgtcatatttatcatgtgctttctttgatttgcttggcctatttattgaaagaaaggaaatttattaaaaacacacaaattgcatagtctaaactagaaaaatgacatcattttctctcagatctagagaatagcacagttgcagtttatttcttgcttcaaaagtctctctcattattatggacaaccacatatcagttaaagcatttgtccagagttactgataagaaatcatctaagccactgattgaatgcagattcattcattacttagtcatggacagaggaatttcatcctactagtgattattaaaccatttagttcagcaaatatcaagcatgttcttctgtcccctgcatgtagcagagagtaggtgtcagtatattcctgtaaagggccagagaacaaatatttcagaatttgtaagccttaaataacctgttacatctactcaactttgttgtcatagcatgaaagcagccatagaaaatatgtaaatgaatggggttggagtgtacccataaaactttatttacatacaggcatccggtgcatcaagtcagatttggcccctggactgtagtttggcaaccactatcaaacagtg

SEQ ID NO: 27454 - DNA, 1436 bp, Bovine  19866881091633
  misc_feature (1)..(1): n is a, c, g, or t
ntccaactctcacatccatacatgaccacaggaaaaaccatagccttgactagatggacctttgttggcaaagtaatgtctctgcttttgaatatgctaagttggtcataactttccttccaaggagcaagcgtcttttaatttcatggctgcaatcaccatctgcagtgattttggagcccagaaaaataaagtcagccactgtgtccactgtttccccatctatttcccatgaagtgataagatattaaatgtagctccttgttctatacagtaggtccttgttgatttttacatatatgtataaatatatgtgtatatttgaatcctgaactcttaatttatccctccctgcccgtctcctttggtaaccacaaacttgttttatatgtctctgagtctatttctgtttttcaaataagttcacttgtaccattttttaagattccatgtataatatactttaaatctttttatttgattttttaaaacttactatctatagtctcctatgtacagaattcatcttacttgagaatagtttcagagtttgagagatttgcataccttttttgaagttgaccacagaaaaataattcttgatttttgtcacattaatttagctgattttttccaaatgagcaagaccatatctcagcaaatgaaagctgttaatgaggagaatcaggcagtgaatttcagatataagatttaaagtgtgtgcatgcatgcttcgtccttcaattgtttctgactctttatgatcccatggactgtagcccaccaggctcctctgtccatggaattctgcaggcaagaatactggagtgggttgccattcccttatccagaggatcttcctgacccagggatcgaacccaggtctcctgcattgtaggcagattctttaccgtctgagccatcagggacccacgatttaacctagtagaccagaaaccaaaagattttgagctgtgacatttgaagcacttccagattacattaattccttcgtcaattccagcatggtatcatttcccccccttttgtaacatgcaattttcttttccagatgataaaaaagtgctttggtcaataacatataatgaggataattatgataacttggggtgcagtaagatatgtattttcaatgtaattttgtatttttcatgttttgaatatctgctgacagatagtacactgcaaactggtgcagtgttgcctaatgatggttcattctacatgtgagttgtttaaaatctggatttacttggtatagattgtggaaaaccacatcgggaaatgaggatgaatcctaaagcgattacagccccacagatgttcggtcggcttgatgtggcgacaaatgattggaccgatgggatattttctactctttggaggaaaacattgagggctaagaaaggtaggag

SEQ ID NO: 27455 - DNA, 1196 bp, Bovine  19866881109957
  misc_feature (1)..(1): n is a, c, g, or t
nggcttaggaggtgtgggtggttcctctctgaattccatcattgaaagtttaattatgcagagcaactgtcctctggaaatgcagctgagctagttcagctgtcctaacatggtcttttgacctcagcctctgtgcaacttcttggaatgtgttggtttttaattaccaggcatagaaacatgtattaaattgtgatatttgccaagaattgaaacccagatctttccccagtgatcagtacaaagcagctgggctcaatttttctgtttcaagttagtaacgcctgtaattgctctgtgattctacatgcaattctttttccttgtcagaacatccattgatagctcccttcagagctctcaaacaactaagtttgttgggattcttctgtggtttgttttgaaatggcaggaattatgagagccattcaaaccgtcgttctggttatttttccttcctggtactcaggtttcctgacttgtacaacagttgaacatgagggttcaagtcatgcaacctctgtcacgctacagtattcttgaagcagatgatatctattatcagaatgtcatacagctttcatattttactctattataaagttgccagttattacatttttttgccaaatgatgcatgtctaccttttaaaatgccctataatcctaagaatgcaaacacaaccaattctcaatgttttagcataaaagcaagaggtagaaatgaccttttaggtcactgtatctaccttgttgtcaggtcacaacacggtccccagggaaatgatgcactaaatgtgtcatactttcttgcatggtgatgaattagaatgtctcagacatttagactgaaaaactttcccaagtcctctgatgcttgaaatacattttatatatagtaggtcataatgcatatgctgcaaaggtaaagaaggcaaagcagaatgagaaaatgggcacttgatggaattttaataaaacatctatgatattgagctagtttcttaaacgaaactttctttttcagtgcaataaaattccttagccttcttttgcttaaatctatttttctccataaaatatatttaagctctgagctagtgacaggattctctgtggcttatttctttgaaaaataattctgacagcgccacaaaaggactattgaaggattcttccctccggatgtaaccata

SEQ ID NO: 27456 - DNA, 1425 bp, Bovine  19866881142959
  misc_feature (1)..(1): n is a, c, g, or t
ngagaaaatcctggtgaacaaaaaatatttcaacagagcaagaggaagcactgaaccaaagaaatctatgagtctctgggtcacatgtccaaagtatggtagcattctctactgctgttgtcgaacagaaatattaggttggtatctgtctgtgctgttttacttctctttatgaatcacattcattctccatcttaatctgtcacctcattaaagcatgtacacaactaaaattttctagttcatagatgttgatgaaaaggtttctgaagtaaaataattattctaaaattcagaataattttccctctggaatctagagcctgtcgagctgtcagctgtgcaatgaggcttgtcagcagcaaagctgaaatactctgcaaaatccaagtggctaattacatgttgcgttattttgcccaattgagagtctccaacacatcccccaaagagaggataatgaaataaaaacagtattatccatgctgtgccaagggctaaaattaaaacaagtacttttgatgttgaataaattaaacagagggtactgttgtgtttcttaattaatctcccttgaagtgtttggtattatagttctcaaatctcaggggaaagattgtcctacctgttgctcaggagggaacccagtaacatcaagctgtcttccatgttggcaatgatttctgacgtactgtctcctctcaggaggagctctccacgggttttaaagctgccaaatgtgaatgttttgttgtcccattcgttaatcacttgcttcagcttttgttcaatgtccctctctttcacggcactgatacagatgtcctattaaaaatgaaagctctcatttaatcacaccaaaagtcacacatccttcttgaatagtcaattcagcaaagatcctgtcttcactcctttttttatatgtatctataaatacttatatatttccagatccagactatagtatgtcctctcccacatgatgtagcagttcggatgcctgattttcacccaagcgggccaggttcgactcccagtgtggaaaggaagatctctgggggcttccaggtggtgctagtggttaagaatgcgcttaccagtgcaggagacataagagatgggggttcagtccctgggtaagaaagatgctctggaggagaaaatagtatccctctccagcattcttgccagggaaatcccaacgacagaggagcctggtgggcaacagtccatgaggtcgcaaagagtcggacatgactgagcgactaagcacagcacataacagtgtctacagagatatatagataaagatttaccctaatttgtaaaattttccaccaaactactccagaataaagatgacagaaacgatgtgcagaagtgaagtaccattcagccatgaggaaaaaggaaatcctgcca

SEQ ID NO: 27457 - DNA, 1431 bp, Bovine  19866881159295
  misc_feature (1)..(1): n is a, c, g, or t
nttgttgcagagtatgggctcaaggcaccatgggcttctgaagttgcagtgagtggacttagttgctcctcatcacatgggatcttcctggaccaggaagcgaacccatgtcccctgaattggcatgcagattcttaaccctaggaccaacatggaagtcccatcaaatttctggattaactggaaatgcacaactttttatccaactcattcaggttctttggtttatgagtcagtgtttattgatacactcaagattaggaccaagaaggaacatgtcagatgtgaggtgaacacctctatttgagcctctcaacaacatggaggcacatgaggaagattaggaagttaggagactgaggaaaagactaaggcaagaatacaaggatgttcaatcacaatgtacacacgtatctttgcttttctatgccttgtgttatatatctacaaaattagaaatgtagatgtgttggactgaggtcccatctcgtcaaatattggaagatttcagcattcagagaagggagaggatcaaaatataaaaaatgcagatactgttctggctatggcccaatgcctggatatcctatgatagcatacttcttaaacctggccctttatgatcaggccaacctgtgttcaaattatgactctattattctgttactaactgagtttgaaaaagttaccaatatctctcagctgggatttcctcatcatggagatgatagtagtccattccttatggtattttttgaatactcaattacataatacacttaagtgttagtcactcagtagtgtcagactctttcgaccccatgaactgtagcctgccaggctcctctgtccatggaattttccaaacaagaatactggagtggatttccatttcctcctccaggggattttcccaacacagggatagaacccaagtcccctgcatttcaggcagactctttaccatctgagccatcagggcagctcagataatccacttaagtccttgtaaatatcttgtgcatgataatattaaacattatcattatacatatcattacttttgttatgcccccttcttaacatgagggatgacactaaaatagagttaggttatgttatcagtatcagtatcagttcagtccttcagtcatgtctgactgtttgcaaccccatggactgtagcatgccaggcttcctgttaggcactgttttacaaagaattttgtttaccctttgtttcatcttactggttcaaaagacaatgatttcacccagttcagatagtctcataaataagacacagaacgattattctattgtaggtgttacaaagaccagtattaatcaaaaataaatgtatgctgtagaattcaatacatacatacatatatatatatatatatatatatatatatatatatatatata

SEQ ID NO: 27458 - DNA, 1105 bp, Bovine  19866881235017
  misc_feature (1)..(1): n is a, c, g, or t
naaattaatatcctgctggcaccaaaatatttatgtgtgtgtcatttttgttacatttgcctttctattatatgaaggaaatgtatggatgttagtctttcttaaaataatagaaaaagttgggacttagaataatttgaaggactttatccagattgataggatggccaaattgtttgtggaagtatatatgaccaagtatatacttggtcacagtccatagccatcaacccttctggattttgtgtgactgacctttcctcaaccacagaaaatcctctgatctcagccccttccctcttacaggagctaactgaatcagaatgtaaacttgacctacattcagctcatccaaaggttggccatcaacttataatactgcctggcttgaaaagatgagctggactgaataatcaaaataaccgtggcaattaaaataacttaaataaatcaaccctacaaatgtagttcatgtaattttcctttagattctaggttacctctgctttcaaaagtcccaatttaatcaagttagacactttcagataaaataatgagagtctaaaacttatttaggtagagtatcttcttaataatataaactcttggatgttgaaagatctggattctggaatttctatccatattcaggggtccttgatgatctgtaattcattctccaaaccatcatccatttgtgagaatgtccacatgctgttgcaatgcattctgggtgtgtatgtcagcatctcatctcacgccaggggattggttgtggttgggacacacagcagcaggcttacctttctgcattttaatgagtgggaagtctcaacactcattaagcctgaggttctgagtgacacattagcttcatgttgggcatggcggtaaagctatccttggtttggtacaacttggtgaagtttacttaattggaccatttagaatgaagttggaaatgctcttttctttcaaataatggcattttcactctcagcttaaagtttttttttctcatttagatgtaactctgaaattataatattagccagtagaaaaagtgattgccaagagctgtaaacattagaatgaggagacaaat

SEQ ID NO: 27459 - DNA, 846 bp, Bovine  19866881360851
  misc_feature (1)..(1): n is a, c, g, or t
natattctaagacggttgcttaaattttccttattctttacagtgtggtaggattattgattcacctaggccttgcaatgattcctcaacctgagctgaagaaccctgagcactgaagaaatctttaagggacaaccagggctgaaggtcgcaagagcattcaaggatctcccataaacatcagcattaaaatgcaattacaccaggaagtctgcaagaaaatcagtgcgcactctaaaggaaggctcaaagacctatttccctctttaattacaccaaaaaagattccaatcatacctcaagaatagggctccaatcaaggatagaagaactcatgaaaaccatcccatttcttgagacggtagcaggcgaagcgttgtcaatgttatgaggttcaaaaacaatcttgcagtttggagccatgggaatccgatcgccattggcaagggttagtgttttgttatcatccaaaacggaattcagattttcaatccagatggcatctactggaccatcaagaactatccagatatgctcccctaaaacatcccaccaagggcaggcggaagagcatacagacacatatatgcatatatacataactactatgcttgaagaaatatcataacaatgtaattttaattaatttttaaataaagctttgacctaaatgattatcttatttctttgcataggggtcttccagttctttatgtagcagctgtttaaagcacacaatcaaaacaaaaagtcatttgttccctgaaaagatgctcattgagcaccttctctgtatcagcattgttcctgagatagggtataaaaaagacaacatcctgcctgtca

SEQ ID NO: 27460 - DNA, 1230 bp, Bovine  19866881390498
  misc_feature (1)..(1): n is a, c, g, or t
ngcaaacagtatgcttaactattaggagaggagattagcacataacagcctgaatgtgccacctttatttccattacatcagaaccaacctttcataatcttttttacataatggggtgagacatgatccagaaaattattatgaaaataagagcttcatgcctcttatctaatgtcatattttatagtagagggcaaatttcatttcacatttcctattctcaacagctaccaaactctctttctcatccctgatctttctttaaaggcaaaagtctgcatgacaactgaatgtcatgaactacatgagaaagaccatttgcaatcaacaaatgtagcaaaatttgttaaatatgtgatttgtgttcataaaaaccctcaaaactactaagcacttctactagtaatatcacttatcatttctgcatcaagagattagtcatcttcaatttaataaccaaaagaagcataagacaagtgagagctctcgatgacgctacatgacatttcagcattaaaaatgatcacgtaaagaatttcaaaataaagtctcattgcctccataacaccttagctcagatcatcagaaaatggccgaaaatccggctaaagactgaaaagaaaatctgacaatttctcttcataaagatgctctttgcctgaattttatcttttcttgaattcattcacactattcctggtgggtaaacacagagagtgtctagtatttgttcttctgtatatgccacagcatttataaagcatttaccaggtcatcaaagatatctcgctggtgcacatgaatagtaatcagagtctcatatttaactcgctccacggagctcaggtccttggttgtcatgtctatcaacatggtcagtagctccaggaaagactgattggttttctgcatgatttttttatcaaacttggcatttcgaagggcctcttctgaatcccgtgtccatatcatttgaattcctaataatccaaccttacggaaacaaaaaaggctttatgagtgtatggcatatgaatatatttaaatagaaattacaacagttgcgattattatgcaaatgccaagccatcctgtattacaccagcttgacgggttgcttcaaaatctatggaaaccctatgcatattgtttacctgacaattaaacatatacagccttgtgacatggctacaatttttttcatctcccttaaagtcatacctctccct

SEQ ID NO: 27461 - DNA, 1133 bp, Bovine  19866881627975
  misc_feature (1)..(1): n is a, c, g, or t
nagaacctactgtatagcacaggaaactcagtgctctgtgatgacctagatgggaaagaaatccaaaaaagccgggatgtatgtatacatacggctgattcactttgctgtacaggagaaactaatgcaacattgtaaagcaactatactccaataaaattttaaaaagtaccatactcttaattctgtgtatgaaaaattgtgtaagtggacaaaatcgacaaatccaggcaaaaatgtgcattttgaactgggtgatttttgatgtacttttttttggttttatattgaattaggtcttaaaagaagtgacaatgaaagcacaggctgctgaaaaggtcaaagctgaggtccagaaggtgaaggacaaagcccaggccattgtcgacagcatctctaaagataaagccattgctgaggaaaaactggaagcagcaaagccagcattagaagaagcagaagcagccttgcaggtacatctttgtgatataacagatgtcatcttctagggcctcggaggaagattaggcagaaaagatgaaatacaatgaagaaatgttctactgtttcagaccaaagctctcttcactggaatgatttcaagtggtattttctgcttggagatgttatttgctttttttagatattgcaggtggcacttcacatattaccttctcactcacaagtgatgggcagtgccatataataggggtctgggtgccaccttctcatttcaactctgttactaataagctgtgtgacgttggaaaagtcacacaaaattcctaaaatagttttgtcactcattcattgaggatgttagagtaggttagtaagatacagctttctttgagtgtacatataaattatccaaacaaaggactgctgatctagtgctacgcattaaggtcaggctttgatcaggcttccaacacaatgcaatatgtggcaatatcataaatgatgaaattagaaatgaggttggattctgggaaaatatgttgactctagtgaagtaggctatgtcttcaagggctggccctttttgagactggtctagtttgagatgttttggattcaagtcattgtttttactgtttcgtccctggtggtccagtggttaacattctggt

SEQ ID NO: 27462 - DNA, 1142 bp, Bovine  19866881752473
  misc_feature (1)..(1): n is a, c, g, or t
ntgagttgccatgtcctcctcccaagggatcttccccaacccagggatcaaaccccggggtctcctgcattgcatgcagattctttaccttctgagtcacaagggaagcctggatatatgtatctgtgtagctaattcacttttcctgtgcagtagaaaccaatgcaacattgtaaagcaaatatactgcaataaaaatgaaaaaaaaatagaagtctcatctaaaaatttacattgattaccactttatttacctctaaataaaaccgattttcaaaggttataaatgaatgttatgcaagaaaatttaggtacctcattctctgttttccagaattagggacattttggggtttttatgagtaatttctatcatttcaaacatttctggaattttaaaataatcgaccgtgtcttaggggatattttcacagatgtttctgttgaccttttcatttaacagaggacaatagagagctatgtggataaacgcatgggcaccacatatggccctccagcaggaaagaagatgactatcttcattgatgatgtgaatatgccagtaatcaatgagtggggagaccaggtatatcaatcctgttgggcatcttatttgcttagttcatcattgatttattttttgatgagtaaatggttttctgtttttttcaacttgcaattcctgaattccaattaagtccgttatttagatcctgggatataaaggaatgaccttttaattctgaaagttgtctttcttaggttactaatgagatagtacgacagctgctggaacagaatggattttataatctagagaagcctggggagtttaccagcattgtggacatccagtttttagcagctatgatccatcctgggggtggacgcaatgatataccacagcgactcaagaggcagttctcgatatttaactgcacgctaccctctgatgcttctgtggacaagatctttggtaaaatgaatgtcagtggggcgtggaaggggagaatccctgcttgggttgcaatgagaaaatatccacccagaggtccacacagaggggagcactgagtggttccctagtctgctgtctttatcactttcaagagtgtattttgtttgtaaaagcatttttatgt

SEQ ID NO: 27463 - DNA, 1638 bp, Bovine  19866880569067
  misc_feature (1)..(1): n is a, c, g, or t
nttaggataatggttgcagaacgttgatcataatagttcatcttcattcctaagcccatttgcaagcccacccaggacacattaagcccagttctatctgttggtagtactactttgctagagcacttggtaggatattagctctcactacacttgggtttatttttctggttctcagcctaggattacttgagttttaccttctggttgtcttgaagctgccaaatcaggcagacaaaaaacattctggaatcaggaatgtggtgttttgcttaaagacttgtaactgagcatggctcaccacttctggttctgtgcggaggctggcctaggtctataaatcctacttgaggaaggtagtatctttccaggaaagatgattcatctcttcagaaaatgccagcccacctggattgtactcttggttcttcaggaagccctgagaatgaagtatgtcatcaatacagagatacacagtgagattttaggaaccattatagcagcaaaatttttaaagggacacagataagtaatttgataccgtaagcaagtttacattctattcatataaagggaatatgcctaagtgattataatagataacagtaaatttaacagtaataataggaaagtaggtgggctgctgtctatggggtcgcacagagtcggacacgactgaagtgacttagcagcagcagcagtagcagcaggtgagtcctgagcctggggttgggaggcatatttctaagaaggctttctagaataggtgatgggtaagttgggtccaaataaatataatctgttacaaagggcaggaaattttgtgcagaaatcgtagcctgagaaaagtcttgggatcaaaatacaatatcgtgtttagggaacaagaaacaatttagtattttcagaagacattatataaagaagagtgatgggaactgaagttgtagatacatttagggttccatcctcgagagtcttggaaacaacgtaagggaaatttgagtgtagcctgtgggttatagatagatcttttagatctctagtaggaaaggtgatagatttgatagatttgcagttgtaataaattccctggttctagaaaagtaagctgccctgttgtaaggacagttgggaagcctcaggagaggcccacatggtgaggcactaaggctttctgccagtagccctgtgagatcatcatctatgaagtggatcttccagtcctggttaagttttcaaatgactctgaatgtgactgtggggagaccatgagccgacaccatgcacttaacctgcagaaactgtgacataagtgcttgctgtttcaagtgtctgcatttggcataacatggtctacaacagtagattgatacactgccttttgaggagaataaaacttcagtgcaagtagacaagttaggaggctgttgtagctgactaggttagaaataatataggtatagtttaggggaggtaaggcaatgccaaagagtgctcaaactactgcacaattgcactcatctcacacgctagtaaagtaatgctcaaaattctccaagccagccttcagcaatatgtgaaccgtgaacttcctgatgttcaagctggttttagaaaaggcagaggaaccagagg

SEQ ID NO: 27464 - DNA, 1163 bp, Bovine  19866880625060
  misc_feature (1)..(1): n is a, c, g, or t
nttaaggacaaattgggaagaaaagctgagttatggagatagagactgatttgagatattgatactataatgtaccatttgcagtgaaattgattccttgctcaagtatatcttgttcataaccacatattgacgtgtcaagaagcaccttggattctgtaactaatttgttatctggacactgtaatggatacagtgaaaaaattgtcttgtgacccatttctaattttccaaacaactttaaaatacatggtttaggagccagctggaatattgcttctttgctatagaagcaatccttttgaaactagaggggaaaatgaaagaaaaaaacaaaaccggtacctggaatctgtgaattttcatggtgctggacaactttaagaaagaaaagtaagaggtttaggaaataaagaccaatttaacaagagaaattttacctggcagtactgtttatctcaccaatataatggcctagttagagttttattttaacaccctatttattttagcagtacttatatcctgaatggatttgaaaagtgagtagattttttttttcaggaagttctaaaagtacataaagatttaatgatgtgttaaacagtcaaatagtctttataattcacaaaagactttttcacacttgaaaagggaagaaggcctcaccgcctctatttttgttaaaattataagaaaacctgtacattaatctttggagcaatttgagaggaatcaggaaactgctatttatagtgatacaattatagaccaagagatgacatgtggaacttggctaaaaggtagatgattttgttttaaatttaacagtagtgctttggttgttttccctttgtaacactcagatctactgagaagtcagactgtgttctgtgatgaggtggtaggggaatagggtaattttagtcagaggggatatttgcttctgatgaaatgatcatttttagaaaatataaatgtactctgaaaattgagtgccagattgtatgagcactgcttcaagtatttttttaagagtaagaataagaaagaataatacaaaaaaaagtctttgaactttggtatgaagtggccagaaaaatgtagagaatttgggacaagtttttgaaaatgagattgagattgatggtaccatcagagtt

SEQ ID NO: 27465 - DNA, 1313 bp, Bovine  19866880741418
  misc_feature (1)..(1): n is a, c, g, or t
ncctccttataatgaagcaacatgatctgacaattctggtcttgttgcattttcttcatcatttccttattctctctctctcatatctctttttttaaaaatttttttttaaattttattttatttttaaactttacataattgtattagttttgccaaatatcaaaatgaatccgccacaggtatacatgtgttcctctcttcgtggagcttcagcttaggtgaaagctgaataatcctctctgcctactgtcaataaagggttagcaagaccctcctccttctaaatctaatttctatgtcctctttgtgttttgaaaggaaactttatatgtgtggaatgagcctaagtggtgcattaaaggaatttctttgcctgagaaaaagttgtcaacctgtgaaacagttgacttttggctaaaagtgggagcaggagtgggagcttttacagccgttttgctggtggctctaacttgctacttctggaaaaagaatcagaagtaagtaacttccaaataagaatgaggaatctcttttattgtgaaaattttaggcttaatcaccatactcaacaatttctcccagagccaaaagaaatttctcctagttgaaagagttatgggaaaggtctttaagaaggcagatggaattgttgttattctgataacagaaagactggagaacattagagataattgcactggactcactgtttttatgagatagagaagaacagaggctccaggctactcaggtagatgggagcagagctcagagcgaaaggcagattttctctgtgtgtctattttattttcatgacatcatgctgccttcttgccccatcattgttttttcagtttattgtgggcaaatatttgcaaagaaacagtctaagcatgtaggcaagtctcacctttatttactccaggacttcaaggatctgaagttgagtattgagtctaactaccaattatatattgatacattatatgattaggctttttaaaaatgatttacctgtcagtggggctgtgaaagttcttttttgtattatctaaggacagttataatctgaggtgggaaacagaaagcaatgagtgaaagaaatagtaagaccaaatcacttgcctatgtacaatgttctcatcttatgaagtaaactttggaaaactgcatattaaattagttcccaaatatttgtaaatgatgaaaatttattcatacctctaattttctctgtcttttcaaaagtttgtcacaattggccactttatgtgatgtaaaataagtgtaatagaattaactatattgca

SEQ ID NO: 27466 - DNA, 2100 bp, Bovine  19866880800508
  misc_feature (1)..(1): n is a, c, g, or t
naaaagatgataacgtttttataacccagaaaaatgtttttatgaggctacctgtataaagacttacagaaatcaatgtctatgaaataatttaagatgtggaatacccctgtttccctgccaagaattagctccaaaaggactaaggccttctctttttcagcagcttataataatgactggaacatgcaataattattgaaaatgcaggtgttagttgctcagttgtgtctgattctttgcaaccccatggcctgtagcccatcaggctcctctgcccatgggattccccaggcaagaatactggaatgggttgtcattttcttctccaggggatcgtcccaatccagagaatgaacctgtgtctcctgcattgcaggcagattctttactacctgagccatcagggacccatatttaataaatgaaggaatcctacttcaagttttacatttactcaatggctatcttccacattgaaatattaacattaatttctcttcatatctcataccttaagatttaaggattactattaaaaggattactttcaacccataaattataccattttcctaaaggcactttgaacccaaacaaaagaataccataaaaaatttttaatttgcacatgaaaagcgatatcaattgaattcaataagtccttactgaatgtctattatgttcaaggcactgaacaaggtactgaggagaatacagaaaagaaaaagttaccatgtcttcctaagaatttatcatctcacaggagagataggatatgtccatatgtgactatgctgctaagtcactttagtcgtatccgactctgtgtgaccccatagacggcagcccacaaggcttccccgtccctgggattctccaggcaagaacactggtgtgggttgccatttccgtctccaatgcatgaaagtgaaaagtgaaagtgaagtcgctcagtcgtgtctgactcttagcgaccccatggactgcagcctaccaggctcctccgcccatgggatttttcaggcaagagtactggagtggggtgccattgccttctccaatatgtgactatagtagcaggaaaattcaggagttcaactgtgaggccctagagtgagcaataatacttgtggctggcatgaatgcagaaagtatcatatttaaaaagttgcttctgttctggaccttaaacaatggttaaaatttcagaaagtggagagagtcattctagactgatgcaggggtagagagacggtgtggggaagctcctgagggagcagcgtgtgagctggctaagctgaaaggtggggtgtctgtggttcagaggaggtacagctctgcgagtggacagaacaatgattaatatctctccagtgcatgccaagtcacttcagtcctgtcaggctctttgcaaccccatgaactgtagcccgccaggctcctctgtccatagcattctccaggcaagaagaatagtagggttgccattcccttctccaggggatcttcccaacccaggaatcaaaccctcatctctttacgtgtcctgcattggcaggcgggctctttaccactagcgccacctgggaagccccacacatctcctgtaggccaagggacacctctgaaagcatataagcagggggatcctcaagcacaatgtgaagacaactatgaggaaataaaggtttgggagtcagggagatgagcgggctcgtatggcagccattcgggtgagaggtaatgatggcctaaactagggcagcggcaatgggaatagaaaacagaatgaatcgaacagacacagagatgacagtgcctggtaggtaagaaatagctgttggatgaaaaacaccagccaacacaattaagctaattgtcttcctccttctataataggaagggtcatgcagtatcaaatcctggatttaataaagggaaagcggggaagagttaaaaggctattttttaggaacttgagtggaaagaaaatgtaatattccaggtgctatttaaaaacaagacttagaaatgaaatcaatattttccacatgattagatctgatagtatttatccacccatagtaggttaaacca

SEQ ID NO: 27467 - DNA, 1301 bp, Bovine  19866880803492
  misc_feature (1)..(1): n is a, c, g, or t
ngctcctccgttcatgggattttccaggcaagagtactggagtgggttgccattgccttctccaataggtgctggtactttccccaaaatcctgggacagaccaaattctgccacttatatagggtatttgaccttaggtgaggtactttgggcttccctggtgcctcagacggtaaagaatccacctgcaatgcgggagacctgggttcgatccctgggttgggaagatctcctgaaaagggaacggttacctactccagtactctagcctggagaatttcatggactgtatagtccatggggtcgcaaagagtcagacacaactgagggactttcactcactcactcacatttaagtctttccctggtagctcagtcagtaaagaatttgcctgtagtgcaggaaacctgggttcaatccctggggcaggaagatcccctggagaaggaaatggcactccagtatccttgcctggaaaaccctatggacagaggagtcgggtgggctgcagtccatagggtcccaaagagtctggcacaactgagcgactatcactttcactttcttttcaaggtacttattctttctaaacctcattttccttatttgcaagtggcataaaaatagtgcctttctcacaggtggttgtcaggaaaattaaatgagatgatgcatatgaggccctcttcaaggtacttcgcacattgtgagctcctagtgaatattagcaatcagagtgaacattggtgcaactttcagaaaaatccacctggacattaagttgaaaaaactacagtctctttagaatatatggaattatacttctactctattgtatactaaatctatgctactacttcagtttaaatgtatactttcaagaggaatattggaaaattgaggtgaatgtaaagtcagatcatgtgaaaaattgtggaagaaattggggacacttattttggagaaaagaagattatgatagaagaagctattggaagggctgtcactgaaagaggaatggggctggccctgtttgggcccgagttagaactgtggctgtgacacagatattttgctcccctgaagaaagacttccttacatgactgtctgcacttctcagctcactgaaattttttttaaagtctggaaagtcatttgagggagactggccaagaggattcagggatttgagatgggatttggctcagtgatctttaaaggccaatcctttcctgaggttcagttgttgacttctttacagtgcttaacatttaaaaccttaaaaaaaatctgcatcc

SEQ ID NO: 27468 - DNA, 1018 bp, Bovine  19866881052981
  misc_feature (1)..(1): n is a, c, g, or t
nctgtgttggttcaacctggtgtagcaagacataacgttcttacagccattgtccagaggtaaaaatcctttctctatttccattgtaattggataagctcatttttgttgaacaggagctcattttcagatactgcaaaagatactgcagtctttttttttcctttgccaaagagccatatgctgtggagtcattctctattgagaactctcttgatcatgagtctgtaataaattttcacatgagtctcggctgagaaggaacccatgctgctttgccattgtagaacaactgcaggaggaatatatgatataacaggtgtctcatatataatcttataaatagctatgttatttgaaaagatcatagtagctatagtataagcagtatgtctcttgcaatgggtaaaaaggaaaataaacctgtaatttcctgcttttagacctcatgtctctccttactgcaactacacttttataaagtaataaatcaaatgaagcatttagaaatttccctagcataggaggcttatatctgaaggtagaataaaataagtgaccagggttttcctaccattttcatattcacttggtaggaaaatctgatattatatagatattttatttttattaaattttaagtagaaatcacatagtttatttaacttctctttattgttatttaaacaaaaagttaaattcaagtcaatgaacttttttaaagtcatagattatacactataggtttgcagtgagtaaatctgtcatttccttggcaacaggccttcagagaccttctcagactcttaagagctattctttctaccccctcttcaacaaatgaccttttacaagagacttttaagcattaacttccttgatagcctgctgcccctaccctgcccctgcttatgtgctcatccaagctcatcctaaactcctttcctccaatcctacaggatgttccttctcttatttaaggctaatctattcttttgtgctttatgatctcatctcc

SEQ ID NO: 27469 - DNA, 2173 bp, Bovine  19866881059756
  misc_feature (1)..(1): n is a, c, g, or t
ngtatttctttcatagaagcatcaggcccctcaaaaaaaaaattactaaaggtgaaggtaggaacagacatccgatagcagtagatctcagagaccctgatatcctaaagtcatacttgtaatgctgttcccacaccccacacacataagcaaacagccttcatatttggaagagaaaaaaagaggtcattctttgttttgatcagctttagaagcaaaggatcttcccagagctgatccccaaagtaaggcaatcaagaacggatgctgagaatcttaatatctgattttttaaaaataaaagcctttcctttcccatttcacctggcagtgtcttgttctaccagcatgggtgtacagtgtaagtgtacagctgtccccctcaaaatggcatcattttgagggggacaagctgggtgaacatgtaaggtttcacaccataaaatcctatagggcctgtgcaggttagaatgttgttgacactgatatgagtttgcatcagcatagactgaggggagaagagagaaatggagtgtgcccaatagtcttcagacctattatgtacccagacatggtcctacgggatgtgtagttctcttgctcatggtgatcattcaaatatatgtatgtcattatcattacaatcagccaagaggcttctgctaactaatgatgcccagatttgggtcccagaggagccatgggcatatggagattgatttttttctgccaaaaccttattcagaaagtcacttgtttaggtgataatgtgtgaacagctcaattaatagaattattcattattaccaagaatttgcccattataaaaagaaagcagtagtctaaaaagatcaagggagggacttcccttgcagtccagtggttaggacttcacctcccaaggcagagggtgcaagttcaatcccgggtttgggagctaatatcccatatgcctcagggccaaaaaaacaaaaccaaaacaaaagtgatattgtaaaaaattaaataaagacttaaaaaatggcccacatcaagcaaaagtcttttaataaaacaaaatggtaaagggaacagtcttctagcatcacagcataatgtgccatggatctgtagcaacagaaaggtaactgcatgagggccagattttgtacttatcagtggtcaagctttgaagataccccagttggcaggggcaagccactgttcaactctgaatagcactttataaaagacaaaaaagcacataataccaagtttcttctctacactgatagttcagaaaaacagtataacatacctgcactttacagttcagggagtctcatgacgactggccagcaaattagcaagttatttggcaacccacactgaagtgacggtcttcttcgccacaggcataagtatattataaacataaatcctgtctgaccaatgtaggaagagcctagagtttgcagcaagttaagccatttgcttcgggcagaaaacacctagtgcatccaaatcagatagacgtcaatccattttcccttaagaaagccaagtccacagcactcctgaaaacctctttctactgcctttctctccctcattgaggaaggaaggacagtctgcagctataataggtaaccccatatacatcagggaactgatgtttaatacctctccttttatttgatatttccatttacttgtctcacaaccactcttacacagcctttaaatcactttccctttacttctactatcttcctaggttttccccaagtaactatagcccacctcctttaatacagagactggagctgcaagggatgatatggatcatgtattctaacaaacacattcatagatgagaaaaccaaggtcccatctattaggtactttatggaatttgataactgaagtcatagataaaactctcaaaggcgtctctgtggctcctctggcctctctggagtttctgcctcggttcagttacagaattcatctcagagaccattctgacagtgagaatcttagcatctgcaaattcagtgatttcttttttttaagttcaaagctttctcttaaacacagcacatgacgtcatctttgttctaacagcacgggtgcagacttgtgttcctctcaaaaacccgtggcaaggagttcagcaccataaatcacgtct

SEQ ID NO: 27470 - DNA, 1119 bp, Bovine  19866881269208
  misc_feature (1)..(1): n is a, c, g, or t
ngaagccctcagcgaacattgctatctgtaaaacttaatccaggtagcaagaatatagtctcgcaaacagccaacaaggagatgaaaagcagttttgcttgttaaggctaaaataattatatttctctttacaaccaaactacttcctaccaaataaaagagctggtaaaaatggtttgtagactagtacaagtttgaaatttcttcacccagctgaagcagtcattcatctttatctaagaaactctgagcatttcacacctttgggcatttattcctaatataaacaacaacttgaaaaatgatggactcgaagtttccagattttaaacacactaagaacaagagaggcaaagtgacctgctggtgattctaaaggctcagtagggcggctctgggaagacccacaagacctcactgggtctctgacctgggtacttcccccacaggcaggaaacctgctgtcttgtcacatgaattaatagttcatttcagacaaccaaagagctgaaataggagtctttacttgaaagtcttactctgatttgtgatttgtgctacttcatggacataaaaacacgaatgggtatcacagatctgtctccccatctggtggaggctgtttcttttgaatgttaataatacatagcagatagattattagtaatattttgtattttgcttaacagtttcaacgtaccatgtgttggtgaatataacataatggaaactgctttcacaaaatatgttgaaatacgtgccaatttgggagatgacactctagggtcagaaacagttggaatttgtatctgtctcaaggagaaaatgagatctggagaatataattagcagtttctattttgaagcatcttatttttccttaaaaaagcaaagaccctctacaagctgatgcattaatcccagtgatttctgtcaaggtccagatatactggtggccagaccatacctcacttcagaattaaggagtcaaaacatggggcttagatcctccacagactttgctcaagagctacccttgagaaagatgtttaaaagaatgttaaatcccccactccctccaaaaggacctctcccttagttcctaacagtgtctgaatt

SEQ ID NO: 27471 - DNA, 716 bp, Bovine  19866881282518
  misc_feature (1)..(1): n is a, c, g, or t
ncttatagcatgttctaagtacaatctggaaaaaattaagtcactttattcactaggctgaaagccatgcttttctctcgtcctagtctactgctgcacggagtctacaaaaccacagcgatatgctcagacctcctggggtaaatgccgccatatagcctatagcaagaaaaaaactccaattgggaaattcaacatgggggactaaagcaaattgtgaatttgtaacatagtactttacatatagaactgcgaaaaaacaataaaccaaaaaaagactctcctgtaaatgtcttagactactatctctgaatcaagcatccaagagtcatagttttcataatgcttggatagagtatttttaaaaactttcagcttcatctaatataaaattaacaattacagttccccaatcgctgattctacaaatattcttaaatctatattatcctactcagcttgctatttgctaagtacatcacagtataataataatatattttataaaagcagttctgcttcatctgtttctgttgggaaacaagcatgaggattcttacataagggaatcagaattggttttccttacttaaatcctgggatatgcaagtttaagatcaggtaatcattatcggaacctccagccccactctggatgtgatctccagccacctcccaacctagaaaagataaagcttatcagcaaaaactccaga

SEQ ID NO: 27472 - DNA, 2553 bp, Bovine  19866881334187
  misc_feature (1)..(1): n is a, c, g, or t
nttgaagttgggtgtgaccctgtaactaatttctagtcgataaatgtgaacagaaacacgtgccactcccaggtttatacttttaggaagcaggttcaactacttcatactctttttctcctttcactgggtggatgctgatgagaaggaggccctaggaactggtacagcttcaagagggaagggacatgagttcctgaatcagcgtgtggaagagagatgcccatggaccaagaccttggcctgctgcacgagggagacataaactccattgtatttgaatgcttacataatttggatctatttatccacacacgcaagcctaccctaactaataaaatttgtctacgcatcacagagacatcagccacattctctacatttaaggaaagagtaaaagtcagcagtgtgaaatagtaggcacagaatcaaccagagaaggtggcataaaaacggcagcagatgttggcaagagacatgatgagcagcagctggaagagcggaaccagacacgcctagagagctgctgctcttcagttcagttcagtctcccagttgtgtccaactctttgcgatcccatgaatcgcagcacaccaggcctccctgtccatcaccaactcccggagttcactcaaactcatgtgcatcaagtcggtggtaccatccagccatctcatcctctgtcgtccccttctcctcctgcccccaatccctcccagcatcagagtcttttccaatgagtcaactctttgcatgaggtggccaaagtattggagtttcagttttagcatcagtccttccaatgaacacccaggactgatctccttgcagtccaagggactctcaagagtcttctccaacaccaagtttcaaaagcatcaattcttcagtgctcagcttttcttcacagtccaactctccagctataagagacagtgttgagggtacccagtcctgtacagttaagaacaaactttaaagcaattacatagtttctgcatatggtaggtgtcttcagaatattcaggttgtgtgtagatagacagatagataggagtatgttatacatggggcttccccagtggctcagtggtaaagaatctgcttgcaatgcaggagccacaggagacatgggttcaatccttgggtcaggaagatcccttggaggagggcatggaaatccacttcagtattcttgcctggagaatcccatggacagaggagcctcgtgggctatagtccataaggtcacaaagagtcagacatgactgaagtgacttagcatgcatgctgtatatagatggcttgcaaatatgtagtcagaatgattatcctccaaaacatgaaaatactacagttgaaggattatggatgagtgttttttttccatctgaatcatctaaactgtttaaaagaaaaataccatccatttatggtgaaagtattttttcttgactttgaaggagacaaaaaaaaatcttccttttaattatatacttccatgagaatatttaatttctatgcattcaataaataatacagatgtggttcaaagttctgtccaattcctatttggagtttttcaagaaatgaatatttatataccacacagactatgactggatgtttgccgttccccagttccccagttccccagttacgtaatcagctcctttgaaggcagacgctatattgtactcatggattgtcactggcacttggcacataggaggcattaaggaatgttaagtgaatgaatttatgaatgcttgagtattccagtagcttttaatatgtaaattcaatggtaattgataaattatctcagccttagaatcttgttccctgttatttcagttctgctaagtgtatgatataaagtcattgactgatcatacttaagacacctaaacagtgttcttttctttttcttttactttacacattacagctccattcatcgcaaataaaggtgtagatagcattgtcaagtttgacacttttggagatggcatgggacaatacaacgtgttcaacttccagtatgtgggtggcaagtattcctacctgaaggttggtcattggtcagaaaccttatcactagatgttgactctatccactggtcccggaactcaatgcccacttcgcagtgcagcgacccttgcgcacccaacgaaatgaagaatatgcaaccaggggatgtctgctgctggatctgcatcccttgcgagccctacgaatacctggctgatgagtttacctgtatggattgtggccttgggcagtggcccactgcagacctatctggctgctttgaccttcctgaggactacatcaggtgggaagacgcctgggccattggtccagtcaccatcgcctgcctgggttttatgtgcacatgcatggttgtgactgtttttatcaagcacaacaacacacccttggtcaaagcatcaggccgggagctctgctacatcctgttgtttggagttggcctgtcctattgcatgacgttcttcttcatttccaagccgtcaccagtcatctgcgc

SEQ ID NO: 27473 - DNA, 1297 bp, Bovine  19866881342820
  misc_feature (1)..(1): n is a, c, g, or t
naattagtgcttactatgtggaaaacattgtgctaggcacagaaaggaagatacatgtatagggcatggtcattcaaacaatttataatctggtgggagaaaagtataatacgcacacacacctttaaaacttttaattaaatttagaaagtgagtgacgagagaataagacttaaccactagaaatctaatgagaatactttaaattagacacaagaggaccgggctaccatagatcgatctgtaagttaaagcagacttgcaatattaagccaggatcagtttaaagacctaaaaactctcacttgagtttcagataagcatcattatttctctaaaatgggttaaaatacaatgtttacttattgtactcttcctacaactttagttcctgtaggcatggtatatatatgtaatccttgaattagttaaaaattttactgtctatattcaggcaatctaattatgtcattattcatacagtcttcagtgatatttagttcaaagttctgggcttcaatataattatcatcttttccgaaagaaactgattcatcattccatcaaaacttttcaaattgttgaaatgatccatcagttgctcttgcatttaaaattgtaattttagtatcttctaatgaatgagtatgagtgagtataggaatttttccctcttaaagcaatcggtttttattttctacatttcttaagtcatcataaagttttccagaggcattatggtttccttgttacactgtgatttcaccaaataaagtgcctctgtaggttagaatagtctccaaaacttgtgtttatcagcagttcctatgttgccaacctcttgaatattgcagctcaaaaataagacaaagctacttacagcaacagatcaagagactggcaaagcttagtgtgtctagtctattaaattatccaccaccatatgactgaaacctctggactaccataaaggaagaataagaaaaatgaagaatatatattcagtgttggggtaacagtcaggctttctaagactatctataaaaatttttgaaaatctgtcaaaggaaaaaacatcagaactaaatcagaggtcagaattaaaatcaaaggccagattatatgcagcacaagttttgagtgtggggattaaatggagaattacagttcatgtattttaatacccctgattctatcttttatttttcagtacacatcaccctcttaaagacctgtaaggatttttttttccagttcttaggtagccatctttagtagttaggacttggggtatggg

SEQ ID NO: 27474 - DNA, 1457 bp, Bovine  19866881877684
  misc_feature (1)..(1): n is a, c, g, or t
ngatatatgcagatatgtaagtgtgagaagggcaaagagaatatgtgtgtgtgtatgtgagtgactttgatatggaagttacaagcatgcacctataattttttatctggggaaactttacatctttcatcaaatgtttgaaagagccaaggctctaaaaacattagtaaaatcacagaaatatccctgaattagaatttagaagttctagaattctagaaattctggaactccaaaattccctaataagattttcttgtaacacattcctcttctagaataaaaataattctctgcacttcaaatactaatactttgagtcttttttcaccttaatatgagcattggcatgaaagggagagcaggtgggagacatgtgatggggagtttgatacatcatgatgcacacattatttctgaataattctaaacccatgccatgatatttaaagaacttaaggtcagtttattgaacaaaatgcttcctctctcactaatttcaactgctaattttaacttcctctcagcaaaactgttcaactcctgatgcagagaccaaaccaccatctgcactcactctattatttccatcattaattgttggctacaaaaatataaaaatagtgcagctacagcttttccttctgaatggaatacaagctttcttttcaattcctttatttttttatcacctgggctaagaaagatttactactaaatgcaggtgttcatttctggctttcagccaaagtttctgcttaaggtggctgaattggagtaggtcatcactgatgcacgttttttgctttaactgtttcttacaaaatgaaggtaaattatgataatattctcataatttctgagcctctgaaataacttaattctcttttctatgtaattttaatcattaataatcataagtaataccttacgattgtctatttgtacatctatttgaaaatattagtataccaatagctatcaataaggtttaaaaatctaccttggtaaacagttgggcagtcgaaagtgaattacatatcaaaatttgaatattattttctgaaaaaatgaaattaaggcattctcaggataacagatttcaggatattttagagatttataaaaactaaacatattgcttacacataataaaccacagaaatattccttctcacaaattaaaaaaaaaaatggaaaagaaaaaaatatggaattttggctcatctaatttcacccaggatacttctagattaaattcagcaaggttgtttggatacttaaaaattgatatttatgttatgtatgtatatctatggaagttcaattcagtagctcagtggtgtccaactctttgcgaccccatgaattgcagcacgccaggcctccctgtccatcaccaacactattaatccttttatgtgcttttgcatttcacattaatgccaaatacatta

SEQ ID NO: 27475 - DNA, 1408 bp, Bovine  19866881954145
  misc_feature (1)..(1): n is a, c, g, or t
nttatgaactgctttagtatctggtatagtaatggaatctgcctcatggtccaactctgtgcaaccccatagacggcagcccaccaggcttccctgtccctgggattctctaggcaagagtgggttgccatttccttctcctgcatgaaagtgaaaagtaaaagtgaagtctactagaagtcaaaaaattaatgtgcatgaatcaggaaagatggaaagaattcagagccttctacagtttctcaacctccccctttactttaattaataagatgcaattttttaattgatcacaatgaaaactcataaatatggtctcaaaagttattaatcaatgagatactcaaaacaacaacattaagtctgtccagaagacacttataccaccagagcaactatctggtatgcagccttgagccagaaagggaatttagatctcttgaagtagaccatgcactacacacacacacatacacacacactcacacacacacacagcatgtctccataggtgttgtctcatattgcagacgcgggtattccttctagtctagaccactcctttccctggtgacagccaaaaaaaattaattccttctaaaattacccacttacagaaattttcaaatcacattgtgaaggtgtttgcttactttgcctaaaagaccagccctgattgtcatttctaatcactcatctaacaattattgaaatgcttactatgtgcctcttactgtgctaaatattaaagatgaataagacatggtttctgccttcaagacaactaaatcagtatgtgaaaatcactaagatagatgaactcacttactatttatggaagcaccatgaacaaacatatacattaggctggggagacaagactcatactaagaaaggacaaaccacagttcagaacacaagtgctgttgtcatacagaccagggcctggttctgagatgttcacatactagtctcatgacccagcctctttcacattcacttctctcacatgtaaatgttcaataaggacccacttgatttggttaaattaaatgagatgatgtatggaaagcacaagagtagcactactcaagtggatgcatatgtagcagtattcataaatatagcttataattcctctcttagatgattataataaggaacttttgagaaggtactaaagggtattcattttccagtaagagaaggtacatataatgccaaatgcctcaatggtcgcagaaacctgcagccttactcacttcccagcagcacctaaaattccagaaactaaatacaattggcaacccactccagtatccttgcctgggaaatcccatggacagagggaccctggcaggccacagtccatgcagcaacaagtgtcagatacgacaaccatctccat

SEQ ID NO: 27476 - DNA, 1517 bp, Bovine  19866880459642
  misc_feature (1)..(1): n is a, c, g, or t
ntactgaaatagaaacgtgtgtgtgtgtgtgtgtatgtgtctgtaaactttctacaatatagagaatatgtgaatgagtggcaaaatcaggaatgggaagattgatatgccttactgattagaaactacaggttgaataaagaacttatgtcaagaattgttctcaaaaagttaagtataggcaacttctcagttcctcactagtataatgagatgtgtccagtggacacattgctggtggaaagaggatggacagggcaatgaggttccctcctggttatagcaagtctggttttaaactactctaactgctaacacagcaactgttcaggagaaaacagttgttgagtatagtagaattcaccctgttctgaggagtctgctgctgctgctgctaagttgcttcagtcgtgtccgactctgtatgaccccatagacggcagcctaccaggctcccctgtccctgggattctccaggcaaggatactggagtgggttgccattttcttctccaatgcatgcatgtatgctaagttgcttcagttgtgtctgactctgtgagaccctatggcagcagcccacgaggctcccctgtccaggggattctccaggcaagaatacaggagtgggttgccatttctttctccctctgaggagtctgagttgcctcaaacagaggtgcctggctgtgagcttcccactataggaggtacctcagtcagttaaccaaaaattaatgagcctagctcttccagtctccttaaagccaacatgtcaaagaccaggaaaatttctcatagttagaagtttaaggcagagaatccaaaaattttaagcatagtgtattgaacattctgttagtttttattatttggacatttcatagaaaatttatatttttcaagaatagatacaaattttattaagattgaaaatataaaagttaatagtatagaagaaataattagtaggttgaaagacaaaggagagagagtccttatttcaaccaaacagaatgaacatgtctaacaatcagcattgttttgatgtctactcaggcagagaaagccaactacacagcagggactacaacccaaattacttgaccatcttcaccttatgaaactccaggggaagcataaagaaattaacagtcatgttagaacattaagcatgtttacagaatttgttgccactctagcaatacacagatatgcacaaaaccactgttagccaacaaactggattatcagttgactcttcaaaaaaccacccacactcaacaagtatatttataacctgcactgtttattgtctttttttccactcaaaagaataaaccatgaggaatcaaatactcaagatggttttgaggtaaaattgctagttaacgagctgtgctgaattgtttcctcagccacagttataaacgacttcagacatgctggttgtttcaaatgagccacgcactggtgaaatgaagatagaaaaagacacttttgaacaagatttgggga

SEQ ID NO: 27477 - DNA, 1393 bp, Bovine  19866880469315
  misc_feature (1)..(1): n is a, c, g, or t
ngcccagaggtctcttacctactgtaagagaaagttggatgatcacttttcctttcctgacaaaaattggaggctgttcgagtgattatctgccatctgttgtctacagcagttcaattgctgaagagtcctctagaaggggggagaaagagctcattcttgacggaaggttgaatgtacattcagaggtagattcagctgagcaagtgcccggctaatcccctttgcacacagggacaaggctgccaccaactctaattgattctgaaatgaatctgtatagaaaattagaaggttttggattcccatgtgagcttcaataaagagccaggatgtaagcctgacagctgaatggattcagaaatgaaaatctgataagcggcttaaaactgtacttaagtccagaaatgatttgaatgctgttgttaatggcacattgtatgttgtcacctagttaattatctctgaagatgagttcttgtggaggagaagagatgccattcttccacagcttttcctcatcacatatttattaacttccccctctttccaaactatcatcgctagaaggcagaaagaaaggattaggccactgcagctcctctgtggctgtcagttcactgtgccagacttcaaatatgaactgttgcatgtactgtcactgacatttccttttacatcttcatttgcaaatgaggagctgacatttgttaggccttgtatttgcacacagtcccaccacatgaaaagcaaacactgtcacactggctactttgtttattcctttgcagatagtatatggcctatttagaaattttcttcagaattttttttttttaactaactgagatagatagtcacagagctacatgtcctcatattttattcaggaagccgtctgcgctttatggagcgtgcatggcatttgatagctatttaaaactgtatttttaaaaccaatttgcacttttctggcttatattctttgggtttattttctctagataaatgtaggttcattttgtgatttaagagatcaggtttcttacctatcaattttcttgtttagtaataggaaaatattttccgccaaatgaaaacaatgaagtgaatcttaaaaccataatgcattttctaaatattgtttttggtttattaaagtttcatcttttcaaaggagcttgacaatgtcaacctactcaacatcattaagacaatcatctgttattattaagggcctttcttgaaacagaagcttgaagacagcctcatagagcagtacgtatgcctagaggtaagctgcattcctgttcagaaacgtacaggcttgcttgctaaggtggtcacaaagggttgattacacacttaactcccaaagaactgagaattctgt

SEQ ID NO: 27478 - DNA, 1106 bp, Bovine  19866880495512
  misc_feature (1)..(1): n is a, c, g, or t
ntaattggaagtgtcactctttggtttctcatccaacagttgtggcttgtgtggatgtcatgttgtactaatcatgacctctttcatgttaagagcggcttctcgctgcatgctcaaaagaaaactatgcaatcagttaccgtttccagattgtaaattgtaaattccctcgtggctcggatggtaaagaatccgcctgcaatgcaggagacctgggttcagtccctgagtgaggaagatcccctggagaaagatggccaacccactccagtattcttgcctggagaattgcatggacagaggagccttgtaggctgctgtccatgaggtcacaaagagttggacactgagcaactagcactttccagaattatatgcagtaccaccaagacctggatcactacatttctataataatttctaaagcaaaaataaaaatactttctaagccaagtattgtatgtataaatatatagatataatttgtcttataaaagcattacagatatattttaacaaaagataaaaaattagtttgacatttttagagcatggtactatctgagagaccaaacataagattttggttttatactgatggaaaaaggtaatttatgcaaacatgaaagcaaattatctaagcaattatgaaaagatcaatgataagcaaaagtgaaattcttttaactatcattgccataaggataagagtgcagccagtgtccaattattgaaaataaaatggtataaaattaaagtcgaaaaaaaaagtgaaaggttaccaaactagctggtaagcaaataaattaaataatcaaaatagtgaaagatcaaaagtaattgatacttttcacagtactttcaaagaatcttagtctaagcagtctaggtatctggttgaagagtattgttttaatgagatctgcttactcctttcactgatttcagattgctttgcttataggaaataaagggaccataaaatgttaagtttgtgagagatatttaaataattagtggaaaggcacaaagtgacccatttacatttttttttttcattagtaaaagcaaacaccctactaaaagatctttaaaatttccttttt

SEQ ID NO: 27479 - DNA, 2510 bp, Bovine  19866880542582
  misc_feature (1)..(1): n is a, c, g, or t
ntggttgagttttcccctttgtgtctagttgacctgtttctctttactgcccaagttttgctgttgttctgtcggtctctgacaaagttccttgctgcacagtttttacctggtgttagtggttattttgtatcgttggttctgctaatacatttgtaatgaatttaagagttaactttaaagaaaacttttaacatcttaatttaataaagctcttcttccttcatttatgctttgtgaaggtctgtcttattttgttttgtctcattttgtttttgcaaatagcatctcttctctattgaaggactcttaagggaatctttgccctgaattgtagtcaacattatcatcctatatgtcagtgacaggcaggggtgcattgtctgctccctttgttggggaaagcaatttctcatctcatttccaagaaagttgacactatattgggaagtgacttgatacttccggtaccacatcgttaaacagcttcctggcagcaaaagttcagggataattgcatctatctagttcaaactaaattttatccagacttcatttattctaaatggcatgattaaacttgatatatacaaattcacaaacatattagtcaaatccatgtaggtactttaggttttatcttaattttcaagtactaatatctaacttcaatctctgtgacttaaaattgactctatgacctgaaatttttaaaaagacagttaacctgagttaacactgaccattgaaaccatgcctttggtcttttttattttactaagatataagatattatgtaattatggctgtatttcacatagttttgatacagaaaagcaattaaacattctctttgcaagttcccagagattagattataaaataagaatggtggtatgactccctgttcacatctccacctgcattttgagcttcttttaatgattgcctaacataattcccaccagactcattttttatgtttttattttctttccttctaaatttaagtgaagctattataattgactttacatacctgggaaagacgcttgtcttcaagacatcacttttcccctctatttttagtcagcaatttttctacctgaaacctttttaaaaataagcaaataaataaacttatcaaattatatatacatcaaagagacctaaatgaggtattattttcaaatacgtatcccaaagtttttttcaactaattctccacttattccaagattcagttaattgaaggaatacaagcttgtatttaaattccaggtgctatagatgtcatctctctggttctttctaatataaacacattgtgtgaaaagccattacctcttactgtgtttttatttgggtggacaattaatttaacaacttatacaataaaaaggaacatataacacttactttaaatgaatttgattgatttttatatgtaagtactttcagttctggaattaaaaaatattactcctaacagtgcctgtatatatttgatcattataaaaaggagatctttacactcaatttctcctccttcacttgccttagtaaccacatcaagttaatattaactactgtttccaaaatgtcacttgttactttgtaatcaaatatcttattcattcactaccaatgcaacatgaatctatctcccaggaaattgaccaagttccagttgttttttctgggattaaaatatgctatattaaaaaacttcatgaaaaatcaaaaaatgcctgtataaaaaataattagtattaagaaatttaactgtgagagaaaatatgttaatatacaaataactactgcaattatttaaaactaatagagacattttttgtatttctgttatggaaagtgagtaacaaacaaataaatataataaataaaatgtaaaataaaccctatttaaatgaagtaaaacagcaatttttaaaaatgtaggtaccttattactcttttgtactatggacttacctctagtgatttgtttatttttcatgctgttatctataaatagtaatatgaagtgatttgtcaaaaattaagttctaaaaaaacatacatataccaagcatatgtgttaaaatgctttacaaaaatattagagaacagactctgatttcaaatcccttttcacccctaaacagctctgtgctcattatcattcatgtagcatagctgcaagtcagtttctttattagtaaaatggatataattataatctaaaagggttaatagaagaatgaaataaagagtgcatacaaaatgcttagcactatgtttgactcatgtttgatagtcaattcaggataatattaataatagtaatttttagtagtaatgataaaaaaatcacagagaaaaataagatgaaatggcagatagttaacagagcctgaggtctgctcctgttcaatacatataaatatatcaaaaagtaagagtctcaattaaataggaataaagtctaagagataatcacattactagaa

SEQ ID NO: 27480 - DNA, 1009 bp, Bovine  19866880569273
  misc_feature (1)..(1): n is a, c, g, or t
ntgaatcgcaatattcatcttttttagaaagctatcttcttcaatctacttatttatgatgcattaatttacaggacaatatactaggaagatgactgctctaattcaccttaatacctccagtaatgggaactcattaccagttgaagaagtctctaatgtgactacagctaatgtgttcttgggactaatttagaaaacttcagggaatctgctgctgctgctaagttgcttcagttgtgtctgactctgtgcgaccccatagtacacaccttcaaatataaaatatttgagtgtgtatgagatgaactgatgtatcagtatttgaatacatgtgaaatagcaccctatttctcagtattccatatttcaagctattccagtgctcctcccaatcatatagcttcacctcttgtattgagatgatagggtagaatgtaaaatagcaagaatcttgatggaagttaaaatcttagcttttagggaagggatataaagaacacttgttatataatagagttagatgtgcaattgaaggggcttccctgatggctcagatggtaaagaatttgcctgcattgctcgagacctgggttcaatccctgggttgggaagggcatggctatccacttcagtattcttgcttggagaatccccatggacagaggaccctggcaggttacagtccatgggggtcacaaagagtttgacacttaagtgtgagtgataatttctattccctgaagacctgataaataaccttgcccctgaggaggaagggagtcagagagaaagtgaaagaattaaatgctgacttgagttcctgagaaatatgggtattcacaagttcaaattttgttagtggggagggttggcaatgaaaccaataattttgagtgaaacaaattgatatataataaatgattctccagttatcactcctgctcttagaaaaggcttaaataattcaaaacctggagatcccatcctcatagatcagtttttccaa

SEQ ID NO: 27481 - DNA, 2206 bp, Bovine  19866880605200
  misc_feature (1)..(1): n is a, c, g, or t
ncctggcatgctgaaattcatggggtagcaaagagttggacatgactgagtgactgaaacttgacttagtacttagtaactgaacaataataaaaccaatttggggtaaaaagaaaaaaaaagtgctacttaatttttagtctgcattctgcttgttttctattacattttactcagttggaacaacacaattagatttcagtatttttttctccattttgttctcctaggctacactgaatatttaaattagaaaaaactttattgatttttttcttttatcatgaaaatgttcctctcttattaggttagtgagcgtatttcttaatcgaacttaaatttccaacctgaatttctttgtagtacaacctaatgtcccatgcaataatattatacctgtatttgtgtcaaatctaattatgaagtcttgatttgtgtaatgtgcgagaaattatttccactttccctaccatgcaaacagatcaattttctcattagccttttccatcagtcttgattgctttaaacttatgcttttcatattactctgtttcctggtcaaattttgtccttacttcatgtatagacagatttatcacattttaagaaatttattcatgtggacaaattaactatataagtcagtaaaagtgtgattttttcactattttaattattatttactttgtcccatcatagtctttctacaatcttgaattgatttatttttgccttttactttatttcataatttaagaacaaataaggagataagccacaaagtaggtgacaataaaagatgaagaggaaaaggggcacaaaactcatgttaggagcacagctttggataaaagactctaaggggaattctttgggcactatgctctgacgaaaggagttatgtggtggtgaataattttcccacagatcttttgttccttgatgtatttgatgcacaaataaaaatatgggttgaaagtttgcagaatgtagtttgtgtgtttacaaagggggctgtaaagtgaatgtgctgatgtgtgtgaaaccagacgtgctatagataatgggcactattaggaagatatgttcagaaaagggtgaatgcttctgtgaatgccaaattgtatttattgtctgcatgtaacaaccattcaccaagtccatattcaaagtgttttttaataaatgctttcttacaagaaagttgattctgtttcatcagtggaaaaattacagtttagttcagtttagtcgctcagtcatgtcggactctttgcgacctcatggactgcagcacgccaggcctccctgtccatcaccaactcccggagtttactcaaatgtccattgagtcagtgatgccatccaaccatctcatcctctgttgtccccttctccttctgccttcaatctttcccagcatcagagtctttaccaatgaattggctcttctcatcaggttgcaaaagtattggggcttcaacttcagtatcagtccttccaataaatatttacaatggatttcctttataattcactggtttgagctccttgctgaccaaaggactctcaagactcctcccacaccacatttcaaaagcatcaattttcagtgctcagcctttttcattgtccaactctcacatccatacatgactcttggaaaaaccatatctttggctatatggacctttgttggcaaagtgatgtctctgctttttaatatactgtgtaggcttgccatagcttttattgcaaggagcaagtgtcttttaatttcatggctgtagtcaccatctgcagtgattttggagcccgagaaaataaagtctgtcactgtttctatttttttccctatctatttgccatgaagtgataggactagatgccatgatctttgttttttgaatgttgatttttaagccaaatttcccactttcctctttcacctccatcaaaagctctttagttcctttttgctttctgctgttagggttggtatcattcacatctctgatgggtttgaaatttttcctagccatcttgattccagtttgtgattcatccagcctggcatttcacatgatgtactctgcatataagttaaataagcagacacatccacagctgagcatcatttccactttgacctggactcttcattctttctgggagttatttctccactcttccccaataaaatatt

SEQ ID NO: 27482 - DNA, 1027 bp, Bovine  19866880746980
  misc_feature (1)..(1): n is a, c, g, or t
nattaaaaaaagaaaaaaaaaaacaggaaaaaataatgaacaataagagttgtggttagagaggagttaaaggaacttttactttaactcctctatgtggtacattttatatatatgacataaatacatgagataagcataagttcatgaaaattaagattaatagaaagtaaaaaagatccacagactgtgttgatctgaaagaaaagtttattcttttacgagcaattcttatatgtcaagaaaaatggcaactcaacatatgtatgaataatctttgtatagtaatttctagagtttggatttatactctatgcacacaaaattttatctagaattatagcaaggagaaaaagttgcttcttataatatgtattacttgtgttttccaaattacttggttcataaattcatttcataaaaggagtcaagataaaacttcaacataacttcattgagatcactatatatggtgacagtcataaggctgaagaaatgaataaattattgcatcatctctccctttgaattattcaaccttgtttcttactctaattctcttatttaggattgggcggcctgttagtttagttactgatcttgatggtctgcctttgccttcacttttagtcagtatcttgatactagtaggtgtatcaacttcttataatagtctatatcttttaagtagcatcatgatattcagtgttctttaacattcagtttatcttttgaatgttgaacctatatatcttcatggggaatctgtatatcacttgtggggaaggtcagaagtagggtctaagattatgaagtataggaaagtcaatgctttggcttaagatcagagttacaatcttggcattcttcacctagtcaagtactacatagacacatttctaattaacactgaactattaatacctactggaaaaggaaatagcaacccactccagtgttcttgcctggagaatcccatggactgagaagcctggtaggctgcagtctgtggggttgcacagagtca

SEQ ID NO: 27483 - DNA, 1028 bp, Bovine  19866881051622
  misc_feature (1)..(1): n is a, c, g, or t
ntttgaacatcaagttttcctttaaatgagccagataaatacataatctggtcattcagaaaataccatatgctatgatactgcattggagaaggaaatggcaaccccctccagtgttcttgcctggagaatcccagggatggtggagcctggtgggctgccatctatggggtcgcacagagtcggacatgactgaagcgacttagcagcagcagccagcagcatgatactttcattggaagataatacaaaataggtaaacagttaaaaatatatatgaacttaccattaaccaggttgctagtgtgtaaaaatccatgttttttagcaaaataggacttattattacactaaaagtcagctgaagtgtcagatatcattggtttgtaaagtatccttgatttaaaatggaagaatcagctcttgaaacaaagagaaaaatgagctatatctttggaatattcttttttgaggcccattgagagaactcttagagggctcctgtgtcttaggcatttttattcatattgagtgaaacccagccctgcattgtcatttgcaaggtgcttgtttaagttatctgaagctgaattatgagagcaacttcattctgtaagtgtttttgctttttctctctggctcttcacttatcttcaaagtctctgctagggtacttcagtggctataatgaagtgaatctaaattattagtttgaggccagcaagagacctgacatgcacacgaaatattcttcatgtttcactgagctaatcatcctaaaggatttattctgtcttgtataagctcttactcagctttcatttttttctcttaagtgtatcttggggtggtttagctcaactaagttttaaaatgtcaacctgaaccttttagtagaagttgtcacttctttttttttagttaacatactttgttgatgatttcaaacttaaaaaaaaaaaaaaaacattaagactcttatcagacaagacttaatagtaccctatatttaacacaaaatatacata

SEQ ID NO: 27484 - DNA, 1927 bp, Bovine  19866881180006
  misc_feature (1)..(1): n is a, c, g, or t
naattcaaacatgtactttaatttcccaaatgtggtatttctttactagaagaggttaactttggatttttgccagggtgtgttagaaactccttaaaatattgcctcagtagcatttccttgcttctgacataggcaaacaggtcaggctcagttaatgcatagaaaattaagtattattgcaacatgtattaatgaaaagagttaacaaagaaatttcaatagacactattgacgttgtccactgagaccttttcagatgataaccagtcctcagaagtaacacttctgagtatattgtaacaatgttaattttcatctaagatattaaatttaatatgtgttccgaataatattttacctgctgaatacatttttccatatcacttgattttttttaagcttagaaaatatgtcagatcaatgagaatgaactgtagctgcctcgcttaggaagggaaggaaaaaaaagcccaagttatgtttatttcatcactgaaaggtaccttgagtcacagggggaaattctatgatttccttagtgattgaaagctttctctatgattttcaataaaagtttccaagacaatggatgtctttcataaacactatgtaacctagtgttaattttatagtggacttctgcatacatgaactagatcaagttcccttgagaaattcccgtaagtgtgagctacagcatattcatcaggtcattcatcttaatcttctaccgaagaaaaataatgttgcatgtggagagtgttttaaagtgactgatgaggatattgaaagaacaataaattgcttgtcttaatgaaaatatattgatgtggaaagtgaaaatccttctctagttgctctaccttgtttaaaaaagaaagagagcataagagacaatgatcccagatcctcctgccctactgtgctcactgtgacaagccctaataggtagtgactccaatagacagaccaggaaccaagcaacatggatgtggcaagcatatcgcatcctttcccaggatgcatctgtaaattcctgtatacgtcatcaatgtaacttacctcacaaatagaatatgatgaaaattaatcttcttactttcaacacacaatgatttggttactgctttgctctctgtatcgctctcttatcaccaacaacataccatcaaactggccatctttccttttcccagatacacccattttgctttcatctaagggtctttgcgctagctgtgccttctatctagacctttattccatgaaatttcacaggctgacactctttgcatttgtaaatcatttctattgatatttctcatatactttggatgaataatttactgtccttgcctcttcagagtataggctccatgagacgtagaacttctctgtcttgttcactgctgtatcttcagtacctgtaagagggtaggccagagaatagggagtccatattcatttgctgaatgaatgtgtcagtatatcaaaacaaacaaatgatgaaagcataatacacataatacaatgactatcacaaaatgactaccatattatagtttacctaaagtagctaaactttaaatcagatactttcaataaaaacaaaaaaacagatgcctgactcttgaaagtggtgtaaagaaatagggaacatttgaatctttaaagaggcatgacatatttatgtatttttcataaagggtcattggtttaaataaagttgaaaatacttgcttcagtgactactatttaaaacctaggtagtcccccatgtttcctacatatgtgtacatatatgatgacatagaaaatagtgtgtagtctcagtgataaagggagtaattttttagcttccttttaaaacccaaaggctggtatgttcttcctttacctgttgcagcaaatcctttttgtggtg

SEQ ID NO: 27485 - DNA, 723 bp, Bovine  19866881820528
  misc_feature (1)..(1): n is a, c, g, or t
ncatccagagaatgacttgaataatgaatccttttaattactggaaaagcatgaagtagaccttaagtattttggaggcaagtctagctctttgtcagtacaaaaccctgactcaagaaaaaatggtgaaaaaaattgttcttttattcctgggcttaagataaagcaaaaagaagaaatcactcaaataaaatcttaattatttatcagaaaatctattcagattgaactatcattctgagtatttccttttagaaggtgataatttctaagaactattaattttatgattcataatcaacagctcagtagaaactcagcttacataattaaagctcatgtatagaaattgtacctgtctatgaatcatgttactgtggcaatcattattttagtttacaccaatattattttgatatttttctgacttactttaactattggaattaccattaaaacatttcttctacttctagggtggctcactcctcttttctaaaaatgatctctttatctgaaaataccaatgcattccatagagttgttaagaatttgcaatgtgttgggaatgtgaatacctcctttgagatgttttttatatggaatttatttttgtagattgatagccttttacttagagctggttatgttacttttttttttttttttaggttttaactgcatggcaaaatacacttttgcaaagccttaaaaatagcaaga

SEQ ID NO: 27486 - DNA, 1449 bp, Bovine  19866880495330
  misc_feature (1)..(1): n is a, c, g, or t
ncccaccaggctcctctgtccatggaattctccaggcaagaatactggaggggtttccattcccttctccaggggatcttcccgacctagggatggaagccatgtctcctgcattgcaggcagattctttaccaactgagcccaccagggaagcctcaacccttatatgctagacaataattattcctcaccatcagcacattggaggaaaaggaggaggatagggacatgcttgactctttgtctttttatgggtggggcttagggggcagcagtgaatttactacatccagatcattcttcagttctcttgagttacaaatacaaatatgttgtttactatataatgtcttttaaaagaaaaaaaaaaacatttttgtctatgtactgtaggtattgttgcaactaatgattatgaaaagaaagtctaagctgctatatcttttacactcgccccatggaaacatcagaagagagtggcaagcctaaaataagaaaggagtctcagcaaatggtactctagaaatcctcctaaaatctcaagctccagcttcactgaaataaaacagttaatggaagtgtcatccctgcctcccctctgagccaaatagacctgtctcaaactgcaacagatgtgtgtacaccagaaggaggaaggtggcatctgtgctgtgcagcactgtatattttcctttgaaatcctgagtgtggtctgattcagactccgttatgttttcgtgttgtggagctatgtcgacactgaatatttggaaagctattgtttccacagcttgcgctgatttatgcttcattctgtttggaggtctttgtactagctcaaacctgaatatcatgtgcagtaatgtactagaagactttttctcactactttaaaccacatgctcttagatcatctaagattgttttgttaactgcagttggattatcatttacaaaagaagtttcaagagattcaaataaattaaggaaattccatctaaagctgtaggcatgaacacatctaatcttctctagtctggcaaaacaataaaataattgtgagaaagtgtaaaacttctcttagcaacatgttttttttggggacagggtttaataaaatacatgacttcaaagctattttcatgttaaaaataaattaactttctatgtaagtcagttttcttttcttcttagagatagttacaaaaaattataagtaaaaatttttagaagcaaagaccacatattttctagaatgaaaaaagctattttgaagctaaaagggagggaaggaatcatctagacaaaatcctcaatttccaaaagctcctattttacagaatgcatcagtgtcaatttcatggacagagcagcctggtgggctatagtccattgagtcccaaagagtcagaaaaaactgagggactgagcatatacaacagacagcag

SEQ ID NO: 27487 - DNA, 2494 bp, Bovine  19866880504845
  misc_feature (1)..(1): n is a, c, g, or t
nctgaagcctgcgtacccagagcccaagagaggccactgcagtgagaagcccacggactgcagctaatgagtagcccccacttgcagcaactagagaaggcccatgcacagcagtgaaggcccagtgcagccaaaataaataaataaactttaaaaatattgaaaaaaaggagactactatgaataattatatgccagcaaattggacaatttagaagaaatgaataaattcctagaaacgcgtaacctcaggctgagttgaatctatgtgtgtgtgtgtgctgtcatgttggactgtttgcaaccccatggactgtagcccaccaggcttccctccatggagttttccaggcaagaacactggagtggattgctatttcctcctgcaggagatcttatcaacctagggatcgacctgcgtctcttgtgtctcctggtttggcaggtggattctttaccaagccctgcgccacctgggaagcataaggctgaatcataatgaaatagaaaatctgagcaaactgattactagcaaggagactgaatcagtaatcagaaactttccaacaaacaaaagtccaggaccagatggcttccctggtaaattctaccaaacattcaaagaattaaaatcagtccttctcaaactctccccccaaatagaacagggcagaattcttccaaacacattttatgaggccagtattatcctgataccaaaaccaaataatgtgccacacacaaaaaattacaggccaatatccctgatgaccacagatgcaaaatcctcaacaagttcttagcaaactaaattcaccagtactttaaaaggattatagaggagtggtggggagcggcggcagcggcaggctgaggggacgcgcgggcagtggagttgccctttcgcatggccatagtggggacggctgctgctgcgccgccaaacgggaggagcctccctagcagcatggcctgaccttcggcctgtacctgctctttgacctggagcagtcgcagtgcctcaaggagagccatgagggcagcggccctggcgtctttaggccatgggaggagctgactgaccgctccaagtttgttgaaagtgatgcagatgaagagcttatgtttaatattccatgtactggcaatgtcaagctcaagggcatcattataatgggagacaatgatgacttacacccctctgagatgagactgtacaggaacattccacagatgtcctttgatgatagagacaaggagccagatcagacctttagtctgaactgggatcttacaggggaattagagtatgctacagaaatttctcatttttcaaatgtctgtcatctctcaattcatatttcaaaaaaatttggagctgataccacaaaggtcttttatattggcctgagaggagaatggactgagctttgttcacatgagatgaccatctgcaattatgaagcatgagccaatccagctgaccacagggtccatcaggtaaccccacagacacactttatttcctaaggtctggctaagactcccatagaggcgttgtgtcattgaagaagtatgacatcctgttgggaaggacaaagagagatggggcttcaaagagagttggctgccacagcctctgccaagctttgtctttggggcttgctgcagaaacctggcctgtggaaggtaccacacccccaggaagggttgtgtgggtagcagggaacaatcgtggttctctagggccctacagaaattgggtcttgggctgatcagtatctggcagccatggataatgcctgccttcccagtttatgtggccatgggatcccaagtgtcttgttgctttgtggcaggattattttatgacttgttttttaaaatggaaactattcctgggctgcggtaaactttttgaagcctcagcattgtgtttgtattaaccatcaggagggtctccaactagaaatacttgtccctgcttgctccttctccctgtcatctttcaacattcttgtcaagttgctcagcttggagttgtcagtcatgcacagtgtcccacgttatagcttgaagagcaggaatctcctgatgttgcttaatagcttgagagggtctttttttcctgttgcccaggtaagcggtctgaggagagaatggcattgtttctgtgtttgtgggcatcctggttggggtaagatgggactttgatatgtttccctttgggatatccttaatgttgatcagcttctaactagtgttgtaagcccagtggcagaaattgggagatctcacttcttctgttcttggctttttattcactgtgactaataagcttcctaatgagtccttgccagacttaaaaaaaaaaaaaagatcatagaccatgattaagtgggatttatttttaaaatgtattcaacactttgcaattccaaaaaggttcaacacatgcaaaccagttaatgcaattcaccacgttaacaaaata

SEQ ID NO: 27488 - DNA, 1027 bp, Bovine  19866880569432
  misc_feature (1)..(1): n is a, c, g, or t
nttgtgtccactctttgcgaccccatgaatacagcacgccaggcctccctgtccatcaccaactcccggagttcacccaaactcatgtccatcgagtcggtgatgccatccagccatctcatcctctgtcatccccttctcctcctgcccccaatccctcccagcatcagagtcttttccaatgagtcaactcttctcctgaggtggccaaagtactggagtttcagctttagcatcattccttccaaagaaatcccagggctgatcttcagaatggactggttggatctccatgcagtagctttattagaattctatgcacatctttcacagttataatcgcaatatacataaaattgtatgtatactcctcccacctaatattacaaggtaaacactattacactttgctacataaccccacttttatagttggttaagtctattaatttcacgaaacataaatatcttagctattctgatattgagcacttagatgacggtatatttttaataatataaataaggctgaatattttgccattttcttttttaatgataatagttaacttccataaattacacattttgaacagttgttgagtattagaaagaaattagataaatattctgagcagaatctctgaaatagttttttcagaggacttattggagacatatcttttgtggatatatatggattgtttgagctgaaaagataaggccacccacagcacagatttgttttcacactccatctgtttggtatatactgtgtagattaggaaaaagttctgaccccagtgagacagaatgtttagtaatatttctctcatattcttcaatttctctgtgagtcactttctccagatgcctaacaagattgtgagctttgcaaaaatcttccaaaaatggaatctgcttctcaaaaaatgaatacagtttaatgaacacattgcattcattacaaaaagtactacttaaataccaaaatatatatgttacaactacatagaagtacaaggta

SEQ ID NO: 27489 - DNA, 1242 bp, Bovine  19866880683245
  misc_feature (1)..(1): n is a, c, g, or t
nttgcctaaatgttggattcaaattaaattttgatagggttctttagagtatttcacacatgaagacagatgttaatgattacataatttttgaaatgtgttataaattgattaaatctaatattggttaggaagcactttgttacatggtatattaccgttccttgactatgtctcagatgatatattttcacaaatggctattttattagttcattcactcattgctttaaaatgttcctaaataaaaactttgagtcaaaaataaaccttggaacttggattactcttctccaattgcctccttagttgccagttattgactttctcttctttctacctcaagtcagaacccctcatttctttctccaccctccccttcctccatgccccaaatttcctctatattacagtgattctccacatgtgatccatagaccaatggcattaactggggcacagggtataagagcaaaacattaagccaagccctgcatcagacctagtgcatcagaatctctgggacaagagtccaacaatcagtgttttgggctgtgataatgctgctattgtgtgagagttactattttatatattgtagtaaccatgcccatgaaagtcttatgctacaggctgaggctcattttgctcaagataaatagtgtatatggcattctatctgttgcggtgctcaatgtagctattttccttatttctgaggactactctaaggatgtaacattaaattaaggctgacaaagacaaaagaaatgagatatgcccagaacaacagataggctttttgaggatggacaaactgcaaaaagtccgtgacattaaaagtatgttgtatgtaagtaacttgaagtggacaataatcattcaccttagtcaacacatggaaaggatgagagaaatgacagaaaataggtatgtaggagccagatctggcttctttcatttagaaaaacatgtgaaattcagaggtattatgtgaattgatagtttgtcctccctattacttgagtctagaatatcaatcaatgtggtacagtttctttaaacattcaaagtaaaaaggttagattttattgtaaaaaaagatgagaaaagcctttgtgggcaaagagcactggagagacataatctactggtgtctgtaacagataaagatgtttgcttgtactattacgagtatatttttgaaaggtctagtaatgcaacaggcagaaaggaaaaata

SEQ ID NO: 27490 - DNA, 2572 bp, Bovine  19866880703686
  misc_feature (1)..(1): n is a, c, g, or t
ntacctgatcttctcagttataagatttacaattgatctccataaaataaaatgagattgttatgatattactaagcttaactctatcttcttaaattctatatcgacatgagaagaaaaaatcatgagatctagcttgtttccatagtcacaaaagatttcttaatttctttgcctaaaattaccttcaagtcccatcttttttatttctatgttgtaaaagttttactgtattatgatacttatatttttttttgtctgtggtaggcagaattctaaggtgacccaaatttcctgcccctttgtgtaatcatcttttcttgaatttgtgcagaatgacaaatcactttggttattatatttggtcatatggaatttaacagatgtaactaaggtccctagtcagttgactttccattaatgaagaggaagattattcaggtagcctggtctactgaaatcagcccttagaagtgacgagagagatccgaagtgagattccctgctggccttataagagcaaactgccatattctggagaaggctatgcagctaggacctgagaatgtcccctagttgatgtctaaacagagacctcagccttacaaccacaaggaactaaattctgccaataaccaatgaatttggttattggcagatgaaaatatagctggactggcaacttgaaaacagagccctgaaaagagaccttcacaagagaacccagtttacaacatgcctggacttttgatccacagaaaaatatgagataaagaatgggtgttgttttaaaacactcctttggagtaatgtctaaagtcactaggtttgaggtagcttgttacacagcaatggaaaactaatatgatatcttttctctgctgctgctaagtcgcttcagtcgtgtccgactctgtgcgaccccatagacggcagcccaccaggctcccccgtccctgggattctccaggcaagaacactggagtgggttgccatttcctcctccaatgcatgaaagtgaaaagtgaaagtgaagtcgctcagtcctgtctgacgtgtagcaaccccatggactgcagcccaccaggcccctccatccatgggattttccaggcaagaggactggagtggggtgccactgccttctaaagtgtaacagaaactcagtgaaacttggcatgtcaaggaattgttattcctgtcagttcccagttttatgttcaatcttgaacatatatttaaacacagtaaaggagaggatacaaggcctgggtctatcctgcttagaagtatgtaacatcgtagaaatttaaagaggggttaacttctactgggtcaaacactcactttacaagggaaaaaccaaaagatgttaatttattttgtaatcaacccttcaaagcatggaataaaaatataatgtaagataaaagatagtgcaaataacctagtaattaaagcttttttcaaacgtattttaattctattatgatgtacttatcagtgaactattcagatccatttgttttatatccttatactacttcttttctttcttcccgatttctgattatatcattgcctatgagcagaagtgagcactgctggaaaaaattatctatgaatatcttttaaaatttattacaatctgtgatcaaagatttagtgaaggacaggatgaagttaatgtctcaaaattaagttgtagtactctggataatattgcagtatacaaacaaacaaaacaaatcataaaaattttaactttgaaacatggtactgcaagtcctttttataaaactgcaaaatgagaatttttagctaatgagtgtgacttggcaggacataaatggaaatatgtttcattggccaacatgttctggaggcatatgagtatctaaatagatgatgctcaaaagagtatttttggcatcaaagtgtctccaaacattttgatcaggaatttgattgccatatgtccatatcctccaacttaaatgatgaacatactttaggtctcttgggatatttttagttcctggcagtactgactcctttacgattaagcattttgtcttgcaaaatgtgttcttttcctcactttcataattttccacgtacattgatcatttcaatatagactgtctggaattaaagctaaggtaatgatttattgaagctcagtattgagagaagcagccatagttagtgtttgcttttgaatagtgcttatgaattccactgtcatgacactcaaccatgaaagcttccatatactgattcatctttagtcttagatgttcatttataatccctagattacaaacatataacctggataatatgtcattttcatctttgtttccctacaaaatctttcaaaaggaaaggtatctgaaaatatttgcaaatacattattgaataccatattcagtaaatgctacatatttcttttgtttcaatagatcacattattttaataaatatgcaaatgtcatcaaaggtagaaatctgagtttggggggaagataattggacctgaaaatgtcttttgcattagaaatcctcaaa

SEQ ID NO: 27491 - DNA, 2133 bp, Bovine  19866880735050
  misc_feature (1)..(1): n is a, c, g, or t
nctgcaaggaaatctaaccagtccatcctaaaggaaatcactcctgaatattctttggaaggatgctgaagctgaaactccaaccattttggctgcctgatgcgatgaactgactcatttgaaaagaccgtgatactgggagagattgaagatgggataaggggttgatggagaatgagatggttggatggcctcaccaactcaatggacatgagtttgagtaatctccaggaattggtgatggacagggagaactggcatgctgcagtccacggggtcgcaaattgttggacacgactgagtgactgaactgagaaagctggacctgatgaacctatttgctgtgcagcaacggagacacaaacatagagaacagacttttggacacggtgggggaaagagagggtgggacaaattgagagtagcatgcaaacatatatattatcatatgtaaaatagatagctagtgggatattactgtatgatgcagggagctcaaaccttgtgttatgtgacaacctagaagggtgggatggggtgggagatgacccaggaagttcaaggggcaggggcatatgtgtatctatgatgattcatgttgaagtgtggcagaaaccgacacaacatggtaaagcatttatcctccaattaaaaataaataaatttttaaaaattgcttagctttaaaaaaagtgcttagcttatgtaaagtgtttactgcctatatgtaagtatgtttacaaatgtgttttccctttaaattcctgtaaaactctaaaacaaaggaaaaaaatgatcactggccagtttgttaagtggttgtcagttttgcattattaataaaaaatgaagaaacattttcaaataagtattccatttcctacctgcatgcatttcctaaatgaatattgaaactaattaacactattattacatttaggagaaaagagatactattcagctccttgttcacctcttaataactcgcacactactataaagtacttgaatacatgctgaagagcagagtctaatagttactggtttacatctcaggcaggttaataggttttcagacttcatttagcaccacattttcagaccatcataagttttaaatttacttccatgctgacagtttaatgtttgaataagcaagggcttaacttacttttaacttctaaaccttaagacctctctcttaaagctataaaattgacatttcagcatgatttttttttcatgatgtgtctttcaaacgtgcacatgttacaatatctaaaacagctgtccatgtttacatttaaagtctttcaaatatgtatattttttcttcaagatgccatttgtgtagaaaggaaaatacgcaaattgactgcttttttacatcctttctcccctccctttctccttcattccttttctctctctctctcttttgttctgatatttctttcagttttcttttccttctcttttttctttctttcttaggtacttcagataactagcaattattcatgcagcgtgaggaattccagagtttaaatctgcactctgcctttaattcttgttagggtttcacatgcatatatcagaagtgaaatcttctactatgtatcatgctcaaccaagtagaggtcaaagaactaaatcattgcattcatgaaagtaaaatgttgtgcttttcaattgccatcattttgggagactctcacttccaattaccaaagtgaccttcaaatctgatactgaccaatttgtagtaaaatttattacaattgggacatgacagtacaaaataaatgacatggataaaatacctgttttgatggtaataagattttatattcaactttatatattttatattcaactttctgcttgattgtgtttttcctgattctttattttgtatttttttataagattatactgttatttaaatgtgtaaactgttaaaaattcttaatatagaatcatagatggctaacgatttatatcctttgtcaaaaagtattttgtatcttaatatttcacattttattatagaggggagcacttgtaaattccagacaatgaaatattacatcaatgtttcatagaactaatttggaatttccttatgataca

SEQ ID NO: 27492 - DNA, 1981 bp, Bovine  19866880861153
  misc_feature (1)..(1): n is a, c, g, or t
nggaagggaatacaaaaatttacctagtgtttagcctataagtttagtctattattatattgtgaatttaactgtcaatttgaaaaatatataactacttcaatatgtttatatacttctcctttatttatggaggtttaagtgcactatgttttatcttacagatatgaaaattaatgctactaattatggttaatatttggagaatgtgtctaagccttttcacactacagtgcattacgagcaggtacaattatcctgcttttaatgaggaggaaactaaacacaggatggtcaaacaggtaaatgaacatcacacaactttacagaataatgcaggatgtgagtaggcagtgtgacaagaaactctgctctaacatatactgagttccctcccattgaataaaaccattgttcatagagagtcatccgaaatcaaagtgaattttcaagactataaatgcactaagataatttgaaatatgaaatgattatattatttccttattcaacctgacttgaggtgtccctctaactctgtcagcattggaagccctatctccctctggattaatctatctttgtatctctatacttatgtagaaatatatttgcctactttaaaaggaaaaaatattaattctttaggtaagtacataatatactttatttagtaatcaattattgctgaaaattccacatgtatgggtccagatgtataagtttgatttcattttttgcatatctttcaatacttttggcatttttagtttaatttttaatgtatgagatattttagtgtcataaaatattaaacctttttctaccttttttgtttgttttctccattttaaagtggtcctttagctacattgacataatggctgaataattttctatatcttacattcattcacaattgtagtccaggaaagatatttacccattaatctcaaccaagtgccaaaattgagactaaatagctcttataaacttcaagtgaaccaggaattagagctgttcatgaaagaagcatgtacttagagttcatgagatgtggctccccaaatgagtatcaggaacagttaatataagtaaggacaaagggatactgaccacacaaaatcaataactgtagcctatatgagtaaaaaaaaaaaacaaaatcagattatcactgctttcttgaagtttgtattcttgtggatgaagacaagtaaatatatatatgtgtatatatatacacatatatatatacaagtaaatgaatatatatgtataaagcaggtaaaggtgagagttgatatattataaattacattatactaattacatttggcaaatctgctatcagactgcactttttaaactttaccactttcctatgagctagagcatttcataaaatttacaacttcttttagtcaatcaaaatcattaatattaagaaatgagttactcatactgatctttatgacatatacagtcaaataggaaagacgagatatgtaaatacattcagttttcagtatttttgtacttaacatcttttaaaagttgaaatcataaatcataataacaatcaagtacaagaggtttaaagctccaacagttcaggaaaattccctataagattaaatagatgaacagtatagatttttaatgaaaatatgatataccagcccaacatagactaaacaacccaagtaaagaattttggtccatttggcataaacataagagaatgatgacaacttaatcctgtgcttatataagcaatgtgtatctggagaaattgtttgacaacgtgcagtggaatagctgtaacatttcaataattactgatatatatcttattttaaccaatcttggtcagattccctagtgattccctaatcattttaatttatatttatacttgaacaaaaatattggttttaagataattctttttagagtatccatttcatataatatatat

SEQ ID NO: 27493 - DNA, 861 bp, Bovine  19866881083914
  misc_feature (1)..(1): n is a, c, g, or t
nactttgaagctgaaggaaattcaaactaaaagatgaaaaatacggaatcttatagtcaaagtgtgactacttatcgcaactagtaagcattgttcttgattagtctgattttttatctggtaattcagaaggactggaatatttttgcatgagtactattattgcaggctggttactttacttcacaacctatcttctgaaagttcaacaactcttcgggtttttttcttataatttcgaatgcattaagacattaagcaagtcagggctgtcaggtgctatttgtgttttgcttttcttttctattcctatgaacagagggaacaatatggtagagtacttgcttacatcaatacttgaacctaatgaacaccatctggaggaagagaaacctgaatattcgcatacattgggcatatataaaatattgctgcaaaactgattaatagttgtatttaacaggccacaattagctgtatttacatcttggtgccagtgggaaagtagaaaaggaatacttatcattgcacccgtgccttactttgaacatgctgttaaccagtgtagtgtggttaacctgtgtgaacaatatttctgaaaactctaatgtgaaaatgaatgatttctttctttccattctctgtagcagagggtacaaaagcacactagataatttatttttaaaatgctttaaaccctgttttatttatatattttataaaaggaaaataaacactttttatggtgaaaggactcaacatgtttcctattaagatctgtaaaatcctaagactattttcaatttgaagctttattttagaaatacaagtatatattattttctataagacataccaaag

SEQ ID NO: 27494 - DNA, 1237 bp, Bovine  19866881153558
  misc_feature (1)..(1): n is a, c, g, or t
naacatataaaatccaggatctactgaatactgtatgctaggatataaattaaaatttgtgctattatgagttagcctgaactcataatcttccataataattcctttaatttatagtataggtgtgtatcttatatgatcaaaatttgtcatgtaatgggaatatggttggggagagttatatgagaaggctgggtaatgagagaatcatgtgagaaattttgcttccttgagatagcacacttttctagacccctttcctctgattatccttttctgatatttatgaaacctagaggaaacaattaatgactaagccaagacctcaataatctaagcaatcatttttattacagtctgagtgccaatataacacagtttgcagcagtttactaaaatacaaatttcctctgccatttatttttaaaattcagggaaagccttaaataagatttaaaaattcattacttaagaaataggaaggtaatgatttccaaatgacttaataattttgcatattaaatattacaggacttagaatgttttgcaatacagtattaatttacctgagaagttattccataaggaataaaaaacatgtgtttctaactaaacttattaccttaaaagcttgatgaatgacaactatgagaaaaatccccttaaaaccatagactaattggttgaatataaattctcttgggtcagaaaaaacagctgtgcatatatattaaggcaaaatatgaggcaagaggaacagataacagcaaataagtctgtcattttatgttgaatgatacaaggattcaaatgtttcctttctcttctggattaggttcataggcccacatgttctatgtcaatgagtaatgacttgctgttcttttccccccatccccatttatgtttcctttcctcatttcagttctcagtgtctgctcacaaccttggctgagttcagcctgccatatggaggcaaatctagggagcaggtttgattttccccctatatgcccttgtacttttctgagcctccattaagcccgatatagctttaacatcttttctacattttttttgtatctacaagatttaaaaaatattgcatcctatttttgcccaacttttactgtccccatgccatctttttacctgaatgcaaggagactgatatttttgacgtgaaatgaatgatgcgggatacaaattgaaagggcttcccttgcctctggggata

SEQ ID NO: 27495 - DNA, 2616 bp, Bovine  19866881204405
  misc_feature (1)..(1): n is a, c, g, or t
nggaaaggggcatcgaatgtttgtttttctttaaaaaaggaaaaaagaaaagacatcctctttttctattcatgactcttctagtcttttcattcttcaaaaagagtgaaagtgaagtcactcagtcgtgtccaactctttgcgaccccacggactgtagcctaccatgctcttccatccatgggattttccaagcaagagtactggagtgggttgcagtaaaagaaaatcaaagctatgtataactgtgtccatagtggttgagattgcatgctttaatctttctggaatttcaaattcctactctttccactctgcagtaaagcgtatagcttttctcagtgaatgcttgtgcttcaaattaggagatgatgtggaaaggccagcccctatacagataagttgacaattctaactgaaaacaaaatatagtagacatttgagatccccagggagaacttggcatatgccgtatgtaaaggccaacattaactgcaatcaatgtcttacccacaacctcaagctctggctcctctgcttttgcacatgagcaagccactcagatctcattgaaaactctttcttttttttcctgaaatgtttctaccagaaaaatccactatcctacaaacaaattgcagttgatagtgattgattttaaataggaaatgtatataaactcagatatattgtactttgtgaattctaccaaatgtccttatgcaattgacaagttaaaccttaggtgtaccactgaaaaagtagctgaaaaaaacatctgaaatttaagtcaaagagaaacattaatttattaagatgatgaaatgtttatcatagatgcagattgcactttggattctctacactatatataaataaagtatatgtgcaagaaaagcagttttatatttatcatttcctggaagacagtgtaagatgctattcagtatttgtcaaaacaagttgcaccatgcactccagccacaccaaactacatatgtttcttgaatatggctccagttcatgctgggccttgtgcctagaatcatattccttttactccttcatctctctttcacacatatatgtatgcagacacacacacacaacatgacctttttctgccttgtaaacagtgattcctctttcattatcataagcttcttatagtacgtttgtttgctaatcttttaactgcttgcttagcagtgaacctgctatctagtaaataatgaatagtaagtaaaagaagaaaggtatatataaatgaaatatattcagtaaaacactgtgataagggttcatgatatgtagttctctaaaataacaaaagtttgggaacttcagaggacttaaatacgaagtaagcaagaatgttttcaattatctctaattcatgaagaatctgaatattaaaaacaattctaaacatgaaataaagataatgtgaaatcatcatagcaaagtgaaactcaaatattttctgttgtggaaacctacacagtctgtgtgtgtgtacccttgttttatatagggggaagaaataagtgaaactatagtgattaaggcataaggcacataaactttctacaaagaatgagtttccagcaatgataagattatataaaaagctttctggcatgatgaaaggacatttaatttttagaagtcacagcaggaaaaactattagcagtataactaaacacataaagtcaagttaaacattgcaagacctgtgcacatggaagctttttagttaaaaaatatattaagaatcaagccttaaagaaaattgccttttaagtttatagttaaaaataaatacaaagtaccatagagtttaagaaaggtttccttctttcatacctgaatgtaattattgtgaaatatatatataactttttatgattaaaattgcattattgtataataatattcaataatctaagatatgcagatgacaccaccattatggcataaagtgaagaggaactaaagagcctcttgatgaaggtgaaagagtagagtgaaaaagttggcttaaagttcagcattcaaaaaaagaatgtcacggcatacaatcccatcacttcatggcaaatagatggggaagcaatggaaacaatgagagactttattgtggggggctccaaaatcactgcagatggtgactgaaaccatgaaattaaaagacacttgctccttggaagaaaagttatgaccaatctcagttcagttcagttcagtcactcagtcatgtccaatctttgcaaccccatgaatcacagcaggctaggcctccctgtccatcaccaactcccggagttcactcaaactcatgtccatcgagttggtgatgccagccagccatctcatcctccgtcgtccccttcttctcctccccacaatccctcccagcatcagagtcttttctaatgagtcaacccttcgcattactggagtttcagctttagcatcatttcttccaaagaaatcccagggctgatctccttcagaatggactggttggatctccttgcagtccaagggactctcaagagtcttctccaacactacagttcaaaagcatcaattctttggcactcagctttctt

SEQ ID NO: 27496 - DNA, 1993 bp, Bovine  19866881206103
  misc_feature (1)..(1): n is a, c, g, or t
ntgatttcagagcccaaaaaaataaagcctgactctgtttccactgtttccccatctatttccctaggaagcatattaagaagcagagacattactttgccaacaaaggtccatctagacaaagctatggtttttccaggagtcatgtatggatgtaagagttggatcataataaagctaagtgccaaagaattgatgcttttgaactgtggtgctggagaagacttttgagagtcccttggactgcaaggagatccaaccagtccatccttaaggaaatcagtcctgaatattcattggaaggactgatgttgaagctgaagctccaatactttggccacctgatgcgaacagctgactcattagaaaagaccctgatgctgggaaagattgaagccaggaggagtggggaccacagaggatgagatggttggatggcatcaccaactcaatagacactgagtttgagcaaactcccagagttggtgatggataggaaagcctagcatgctgcagtccatggggtcagaaagagttggacacgactgtgtgactgaacctgattataaaaggtcacagtactttattaatatatatatatatatatacatatatgtatgtatgacatactgtgtgttgtttgtatacatatgtttactattgtttaaaaaacagattttttttattctatcatttgtaatttatttactcattgttagcataacaaatctccaactcatgtaaataaattttggagaatactatatgcttaaaagttatcccagtttttcttttttctcctctgcttttctttctgaatcagttggtgtttttgagatccacatctaataggaactcattactctctgatttcccttatttgtttccatatgcaggggatctcctgtgccatgtaaattatttcaaaaacacatacagaatgtttatattgttaataggtgcccagtacctccagatcatacctaaatctgtataatttacatctattatccatggaataaaatcatgtttttctcctcttcaaataaaattataattgtcaagtgtggcctcagctgactaggtctggatattcaagggtcccgtgaataaaaccaaggaaaatataaacttattattccccagtggatattatagacacagtaaagtacacatgtttactggagttaaatgtttggaaaagactcacatattacagtaatggaaaaatactctaattatgtagctggtaatttgtttctatgcagcttactttttcatatgtagcttactttttcatatgtcccttttatttaaatgttctaccattcactaggattctatgaaaagtgaaatgtttttattcaaaacacatatactattttgcactttacaaaaacaataaaaacaccaccaaaaataataaaagtaaaatagaaaaactgacaggtactgatattatgctgaaggctggaaaagagcatatttgtctgtgatacattgtggtacatcctacatcagaaaccatttgataaagaagaaaagggagtagcagagggctttagagatgggagttccagagtcaaccggctgtattgaaaacatctaaagttcatggaacttgtcctcatttactggcatggactccatgcccaaagtgccactatcatgaaacagataaagtaatactcagctatatacctttcaaaacatcagtttatatattgatattcaagattttctacaatgtggtttaacttacattaaaaccttcgctaggagaatgtgcctattttagaaaacaagttcgtctactcttcatgctggtgactgtctattttttcttgattttcttgcagatacttggaaaaactttagaatatcatacaatcacccttcagtatccatggtggatttgctccagaatgcccatgaatatcatgaaaatccatggctgctcaagtgtagtatttgcatataacctacacacatt

SEQ ID NO: 27497 - DNA, 821 bp, Bovine  19866881232860
  misc_feature (1)..(1): n is a, c, g, or t
ncgtcttttaatttctggctgcagtcaccatctgcagtgattttggaacccagaaaaataaagtctgacactgttcccactgtttccccatctatttcccatgaagtgatgggaccagatgccatgatcttcgttttccgaatgttgagctttaagccaactttttcactctccactttcactttcatcaagaggcttttgatttcctctttagtttctcattctcatatgattttcaggtgtacatctaagtaggaaaataccatttcttgttttaagtgacatcaaggttgcccatattcttggctgtgaccaatggcgtggaaggaaaagtgatgtatgtcattgccaagaagagatgttaagaaccatgcaatttttttttttttttttttaccattatttcctttctctgtgcagtgagaatgacatgactgatagtggttgcttattccgtttggattccagaatgagtacatgtggaacagagcctcagctgacacacagcttgcatacagtgtgaacaaataaaaaacttttttttttttaaagccagtgaaattttgggagtatttgttatgacaaaatggatcaggaaaagctaatacagtttctgacctcatgaagcttacagacacaaaaggaaaaccatcaaactaactggaatatttcttgtattctacttaagtttaaatcagaagggactccactggacatggaaactttacatattgcaaagaaaacagaattcaggtgtctctgcagaatgctgggcatcttgcccatatttcttgtatatgtcttcattctatccaaactca

SEQ ID NO: 27498 - DNA, 1324 bp, Bovine  19866881332926
  misc_feature (1)..(1): n is a, c, g, or t
ntattaaaaataaagaacaaatttgaaacatggtttaaagcctgtttataactcttcaactcctctccgtatatcctcttgcctcatttactacttttcaactaccctgatcttatttgtaatgctaaatacactaaacaaattcacatatcagaatctttgtctggattattattgtcacatcattgtctcctttcaatcattagctggaaatttttatatgttattcagaacaacatatcttagacccactttggtatattactggaattcagttgttattattagaataaattaattgttgaatatatggtttaattagactatttaataagctggtgaagagtaagtggtgaacttaagaaaacttcctgatgaaaaccaatttggcggatgtgaaaaacaaaagtaagtgcttttcaataaaaagtattaactcctgtgatttaaaatacatccagtgtattgattactccaacatctatatattcagcttagttttctctactatttatttcctctgttacctagtgaacaatttacactgtatatctagactccaatttatctaaaatccatctcattagcttcctcctgaaatttgctattctattctgccaatagttgcatgttactttcccagggaacaaaactctaaaaaagagatttattgacagagatcaacatacaagttctgctgaatgcatgctgaactgctgaagagtgtccaaattcagttcagatgttatgccctaagcagcgaaggtaaaagaaagcttctgctcccaaaacaagtagatatacagcaggaaacctcagcatcctcaccattaaataagatcactctcacattccaataccagttgaaaagtagtagcttgaaataaatgtattttattaagatcagtttagttcagtcactcaatcatgtctgactctttacgaccccatgaattgcagcacaccaggcctccctgtccatcaccaactcccggagtccacccaaacccatgtccatcgagtcagtgatgccatccaaccatctcatcctctgtcatccccttctcctccttccctcaatctttcccagcatcatggtctttacagatgagtcagctcttcgcatgaggtggccaaagtactggagtttcagcttcagcatcagtccttccaatgaacacccagggctgatctcctttagaatgcaccggttggaactccttgcagtccaagggactctcaagagtcttctccaacaccacagttcaaaagcatcaattctttggtgctcagctttctttatagtccaactctcacatccata

SEQ ID NO: 27499 - DNA, 1059 bp, Bovine  19866882122979
  misc_feature (1)..(1): n is a, c, g, or t
natagaagaaaatgtaatttaatacagctacgattacttgcattgcaaaaaacaacttgcatcttgaatattttatctacgactattctttcacacaacttctcttcactacaaaagagaatatttaattaattaaaacaaaaactacttcttgactaagcataaatcatatttttattaagatagttcatataacaaatattccaaagctagcattttaccataaaataaccatattttaatatttaatattaacattatttaatattctctgctgtgtttgcttaggcaatttcctatgtggtttcatttggcatttttcatttttctgtcctgtcttaatgatccagaaatttaaaagaggttatggcatattctgtaaatttgttcagaccttgaaatattcaaataatgggcaatatacctttgtaaagcataagcatgttagtctttgattctttttatggcttagactgctttacgactttctctcaataaaaaccataaaattaaaatgaccatgcaagggtttatgaagcgcctctgacccaatatggtgaagctaatggtaacaaaattgtttcctaaatctgctaaaatacctggagggaacaattttacaatacaaggcagacaggaggtctggaaaatccatttctggggaaacccttcctctggcagctgcatatagaaagaaaagtgtcaatgttcaccaattatattttaaatattgcaaaatatatgtcaggcaataccttagctagtgttccttatagagaaacaaatgagaaaaaccttgacaaaagttatggtacaattattaatgagagcatgaacattaatagttactagagcattactcaagtcccatctctcattgcatttctcatctaatagtagaggcaagaaatgagtgaaacttcggattactgaattaaatacctctcaccattatgtcatgaaaataaaaataccatgtgaaggatctaagtttataggaatggaatttaccctcaaaaaatagtaagagtttttctccaagcgtcttaatagatttta

SEQ ID NO: 27500 - DNA, 2005 bp, Bovine  19866880396508
  misc_feature (1)..(1): n is a, c, g, or t
nggaaatgtttaagttctgtgaaaccaaactaacaccctaattagagggaataatcaactatttttaggaatagagcacaaaaactattgataggaaaaaataaaatttaagagacaaaaaatattaggaacacaaactattaaatataaagttaaaaaataagttgaacacaaactataaatataatttaatctataggaaaatctgatttataatggaaagaaatatgtgtaggttgccaagaataaaatattttgaaaattaaatgattctgcatcttagaatattaaatactgtaacaatattaccatatgaggaaacaattaacctctcctgacatcaatggcaaagttttttaaggcaactgaggtgtgaaaacagaaattgaaattttaaatataaccctaaatgaattgagcagtttgtattagtgacatttagaaaataatgtcacttgtctaaatatttccactcattgtgaaaaatgttacaatttgtggataaattatctactatctaaaatataatatagaaaaaaatttctaaagtgttcttttttgttttcctccttgattcaagctaatgtatccagaataccttaaaatctatttacctatttgtttaaaaccgtactcttaccttattttacatatttaacatttgttttatacaatatagtaacttaatataattatattgctatataacatacactttgactatttcctttaatctattgaaaaaactgtagaattcaaataaatacaatagactactatgttgttcccaaaaccagatgttttgaataatccattaactttcacactaaaaccataggaatgtcctcaagaaaagcttcaatcacaaagatacattaaaaacaagaacctagtgttcaattctcttatccattccctattcattttaactgtgtaaaatctaaattcaattgtaaactgtgatcaattaaggtaaaattttcaaccaagttatttaaaaaatacttattcagacagtatctaatagtttgttggcttgctggctaatcctctcttttattcatatttaataaaccatgatggccaaagcagatttcatcctctctctttttctttacttgctagggataacactataaaatcatatctactacttaagttaccgtttatttagagaaactaaagatctaagatgttaaatagcctgctcaaaggtcatacaactcactcttggatgagtcaagtcttagaactcagggatctagagtactctttggtgccagtgaaagtgaaagtcactcagttatgttggactctttgtgaccccatggactatgcagtccatggaattctctagaccaggatactggagtgggtagcctttcccttctccaggggatcttccaaccaagggatcgaacccaggtctcccacattgcaggtagattctttaccagctgagccacaagggaagccactgctgctgctgctaagtcgctttagtcgtgtccgactctgtgcgactccatagacggcagcccaccaggctcccccgtccctggggttttccaggcaagaacactcagtgggtttccatttccttctccaatacatgaaagtgaaaagtgaaagtgaagtcactaagtcatgtccgtctcttagcgaccccatgcactgcagcctatcaggcttctccatccatgggattttccaggcatgagcactggagtcgggtgccattgccttctctgcaaaggaagccaagttgtcctcaattcctaagtatgcaacaatttcccagtaatttttaaattgcgagcagatgctaaatgaacaatgaactttgaaagctatataaacatgaagtttagagtgataatcaaataaaacttaacaacaaagtccttttagcacatgcttaatggatgcgcaatcatatcctgccgcaaggtaatcgggtaaatagtgagcaaagatcataaaagagcacagttagtcttttaaa

SEQ ID NO: 27501 - DNA, 3224 bp, Bovine  19866880405641
  misc_feature (1)..(1): n is a, c, g, or t
naaaattattcatcattaaaatgaaaggaaatttctgacacatgttacaacatgactagacctcaaaagaaaatatactacatgaaagaagccagccacaaaagtacaaatattttgtgattgcatttatacaagttatctagaacactcagattcatagagacagaaagtagattgccaggacctaagagggagtaggaagttattgtttaatgaatatagttccatttggggaaggtgaaaaactttatggagacagatggtggtgaagattgcataataatgtgaatgtacataataccactgaactgtacacttaaaaataaagtgctaaatttcattttttgtctatcttgccataataaaataaataatgtcagtccttaactcatggcctgaaattgttgaagaaactatatgtacattaagtctattcttagagcattttaaaagtttaatgtatttaagtatatagagaaaaaaactggacaaacactgatattaggcctttagtgattgcacattttttaggaaactgtaattctgtgaataaggaaacaaaaagaatatgaggtttaagtgtttgccagcagatacctgccttctctttcatcagtaatatagacgacactccattaaacaaacatattgccctctttgctccctccacctgccccttagcctgtgttattacttgcatcaatcttgagtcacacagaattacttaagcctctcagagctatgctctctgacttttagtattgtacacttccctcccatagcatatttgttgctccataagtaatttagctagaaaattcttctagcaaaaggcctgttaagtttcactactgttttcactcattaagttgagacagttaaggaataaaaattccataacaaaactgaatagcttatactctgtaaaagccattgttcattgcatattgaaaattttatattgaagtcttagaaaaattctagttttgaatgctattgtaaggtaattttccattgtaaaatacagacttagagctatatatgtgtggatacatgtgcatttctttgtcctcaaactcatatagacgtttccaatcttcaatggccatagtaccggttatactttcatcacacagagatgggaaccagcccactcttccatgtgatatgtgttaaacagtgataattttcattccatgaaataaactattgcagaggtgagtacaccctaaaattacactgagtcaggaaaaaagattacataaaaacattaccttaatgagtaactgttcaataaatatttctcatggaatcagataaatccagggtttcttttgcactcttattaggtagtttggaagagatgaatataattatgggagaatgggccagatggcacatttgaaacccagtgggataaaccagatggaatgctgttattttgcccatttatctatgaatagaaaataggtagggggatggttctggagcctgttgataataatgattttctgaagatttcctcttgtttctgtggtgggtatatgtataagtgtttgtgagtttgatgtagctatagtaatgcaaaataggaaaagtaagcggaaagcagtttgtatcattttacagattccttctgaaaaactgtgaaaaaaagatgtaccaattttaaataattatgagaaaaaagaaagcaaactgtcaaacattttgagctaattagcatttgtcagtgtaatattctgaggctactttatgtgagctgtgactctgtttgcggtgtttgtgtatgtgagagaaaataaaaatagaaattaggttccaaagggagcatttttacatagagaaatgagtggttttttttagaagtaaagacttagtgagttactgggattttaccacctatctgattgtttgtacattcagcacaatagtcctttatagtttgcaccttgaaaaaggggtagtaattttcaatgtttagttagttgttttttttttaagggggtagagatttgctggattttctttgactcaaataacaaacacattggcagcgtagaaatccataacacacacacacacaaacagacaaaaattacatccaataatacctatgcttgctataaaacatgtactgttatagtttctattatattttttctttcttctagttattatttaaatgttggttgtatccccttaaaatgattttgtgacttatttataggatacaattatgaaagcattgccatagagaatctgatcaattaaaatgattttgctaaaatgctcatccttaatcttgagtatattatttctttttgttttacatttctggttatcaaagtcaaaagttcctaaaataatctttcctctcaatgaaagccctaatggttatctgtcaatcgtactactatattttgctgctccttgtttgtttaagataaacgtttccttaaagaagggacacttgatataaagcaggcaagttagttaaatggcagtaaacaaactgcagcctagtttgttctaatataggaacattgccttgcctcatgtaaaaactagtaagagtaatgggaagcaagttttaggcagtggtcttcctctaaacttgtcaattgctgttttcctcaagctttaaccttaaggcagatcaaaaagtgagccaggcagaccatgcatttcagcactgatctccaccccctgaagacccagcaagtcaggctagtgtggttcacactggttcaacctccctcttccttcattgtctctttgtgcaccagcatttttcaagttcagttccttgctcctgcccttcttatcattgtgcttttactttaaccttgagctcagcagtcccagttggtataactctgttacttgaagcaataagcaacttttcttttcaagttaggaactttttgtactagttttttgatgaaaatattttactgctggaaactggtctaattccctcataagacttagtttacaatcctggtttccagaggcctttcccacctgcaaggtgcttttgaataggctactttattcacttatctatagggtgctttcaaaatgcttttgtgaaggtgtgtgcctctgtgccccatgaaacctttccaagcagagtaagaccaaacatggctaatgggaaactagaatcaggtttaactaataacccaggacgtaaaatattaaagagataatacaattga

SEQ ID NO: 27502 - DNA, 2934 bp, Bovine  19866880509427
  misc_feature (1)..(1): n is a, c, g, or t
naagactcttgagagtcccttgaactgcaaggaaatctaactagtcaatctctaaaggaaatcaatcctgaatattcattggaaggactgacgctgaagctgaagttccaatacttaggccatctgatgtgaagggctgacagaaaagatcctgattctaggaaatcagaaaagactctgattctaggaaaaattgaaagcaggaggagaaggggatgactgaggataagatggttggatggcatcactgacttgatgaacatgagtttgagcaagctctgggagttggtgatgggcagggaagcctggtgtgctgtagtccatggttgcaaagagttggacatgactgaaccactgaactgaactgactgatgtgctctgggtcatcaaatggttaacgtcttccatttggttgagtggggtaggagtttacatctgcaaaaaaattcagaaaatttgcatcaaatactgttatctaggtacttcagaaggagaaggtaatggcaatccactccagtactcttgcctggaaaatcccatggatggaggagcctggtgggctgcagtccacggggtcgctaggagtcagacacgactgagcgacttcactttgacttttcactttcatgcattggagaaggaaatggcaacccactccagtgttcttgcctggagaatcccagggacgggggagcctggtgggctgccatctacggggtcgcacagagtcggaagtgactgaggaagacttgccgcctcacctccccaggccccatgggatcctactgagttacacaatcaccagcaaccaaaagcaatcacatttatgattacttgagagcaagtgctcacatgtccataatctcctttggaaaaagatagaagggtgacttcaaggatataatggaaagtaatcctacaaattcctgtgtttaatgtttgccctttgcttcactggccattgaaccaacacattatataatacatgacatggctatcttcaaaaatgtaaatgaaaaggagaaatatatgttgaaatagtgaaagaacgttaagcttacaaagagtggcaataaaaagagagggagaaaagtgagtaaagttagttccagtattcactcacctttggtcatatcacctacagtgatgatgcattgattatacccttgctcttgaaaataattctgttggccaacagcagacttttagactctacctcaccgctattgaatcagaatctgcattttaacaagattcaaatatgattcagctgcacatgccatttttgagaaacactgttttagatcacaaagtgatgaagtaatgctgtgacttgccaaagaagaaaaaaataaaaactttctaaaacaatacagaacatgaaacaagaatatatatggaatcaccagattaactatgccatataaagaaatttctattaattctgtaactatgtaatacatcagttactttataaagctaggaagcaaaatgaaaataaattgtaagtgctatttcctgtttggtgaggaggatgtcagcagaaatacaggcaaagatatgacaactagctcttctcagtactttttcctgttaatcttatgccttctaataaccctataagatgtcacataagctaatattaaaagcaacaaattatacttttacttattctgcttgaatgatgctcattaatattttatgttatatacaattgctatcagattttatgtgtccaattaatattacatacaatgatatttttgtgaagaaaatagctgaaggaagcagatgtgtgggttcttaaaatgcagctgttattaaaattaaagaatataagcaatattttggaataatttcttacattttgtgtaacataattatataagtattttgtcaagagatctaaattttcttaaatttctactgcttggagctttcaacaagaaaacactggcatagatttataggcaaggatacaaaatataaaaatgaggcaacattttgtataaatttatgagacactgaaaagtaagagagcctcatttttttttaatataccaaagaactataatacatctgtgttatcttgacacattttgactaaaagaagattgtttcatctttcactctaaaattttttaactgaagtttaatctaattttcaaatgaaaaaatctcagaaatgactttggttaacaaaaatgagatatttcatagtaaacatgttgatagaaagccttataccctatatgattaatttatagttaaaaaatagagttgagatactatgatctttcttccctttccaaatgttggaaattcttactctgaaaaactgccgaaatctcataaaactttttgtggtaaaaattttaccacaaaatcataaacagatattttccaaacaagacatgtgatgtttacctaggcttatcctttattatggcttccctggtggctcagacagtaaagaacccgcctgcagtacgggagacctaggtcccatccctgtgttgggaagatcccctggaggagggaatggcaacccactccattacttttacctggagaatccacatgggccatggagcctggcaggctatagtccatggcgtttcaaagagtcagacacgactgagtgactaagtgcatcctttattaattttactttattttttaaaatcaataagataaaaacattcttctctggaaaaaagtaaaactcaatggaccatacaaatatcttcctgtcaaatacataaaattcaatatccttttcaagtcaagtctttgcatagagcacgacaatagaaaagctgaatttatgttaatttgttatcattgatatatttttaaatagctttataaatatttaatacatgctagaatcaaatattttatgcaaaagaactcttttcctaaaaatatcat

SEQ ID NO: 27503 - DNA, 1321 bp, Bovine  19866880519947
  misc_feature (1)..(1): n is a, c, g, or t
nctttggcatcatatacatagtatctgttcactcatttgagcataactatcagtttcatgaagacatttaatcatactttgtattctggttttgtataattgtaaaatgatttttatcagtagatggtttggtttatgtttgtctttttagtatttctgacaatctgggatttagaaattttagttacaaactctctttgctcttacgtaagcgatgttgttacatcagatgttgattttaagtgactcattgaggacagaggcaggggatgatagtgcaattcttccttaaagataagatgcatgatcacattatttaaatctttcttctaaaggatcaaaataattttaagtttcaattcttaaatgtaaaagaaaaacatttctaaaaaggcaaaggcaaggaataagtaatcttcaggacatcttaattctcagaagtcctttcacaccaactcttgaaataacaatgaagggtcagattcaaataaaccagtttcttccctcagagagcttatactcaaaagacccaaactgaatgcaacctatgataataaatatgaggcgctttatctaactgatagacagtgatctgtactgaccagaggatttcttgagtgacatggtaagaatactggtaaaatgaggatgacagtgtacttgagttaaaaggataatttcttttttttctttcctctttccactcctctctccctccccttgctttctttgttgacagtaaagttctcataacatttttcccctaaagaatccgacaattaaatatctataaatcttggtgctggtgacatgtttgtttctttaatttgaagagatacactgtctgaaatgctacttatatttacatccatgtgtgcaagttgtcgctcagtcctgtctgactctttgtgaccccgtgaacttgtaccctgccaggctccactgttcaagagattattcaggaaatcttcccaacccaaggatacaaccaaggtctcctgaccctgtgtctcctgaataagcaggtgtattatttactgctatgccacctggggggccctatatttatatccactgatgattgatcctcatggtaccttcagtgctgaagtaacaggtgcagtgatagtgcctgcaattttaacagtcttgtttatacaccctatgctacgcatgtattctggaataggatttatcaaattgtatttttctttttcaggggcatttttgttttcctcttatttattaaggattttaaagctctagcataagttttgtttttcttaccatttataatttaacatggtgtctggccctctgg

SEQ ID NO: 27504 - DNA, 659 bp, Bovine  19866880548827
  misc_feature (1)..(1): n is a, c, g, or t
ntgtgaagagatttacagattgagtggacactacttggggagagcctaaaaactagcatacactaaagccttagaattattctagtttccatcttgctaaactgaataatagtggggcccagctgcatattttacttcccccttcataagagagggcttcattttaagaacataatatgcctaaaagaattcttaagcttctcagacagagaatgatggtctcaaaaaaaattgttgagcatatatatgaaaatgagtcctattattagatgaaacaaaatacagatatgtggaaaatacaatttcctgtaacatttcttcagaggaaactacttatgccattatgaaacactcttccccaatcatttattatggtttattctctataaatattttggtttccagttataaatgtagttaaaatatccagtgcatcctgctatctggtttccatcacactaaagttatgtttgactaatgactacttgtataacttcttgttttacaatatcctttctaatcctaaatcattctcaaagccaataataggttctgatgtgtcatgtcactcagcataaagttcctcatgtatttttgataccactcagacaaaggcaagataactctcaacataaaatcgttcttgtgaactttccaag

SEQ ID NO: 27505 - DNA, 1333 bp, Bovine  19866880569471
  misc_feature (1)..(1): n is a, c, g, or t
naattccatggacagaggagcctggcaagcctgcatgtacatgtagtccacagggtcaaaaagagtcagaaacgactgagtgattaacactacccttaggtaaattgcttaagagtgctgtattcagcttccctcaagtgtaaataaatgacttctgcctcatgtaactaggcaggggcagaggagggtggtggtagaggaaggaaggcaccaattaaattttgctacttaagttgaaatatgaaaaagtgctcactcacgttgctctactttcttactctagctttgaaaaaagtcacagaatttagaattgtaagaaatttattactgagaacatttagaaggagaatgttatgctgaggaggtagtgagaacaactataattgagaacagtctgtggtcaagtacaataagtttcaaaggaggtatctcacatgaggattagttagttcaaagggcaaggtccagagaaactaggtttagtaggttttgagtcagaataaactatcattgggtcagcaagagcttcaacaacaagcccaaaaatatgatatatcaccttgggcatagggtttctctgataactcctaagaggccaactgaagctccttattcccagagttccaggctctctcgatagttctcatttcctataagtccctggtagctaaaagacttcactcagtagatttaacacatgttaagaaattacgaaaacaacataaggtttatttttctgaaaatgaactttctttttattcacaacaggaaaaaactcctcaatctaatagaaatcttagccctaagttattactttctagtagtctctgaaagtgtatgtttggcatatggtatattttactttagttttatgcttaaaggtattcgaataaagaatgtatttttttaaatcttaaaaagaaataagtaaaatacatttctaagaacttcataattattcactgttcatttaaaatctagccttttgagatgtgcttatgtattatgcatgtctttttacagaatctaactacagaaattccatctctcaatgccttattcaattcatttttggtacctttatttttccaaaaaaaaaaaaaaaatgtccctaatcatatttccattcttctctcattataggggttgtctctctctgtctaaaaggcattgctgtcacctctgaagtgttaaatatcacatggagaaaaaccatgattaaattttcccatgacacacccatgactgctgctgctgctgctaagttgctttagtcgtgtccgactctgtgcgaccccagagacggcagcccaccaggctcccccgtccctgg

SEQ ID NO: 27506 - DNA, 896 bp, Bovine  19866880582038
  misc_feature (1)..(1): n is a, c, g, or t
nttattttacaaggtagcagtcctgttgataatttcttcagaatgtgatatacttcaaaaaagaggacaaggttaagtttaagttcttcatttatggaatatgtgtagatttaatgaaatttctctctataaccaaatgataatttagctccaattaaaggctggaaagaggctgcagctttatgagtccagcattgttatgttaaaatgtttaggactcttttcatgattatgattaataatatatattaaaaattaagaagtttaaactgcaattaactgtggctcagagtataaagtggtgaaggatttctcagttcttgtgcaaatgttgaataaatgttgaattctttggggaaataacttgaatatccattgattttactagtacagtaattaaatctattccctaaggaaatacactttagtgtgttgagaagctgcctattctctgtgtatcttgagccaggtaagctgtttcctggatgtcagccctgggattgcacactgtccctaccatcattgcctacaaatgaggatctggtctccatcttctcttgaaatttatctatatgttccctaaacaccttgtctgttaatttacaattgtattatatttagtaaaagtcaaggaatacacaaaatatacagtttatttaggattaacattaggatttagcaaagggccccatacagatattgatgataatttaaaaaacctaaaaattttctaatagcgttcactgctttcccaaaacaagagtataactggattattcttcagctttccccctgatttgaatctttaaaattttcaatttactctataataagcactagtggggagaggggtattaatcaaatgatgtatgtctgtctccattgattttatattt

SEQ ID NO: 27507 - DNA, 2316 bp, Bovine  19866880681312
  misc_feature (1)..(1): n is a, c, g, or t
natctgggacgctattcagttggctcctgtcatgttagtaaaattggtatttacttattctaaagctgttgtatggtggtttagaaagtctgtaattaaaacccccaaaggttgtggcttcttacaggtttctaaacagaacccaatctgtaataaggagaaatacagtgatcagtgtataacagttagacattttggggcaagacattttcagaacaagtgctataaggctaacagctaaattacactaaaaataaattcaagtatatttttcaaatcagatagagtgattattataagcttttaatggaaaaaaatcctttcacttgacagcatagtgtaacatatttatcaggagcaaagtgtaatgttaaaggctttggaggttatcagaatacctgggttttagtatctcctcttctacttatctcataccagtaaaatagggataaaaatatcagtattacctatgttatagagttacaacaatcaaaagagtatataaaagtatctttaaaacaacaaattaatatccagatattaattttattaattgtataaggtaattttaaatttttttatattttaaattttgttagggtttgattgatttacaatgttatgttaatttctgctgtacagtaaaatgaatcaactatacatatatccactcttttatattattttctcatataggtcattacagagtattgagtagagttccatgatctacaatggtcctataaaattgtggtttagtctctaagtcatatccaactctttgcgaccccatggacagtagcccactttccaggcaagaatattggagtggattaccatttccttctccagaggatcttccccacccagagatcgaacctgggtctcctgcattgcaggaagattctttaccaactgagcctccagggaagccatgctatacaataggtccttattaattacctgttttatatatggtagtgtgtgtattggtttcccaggtggtgctagtagtaaagaacccacctgcaaatgcaagagacataagagacctgggttcaatccctgggatgggaagatcctctgaaagagggtacagcaatgcactccagtattcttgcctggagagtcctgtgtacagaggagcctgacgggctatgcttcatagagtgacaaagagatgaacatgactgaagagacttagcacacacacatatataatacagtgtatatgtaaagggcttcccaggtggcactggtggtaaagaatccgcctgccaatgcaggagacacaacaaactcaggttcaatccttggggtaggaagatcccatggaataggaaatggcaacctgctccagtattcttgcctggaaaattccatagacagaggagcctggcaggctatagtccatggagccacaaagagtcagacatgactgagtgaccgagcacacacatatgtaaaactcaatcttccaatttatcttccctcttttccctctggtaaccatgattgttttccacatctgtgactctacttttgttttgtaaataagttcatttgtaccattttttaagattccacatataagtgataatatgtctttgtctgacatacttcatccaatatgaaagttctttgttgctgtttagttgctaagtcacgtccgactcttttgcaaccccatgaactataatcgccagctaagctcctctgtccatgagaatttcccaggcaagaatttcctcctcctgaggatcttccctgacccagaggttgaacctgcatctcctgcattggcaggcagattctttaccactgagctaccagggaagcctatgacaatctctagggttatccatgttcctgcattattttgttctttgttaaggttgagtaatatttcattgtatataactgctacatctcccttatcattcctctgttaatggactttaggttatttccatgccctgactgttataaacagtgctctagtgaacattgtggtgtatgtatctttgcaaattatggttttccccaggtatatgccaaggagtgggatggccttggtgtcacagcaatggcgacataccatgggatcatatggtagctctatttttagctttttaaggaacttccctactgttcttcataagtacaaactaaagttgctcagttgtgtccaactctttgtgatcccatagactgtagcctaccagactcctccgtccatggaatttttctggcaagagtactggagtgggttgccatttccttcttcaggggattttcccaacccagggattgaac

SEQ ID NO: 27508 - DNA, 1355 bp, Bovine  19866880725362
  misc_feature (1)..(1): n is a, c, g, or t
ncattaacatgttaattttatgagtgaaaataaaattttatcatcttaattctcatttctttaattattagtaagggtgaatatttaaaaatgttcattagacattgcaactgaataattaacaattctgcaagctacagagaaactcatagaaatattagttgaattcatgcaaaaagaatttttgttacattagccttttatttaagcattgttttatactgtgtaatgccatttacctatgactatattttataataacatctgaattttcaaagtccttttgttatgtccttgttattaattggattcacttaccacattactgggatgctgaaagtttaacaatgccaagcttttatttatgacagactgtgttttaatatgttgaatcctgacttagataccagatttatgttataagagtaaaacaaatgaatgtgattcatcccctactttaagtagttgaccatctagatagtagtatagaaagccctgggtgcagtcaaatagaatcaagcctggggaacagaatctggaattagtcaatcataaaattccaaatggaacataaaatttactttgtagtttaatttattttgccctgttgctatcttagatgttaatgaataatccttcctggccacctgtggtgaaatgagtatgttgatgaaaagactgaatttgaaattatggaaaagtttattgagaaggataggtaaaaataaaggaaaaattcatttgttaaccataagaatagacaagggaatggaattcacaattagaatggaatttgcattccgtttatcatgtatgttaatttatagacttgttcagtgaaccctgggatgtgttctgccagcccctacttccccataaagcagcagattctggatctcctcaccctgcaggtgtcacaattaattaaaccagtgtttctattttgcaagtattatgattatgatcactaatggtgattagtctagataatattgtcaggttctcactttccagcttaggggtattgctttcattctaaagtgttgattgtttcttatctaaatttgaaaataagattagatgctttttaagctgatgtctcctatattgtctaactatggaaatttatatggtaatttaaaatctgataagctatgagtggcataagcctgcataataaagcaatcataagcattgacatattgggcagaattcaactcagtttgcaaggggaaaagatctccatcacatgccaaagacttagaagggacattgaaaatacaattcatcaagcagaattgtatttattttatccactttctgcacatgtcggaaaattttatttggaatttcaa

SEQ ID NO: 27509 - DNA, 1552 bp, Bovine  19866880773644
  misc_feature (1)..(1): n is a, c, g, or t
ncacatactggagtggaagaatatatcccatcatatgtctttatacctgaacggcaaaatgagaaaacaaaacaaaaagaaacctcacacccacagcagagagatgataatttctcatctatcttttctgcgtgtttatcataaatcattttaggatacaccttttcaacgcatagctgctcttaattagatccatattgtcataggaagtaggattctcctgttgagtgtggccaccagcagcaaaacatccatttgcctataattgattttcaggtttattcaaaatgctccatgaagcgtagcatattgaaatgacttatcatgtttattggaatatcttgaggataaaagttatctttgaatgatattagcatattaaatgtagtataaaaagatagttcttaaaaattattttaaaatagttttactattcatcttttaattttttccacaatttttaaactactgctctttatgagaatatgagtcgtcaattccaaatgcatcagtgggagggtctacgtgaactagtaggctagcctttaagaatagataagaaaatgacagttgacttgttcttttataagcatcccaatgcagttcagtaaatatccgtattatcttattattgcctagagattctaaagacctgggatacaaattataccatctgacttactttagaaaattctgatatctcttttctttgagaaagaactcacaatctattttgaaaagttaacatctaactgccaggttataatccaatgaattgtctttcttagagatactgagtaacacacagttgaatttcatttcattaacttcatataaaagtgtgtattttacattctgttttcagcagaaaaataagattttataattgacttatataaatgattgtagagaagcaacatatggaactacatgtggagaataaagggtgatggcattatttgagttaacataacccctttgtgtaaaattatatgcttactacaaaggtagactcatgcgttcatttaactttatttgagttgtcaatattatgaacaacagaaaatgagtaagatattgttaattactttcaaatagcttccaatctagtaaagagaactgtggctagaaattgctataacaattattttaaactatcaagagacataagataaaagtgttggcaaatttcatcatgcaaaagaggttcagctattttccaaaaattgtttctccaagtatattttcttcttttatccttcttttcttaaaagaaagaaagccagggcaatgaggcttacaacctgcatattttacttcttcctatttcattgtatatcttaaactcctggtacttgcaaatctattaaatagttggaaaacaactgctatgaaggaaagaacatgaggtttgaagcctaacaaagacggattgaaatctctacttttaggttgtagctaaatgagtaaatcatgcaattttgttaattgtctgtatgttcctttgtaaattggggtaataatacctcacttaaccgtattaaattataga

SEQ ID NO: 27510 - DNA, 782 bp, Bovine  19866880859960
  misc_feature (1)..(1): n is a, c, g, or t
nttaaactcattataagatcctatgtaatcagcatacttgagtatatcataatgaaatttaaagaataaaaggactacaggcatataaaacactttggcttcaaaaattattactcaagaaaccttatctgaggccctactatgtattaagcatgttatgtatgcaaagatgaaaaatatgaccctaagtctaaaatagcttccctggtggctcaaagggtaaagcatctgcctacaatgtcagagacctgggtttgatccctgggtcgggaagatcccctggagaaggaaatggcaacccactccagtactcttgcctggaaaatcccatggactgagaagcctggtaggctacagtccatggggtcacaaagagtcaaacacaactgaatgactaaaatatttactcactccttgcacagagtagatagtaaggagataattaaaatgaagtgtaaagaatgttatgagaaaagtaaatacgggtaactacaaggtttgggaggaataagtaaaatgggggatcagggtctgtacccagattaagagggagacattagaaaaagtgatgctgattcctaaaacatcagtaagagttaaagagtctttgaagggtaatccatgaaaaagagcaagcacatgtgaatatgtaggaggagaaagccttatttacttgcagaatccaaatctatgatgaagataaaggtagatagtgaaaatttaagcaaagtttacatcataaagcctattagagcaagtgaagaagcttgcttagtagcctg

SEQ ID NO: 27511 - DNA, 1718 bp, Bovine  19866880859977
  misc_feature (1)..(1): n is a, c, g, or t
naataaccatctcctccagtttaagggtcaaatctctctaagcaaagttttgaagcatggagtccatcattactcaaaatgatctaattaatggtaaagtgatccaataagcagctatttgttaaaatttgaatttcattactactaaacatgtaatttataatgtcatgatggttactttaaaaaatatcatgcttgtttaatgaaggaattctgacatgtaaagcacttccttattctttcttgattaagctggtgtagccccagggcacaggaaatatcgactcatatggcagggttgataaggatcaactctccctcctcacttggaccagcaagctgctagtgaattcagcagatgtttctactatctgggccaatggaaaccttatggacctttttccttcatctcctcccaggagcaaatgttaacacagcagaaatttggatgcagaccaaataggaagcagaagggttggtgagaaagtagggtacactcttatccataaacagcagtcatctgtggtttgaattgatgattgagccattttaatggcttatttctgttcatttgctatttaaccaaatccctacagacccttatattcttacataacagtgtttaccttaatcctataaatttaatccttgaatatgctagttgtttcaagattcaaaccaaaacaaaacaaaacaaaaaccaagaatatgaatatataaggtaagaaaattgttgatttctaataatttttcttatctatatagaaaaaccacctaactgtaacttgtaatttactaaacttaatttatattttttgatgtcatattaaaaatagcaataataggcccagtttccataaaaatttccgagaaaaactaattaaagggttaagcttaggactcttcattaaggataattcttattcagttgaattttaaatgaactttcttaagaacccaatttgattaaattcatgtagttgttcctcatctctccctccatctccccacactcaattacattgacccagtggagtgcccatcaattttgtatgatttagatttttatcacatacattcaaattctataatttagagttctactttgcccctacacaagttttctctaatacactaatatagagagaacattttttaaaagaggtggaggtatatcttagactctaaaactatatattgcctcaatttattttaacacatcaggatatatttcctgctgataaagggataaaatgttttggaagaaatttgagtagaaaaataacaatgttgattcatttttcatttattcaaacttgttgattgaatattactatgagtaaggcacattaaaagcaagtaaaaagaaataactaaatgtttaagcacacaacttagtatagtaattgatggaagttgcttcaataaggtcagcattaacaatgtcctataatgcactcaatcaactccaaaagccatattgagaggctgccctacaaaaggcctgtttcatctgtttccatgattgctttagaaagggtatattgttttgagcaaaatagcaaagtgtaagtagctaaaaaaattttggcagtgtttttaaatgcttcctgtgtgtagcatttatgaaagggggtggttagaaaagatatttactcataagtttcgaatgccagacatttaacagtttttccctcttttattctaattgtcagaag

SEQ ID NO: 27512 - DNA, 764 bp, Bovine  19866880870981
  misc_feature (1)..(1): n is a, c, g, or t
nccaaagtgtgtctgactctttgcaccccatagactgcagcatgcccggcttccctgtcccttaccatctcctggaacatgctcagattcatgtccacagaatcagtaatgctgattcagcattatatatgctgatatttagtatgcttatatttagtatgtatatattagatatgttcatcaacatgtttatgtgttatatactatgtttatatgttataatatgtttatattatgcaatatataacagcataacaaataaacagtaaaatccaatgatgtcagaaagcagacataagatatttgaaggttattttacactactcaagaaagtatatgcataaacaaaaatagcattacttaaacaaacataattcaatctaactttcatataattatatgcatacttacctgtcttttccttggcctttacaagtgtgtttggcttactgtctttttaataaaatttatttctggcaaatattttatacatgaaattttttattttcataaaattaaaatttaaagaccacttctttccatgattgttttgatgcctgtgacttccaaatgaaggaaatgctttcaacatatgaatgggggttaaaatgccatctgtaccctgcatggggcctcatacatactaaatattgggatagcttttcaataacacttctcctaattgaaaagtaatagaaagggatactatatatatattcaaattattattagcatgaagctgccaggatataatatgtaaacat

SEQ ID NO: 27513 - DNA, 1535 bp, Bovine  19866880933490
  misc_feature (1)..(1): n is a, c, g, or t
natatggcaagtcaactgcccaatatacttaatttatctgaaatttaagatatatgtataatagatcatgtttgatattaatcttcttacaaagaaaaaaaatcacagtttccaaattgcaaacagaggaggtctgtgaggaaagatgacaaagacagatttcatactcagaatgaaaataaaaccagtcctctaaaggcagggaggagaaggcagtggcaacctactccagtactcttgcctagacaatcctatggacggaggagcctggtaggctgctatccatggggtcactaagagtcaaacatgactgaagtgacttagcagcagcagcagtagctaaaggcagggaaatgacagaggaaagaaacagacattgtcaaagtacacacacaggaatgacatttgcaagttctttccatttcatagtgagttcatttgtgttatccttgcctaacccttggtatttgtctggtataaggacagactcctcaactctttgcagcagcactaatgttattaattcttcattaataacaatggtaatggtgtgggtcatcccacttgttaattgtcatggtcagtattggccttagtcattgaagtaggctaatacttggggtgggcttccatggtggctcagatggtaaagaatccacatacaatgtgagaaacctgggttcgctctctgggttgtaggagggcatggcaattcactcaagtattcttgcctggagaatccccatggacagaggagcctggtggactacccatgagatcgtaaagaatcagacacaactgaccgactaagcacaatacttggggtactgaaagagaaataggctaaggactatgctgcagaatagtccaggaaagctctgacatgtgggtagattactgtatattctaaaccataccaagtcaggataaaaaggatatgaatgtcacaagtaattatatctcatgagtggctcatctcatttctgcatagaatgttgcattgagtttctcttattccttttcaacagctatcagttttctcctttcttcactccatatttaccacaaaatcctttctctccacctagaaatattctactttgcatttaaagttttggagcctccagctaaaggacacttcctggcatttgggtttataaagtgaacataggcatgctaattatttttgcaattttattctttttaataaggtcccctaagcattgccctgatttcaaaaggataaagatgtatccaggctcaaaatttgctaaaaatctcttttaataaatccttgatccaaataactcagtttaaatcatattaaagtacagcagctattgcagattaatatcttgaatttaaaatttttaattactgattatatgtacaaacctctccatcagtttatattcaattatttgataatatcaattagttgatatttttgataactgtgtatttaatgatcttaaaaacttaaaatttatttttaatatgctgacaactaaaccttgattattttctgcctcatt

SEQ ID NO: 27514 - DNA, 1964 bp, Bovine  19866880993458
  misc_feature (1)..(1): n is a, c, g, or t
ntgccaaaaggagcagtgctgaccatcaacacgattctggtatttgagtttcatttatttcagacttcttatttgctatcccgagggccacatatcttcaaggcttctgcatgtcagctgtgtaattgctgtaataataatctggtataaaagtcagtagctttttactacccagaaaaataattttctgacatttctgtgttgtgtccaagcaacagttttagctactagctacgttaatcacaaggaataatttataggaataaattagtggatgagtcttaaaaccatctttttgtgctatttcattttcaaagtaaaatatacttgtctcagtgcttgttgccaggcacaataaggcatgctctgagcccagggaatgcaatcagcacctctggaagaatccatggtctatctattaggaatcttggactgcaaacgagggaaaccgaagctaactaagcagaggaaaattttatgcagtaatttatggagctcacaaggataattggatgctgagaaagcagggcagaaactggattccaggtagcagcacataatgggcagtttctttaggtcaccattgcaggaatgaatctgagcagcttgtctaacctttttccaatcttgattggccaggtcatcagaaaggatccactagggaaaatgttcccaggacaatattggaatggttacagagaaaatacacataataaatgtcctctctgtagggacataggagagtggaaagtttcagtgtcatcagtctccaaatggagattgagatctctggcattctgttgcataaaaacttttatttctcacagaaacaaaaccaaaacaagatgaattgttcttaggtgggccatgataactttggtctttaacagtgagctaactattttaagaaaaaaatatatatagtttttcttgtggagagggatttttgtttgtgttgcttattgtcatattcactaagtttaatacagtacctggaacatgtaaatgatttttcagtatttttcagtacttgcaataagcaacccttttaataatctttcttagttattttttgatagacttggcttcttaaaaaattaagaagaaactacctttgtgtatgaaaaactgaagttttaatcggatttatcatggccaacaatctttgtctcaggagagaaattccaattctcaaaacatgctttcttggaagttcaacctctactgagtttcagttataagtgagagcaagaccattcagccatccatcttcaggagcctaggactgttcatatgattgaatatgttcatgtttagagaagcatgcagtaatatgtgatactgtctaggcattgcatcaatagcttctatctcttagggtcttgaacattccatctcattgagaaaaaagaagattctagcccaaagaagggacatattattaaactgctaactctcaaatatccagaatagtttgttggaaaaaaaaatggccaaacctcttctggtattagtacatattaatagaagggtagcatgagtgaggcgctttcactgatcttgggcaaggctattggggtataagtaggaggctaatgaaaaagacaaacatgaatccaggtattggcttaggctgtcagatggatgttggagttatttactatgatagagattatgcaaagggtaggatcaaggaaggagctgattacaggcagggtgactgaccatcccttactttttaataagtagtcattgtcaaggattctgatttctgtgacaatttggactttatcataaatgtccaattagagtacttgtgtttgtttatggctgttccaagtcttaaataccctgtttctgctgggatttgtcctatttctttttcagagtgaagtgttggtagtgaggcatatctcatcaaaacccctgtgcttcagcagcgctccagtgctgcttccatcaca

SEQ ID NO: 27515 - DNA, 1536 bp, Bovine  19866881180340
  misc_feature (1)..(1): n is a, c, g, or t
naagaatgaactgcaaaaaccagctaaaaaatgtgtagaagatgtgcaaataataactttacatagaaaaatataagaacacacatacttgataccagcaagtctaaatgaactaaaataccacaaagtacaaaaaaaaaaaaaaaatccaattcttaaaatgtacactagatttataacatacctttaatttggagataataaattagcttcgtacagaaaataagattaaaattatatgcagaatttgcattttgtatatcaaaaagaaatactagatagcagcttcatatttaaggacagaatatatagtcttggttatatggtaagctattgttatgctattcctccttccaaaagaaaactcacaaatcattgttttcagtggtggagggatatctattgataaaatctatttgtgagaatcgaaacttgggtttctagccatatgtgaccatatgaaaataggctatctttcattaacgtaagcaattgtttgaatttctaagttcatagttttatatgtattcatatttttcatttgacaattttaacttaacatacttctattttttaaaaccaaagtaacccttagagaagatgtaagcaatggaatgcaaatggggaattcttttgtgcttttcttgtgcagtatttactcactttccaccttgttatctacaaaacatgaaaacgcctccgtaggcacaatacttcagtctgacaagttgtcataatactcaggccagtgctggttttgtgattgcttgatgtgtcaaaaacatttgatggattttttaaaatctggaaagtctgtgttcattatccaaatcataggattttctcagatttccatgggaaagaaaataaaaaagacttgaagcaacagaatttagtggaaattgaatatcttctcaaagcaaacttgagtcttattttattgcaggctttcactgttacaacagagtaaagtaactgcagagtaaagaaccaagagagcatgtataaagacataatacatttcaagtataaattactttgtattatagatactagacaaaataagtttaacaaaaatttaattcagattttcaaagtcagttatcaattttgacaggtagcctgtttttagattattaacacaggaatatgatgtgcctttaaaattatttgctccccatttcttttaaaatgtttcattcataagcagacattattttattttacataaaaaaactcagaacttgaaaatagcttcatatactggtttatataagatatttatgaagcataattcataaattatgaataatcatttttatattattatgtattctatattattataaagcataatcatttttaaaatatctaattataaaacatagttttgataatctgagaaatacttatttcgttacagtggtactagaaaaccagtgcatatttgctgtcacaacagaagacaatttatgtactggtgcttgaccacagcaccattattagaagatgcctctcactggtaaagaacattag

SEQ ID NO: 27516 - DNA, 1721 bp, Bovine  19866881194636
  misc_feature (1)..(1): n is a, c, g, or t
nctgtgctcatgaagaatgcttccagacccatcgtctcatgcaggaggggagtctgcccattttccagatgagataactgaggtccaacaattagagtgactcaccctgggtcacatggggccagatcgcccttgtctgaagtcagagtccctcacatgtgtcatctgggttggccttgcctggaaaatcccatggatggaggagcctggtgggctccagtccacggggtcgctaagagtcgggcacgactgagcaacttcactttcacttttcactttcatgcattggggagaaggaaatggcaacccactccagtattcttgcctggagaatcccaggcacagaggagcctagtgggctgccctctatggggtcgcacagagtcagacacgactgaggtgacttagcagcagcagcagctccatgaggccaggacaatgaattgtcttgtttcttgagatccagttctgttctcagttccccgaccagggattgaacctggggccatggcggtgaaagcccagaatcctaacccctgaaccaccaaagaacttctcccaccgcctcttaattctcacctcaacccccttttaccgaaatactaacagctgacaattagtgcttcctaacacccggcacccaccaccccaaccccctgcaaagtgtcttgtgaacattttccttcttgttcattgaggcctcatgaccatatcacaagtgttgggggtcaggtgtgggctgcaggccctggtttatctcctccatgacaaccatggaaaagtttacgctggaggctgacaaggccaggctgtgttggtgaggaatgtggagggcctgaggggactgtcggaagacccgggtgggccaacggggtggccagttcaaagcaggtgactattctttttaactttaaaatttgtttcatatatatgaaatttgaagtgaaagttgctcagttgtgtctgactcttggtgaccccatgggctgtggcccatcaagctcctctgtccctggaattctccaggcaagaatactggagtgggttgccatttccttctctgcactaagacctcttccttcccccaactctgaccatttgaatgtctacatctatacctcaacgtttttctcttttgatctgtattctcttggatctttccatcattctaatctcaccaaaaacattgcctctttaaagagctgtctttgtattcaagctgaagtacttaccttaataaaataaatttcttaaaatggagactaaagccatactgaagtgaattgaaaagagaatggaaaagctagaattaaaattttacatgtgaagaaaaattgagcaaagcggagatcaatgtgttggtggtggtgacaaggttattggcatgattcctatgaacattctgcatccctccttcaggagaaagccttgaccattttatccacctccatatggtgtaagcaaattcagccttagatgtatattttcatctgaattattttctttggttgaatttattggtctttgtttcccaacatctgtttcttctcttctattctttaataatagatgaaggataatgggaagtatccaggaactgacactgattagaaatatacctgacagtgagactccaaattcagtttcaatataatctaaatgtctctatttggaagaagttacttacctgtaaaataatattttacaaactctcgtagtgt

SEQ ID NO: 27517 - DNA, 1274 bp, Bovine  19866881232027
  misc_feature (1)..(1): n is a, c, g, or t
nattattatgctgaaatgatctcttggctatgatagatgtattaaataagatttgcatgtgaaagacctcaaagtttttgttaatactttccaaaaggcttttaaggagtttttaaatttatctctctttagctgtatagctatatttcacctaaatctaaatttatcccttagttgtataacgaagaaactatgtcatgcatgaagcataacattttatttgaagataaatttctagtttacaatgagtcaaatatcagattacataaaaatatctgtatttttagggtgtattcagatacacaggtatttgcctattgcaaagtatccattggaatatgctatcagaaactagttcacgtgccattgagaatacattactaggattcttatactctggttaggcagccaagagatttgaccatcttttccaagatgacttttggctaagatggaagataattatgcactatttggtaactgttcaagttaaacagtattcctgccttgtatctaagagagtgtttattaagtgaacccaatgtccatcagatgattatcccattttgaagaaaacagattacatggaaaaaatttggaatcctactctgatagtacaaaagtacaaagtaaagttgctcagttgtgtccaactctttgcgatcccatagactgtagcataccaggctcctccatccatggaattttccaggcaagcatattggattgggttgccatttccttctccaggggatcttcccaaccgagggattgaacctgggtctcccacattgcaggcggatgctttactgtctgagctaccagggatagtagatggcttttatttacccagggtggaaaagtacataaatagtgagctaaattagcttatgccacacattttattactactttgatgttactaaaataacctcatgttgaattatactctatgcataagtaggtttattcgggtgtgttaaaaaataataataactagaatatgcaattaagatgcgcaggtccttatatgacttttagcatgttattcttcaaaagttttttttaataatgttttatcctccatgaattatttataagtgaagcatttcaattataagaatgaaaaatgtagatacgaattattttaaggaaagaagatgtaatctaaacaaaacgaaaagacaacccatagaatgggagaaaatatatgcaaataaagtgaccaaaaagggattaatctccaaaacatacaaacatctcacacagctcaa

SEQ ID NO: 27518 - DNA, 900 bp, Bovine  19866881316622
  misc_feature (1)..(1): n is a, c, g, or t
ncttgatgaatagggtaaaagaaataagacttaaattatgatggtaaaatatttaggaaaaaaatcaagtgtctgttactcgcttagacaacctaactttacaagatatagttgtccaaagtttcatctaactttacttctgaagatactgcttggaaatgctgttaatgaggcagtagtaataatgaaatacttcccagaaagatgattcattattcagtgcagtacagtcaagcaagttttcaagttgtgtaattgtgatagcagcagaaagtgacaaagatagaagaaattgtacctttttttacagggtacaatttaaatatggtgtttgagaaatgattgggaaagacattttccctgaaattagaaccaactcatctgccttgctttctttttcacagtgtttcatcataatgttttcccttgttgaatttaaatgactgtgacattcttcttcctaccttggcatatttttcaaggagatatagtcttagatatattaataattttaaaatatgttttaaaatattggttttatttggcaaaatgattataatactaatcattcatgggtcaatttcttggaagatctttcttctgcaaactactgttgaccataaaaacaaaattgtgactttgaattatattgtatttgtttaatgtagcatgtacattttcctggctcagagtgggctgcttcacaaaactgtataaaactggcttactttttaaattctccagcacagggtggtacactgcatgcataattcaacttgttgaagcatcctggaaaatttttctttattgttaaaattgtagcaacaagtagaaattaattacttgttataacacaaagagcttttatgctatattccaaatgttgttttatactgaagt

SEQ ID NO: 27519 - DNA, 1450 bp, Bovine  19866881356411
  misc_feature (1)..(1): n is a, c, g, or t
nagagtgaatctttgagctcagatgagtgggtggggagcaggaaagcgaagactggattatggacagatgtacagcctagcaaacattcaaaagggattcagctaaaatctgtttcctcatatagaaacagacctgccagttggtaaattaattctgtgtgctcataatgagcattttcctttggagaagttttctttagaagtatagatggaaaaatatacagtgtaggaagcaaagggtagaaaagacatccatatggaacaacaaacagtgcactaatggaagagccctatggttactgctctcatcttcagttgagagtttccagacagtaaactagtcggatgactcttaaaacagtaccttctttaatcgctgagataaagcatagcatctttggacatgaatgagcagggaaagctgtgatgcctgtgggaaaggcgtacctctgactggatgaatatgctgttgaactctacagagagaagtggaatggatcaaatagtggagacaagggcactgctttcattataaagctttttgaaaggtggatttgtgcaagcatactcaacatggagctgaggctaaattccatctctttaagatgaacataaagtgaataacgttttacttttcaagacaaaaattcattcagagataccactctgcagtatcaataaatgtgtctatggtacctagatgggtcactgactaaactgtccatgaggaaaaccctcattcctgtctgaagggatgaaagacttcacccacccaacaaatgcaacatttaaaatattttctcttgcactctttatatatgattttttttctgttggttgcagtaaagtaagccgaacagagtattatacctgtggcatttaggctttctagatttttttatgtgcaaaaaagcctagattatagctttataaaatgtatggaactcttctccttgagtatatatgcattcattcattagcaaattcaagcagtattcaatggcccagggaggacatttttggcattcctttttagaagcaatggtattttaaactagcggaaggtattacataaaacctgctttatagcctcttacaaaaatgtagtttttacaaatattgtaacaacagatcatgtacttattccagaatctaagaattatcctgtaattttctctgtctctctttccaattcaacagcatatcctgctgacactatttcctgaccatcttccgagtatgtctcctcctttccaccatcctctctcgcctagactattgtaacattgctaatgggttccttgcttcccctgctccaatctagttcccacatggatgcaatatataaatattttatattcatagtcttcagtcttactctatttaaattttgccaaaagcatttcatcacacttagtataaaacccaaaccttattatgcttatcagtc

SEQ ID NO: 27520 - DNA, 2245 bp, Bovine  19866881364378
  misc_feature (1)..(1): n is a, c, g, or t
naatgaagtacttagcaaataggcaatttaaaaggctttggagattttacagaagttgaaataatctgaaaaaaatattttaggaagattaacctaatcctgacaaagaaataaataaaagtgggaattctctggcagtccagttgttaggacttgtcactgttatggccccaacttcaatccttggttggggaactaggatcccataagctgtacaatgtaaccaaaacaatgaatatataaaaaatttaaaaaaataaataaataaacgcacatacccagaaatgcagggatcagttttgaagtaatggtggaaataatctgcagtatagaatgacactggcaatgaacaaataggtttggttatagaaaatatatactttactagaagcaaccaaatcatttaaaacctctttttaatacctgatggctcaggtatttttgttacctttggagtttataaagtggtacaagatttgttcataaaatctattctagttgctaggaagagatatgaattattttacaacctggggacatggtaagtggctgaactttcccccttatttgtaaaattattttacatgaaaagacaaatagtagaacaacagtgtgtaatttaagaaaaatcacaccaacagagaagtcacagctgggaagaatctttgcctccctatgcttatttcaattaatcataagaaacaattacaaaagtgtcacaactgtcctctagactctaaatttaaacatgaaatagctcattcgattataaatttttccataaaataatccaaaccattattttattgtgaacacaacccaaatgttttagtgtattctataaagcaatgggcttgaaattattaaaaagtttacaggggaggaagtatttccagggttacattggaaatgccattatatccagttttcttgaagagaggactactttcaattggattaaattagaagtaagatcctttcttcaaaggattttaaatgcccctctctttgttacaatgtgctggaagcctcagcaagcagtatgagacccgtgatactcagatgagcacaacagaataaccatactccttttctagtgttttgcagcaggcagccacattcgtgcagaacatattggaaggaatctttgctttcacaaagctttctcaggaccctaaaataaaacttgtatttaagatgaaccttcaggcctcacaggacactatgggaacttctgaggcttgtgcagttcacgtgctacatggcaagggggaaaaagagctttcagcatttcaacatgcaataagtaagaacccagtattatccaactctctgcaaattgaactaattcaaagacacacacatttgaattgaaataattcaaagatacacacaaggcacagggtgcagtatccaatgactgatgcatcgtatggcaggaaaatgaccatcaaatcaccaacacagagagcagccatacagcctcaatggtctagaggttgcctgagttttgttgggaaatactgcctgttctaatatgactgaccaacacagtgatgataatcccctcagctgcagacagggctgcttgtggtttggaagctatgggtatgctaaagcctgtcacccataacttccagccacgagcagccttatctttttacccctatgtgccatataaattttgtcattttctatctgagccaagacagggaaacacttgggaagcattgagctaatggacagtacaatatatgaagttttcattacttattatagattcagtcatccttaatgctcttgatggtatgcctgaatttaaaacaccttcagggggcttccctggtgactcagtggtaaagaatctgcctgccaatgcacaaaaccaattggttcaatccctggtctgggaagatcccacactccttggaaccaatagacctgtgcaccaccgctactgaacctgtgttctagaggctgggagccgcaaccaccgatgcctgagcaccctagagcctgtgctgtacaacgaaagaagccactgcaatgagaagcctgaggaccacagctggagcacagcccccatctgctgcagctagagagaagctctcatagcaattaagaccccacacagccaaaaataagtaactaaataatacaatttaaataaacaattaattaattaaataaaacacattcaggtatgttcaagacgagtagtgtgtcctaaactaaacatctatca

SEQ ID NO: 27521 - DNA, 1005 bp, Bovine  19866881370908
  misc_feature (1)..(1): n is a, c, g, or t
naatgagagaggtgttgaagctgaagagaagagagaggtacagcatgatcacccagctgaaagaaggaacacactgggactagagtgtgattcctggaaaccttctaagctagtggacataaatttaaagagaatccaatcaacatgctttgtgtgtgctcctttgcaactttattgaacttcaggggagtatgggataatcttcacaatagtcgtatttggtaggtactgttaccactcccattgtagagcagaagaaacgcaggaacaaagaaggattaaggaaattacccaagatcacagcattagtaagggtcagtctgaattctaatccatacatagcttctaacacttaccactatacctactgctttcatgaattatgtattccatgcatacactaagtgtctggtcagggtaatgagatgatcttagtgccattgtccaagttaaagagtgcagaaatgggagaaagttcaagtatggggatggaggaactaggaaatcattggaatttagtagtggaggaagcctgtgactttttctgaacaaagtgctggctttcacaatattcatattttaatggagaaacaagcaattaactagaatggaatggaactagagaggagaaatgctcaccactcttgaaggaggtgggaagaaaaggtgtcaaaaaatacctcccagatggcaagatgattagtcagattcttgaagaatcaacacaaagtccttaggtaaagaacagcatgtgcaaaggcatggaaaatgccacttgtggggtcctgacaacactccatctgggaaaaacggtggaagtgtagagactacacagaaaggtgggcagggaacagctggagagctatctaaaaatcagagggaggggtgtggcataggaggattcacattttatgaagaaaacactggactcaatttgaaggacatattggaaagagaatgggagggaatatttgagacaatgagaccatgttagtgatattacag

SEQ ID NO: 27522 - DNA, 1161 bp, Bovine  19866881379970
  misc_feature (1)..(1): n is a, c, g, or t
nctactattgtaattcaaactttcacttagaattgaaagcaattatgattaaaggctttcaattttgatttttcattaaaaagtagcaatacaagtctgttaatgctataaaggtaaatttgtttaagagtgtacagttggggatttaaataaaatgtggttatttaaaacccttttaatttatgttccattgctccctgctgttagaacctgtttcagaacttaattatcttgatggctacgacaaaattctgtgacaaattaccctaggaaatataagaacataatttagaacaaaaaggttttaaattaactggcttttgctcaatggagttctgtcagacaatttttgttttgtaactgaatattgattgagagagaaatggaaaagattacaggaatcgtcattcatttttgcaaaataagttgtagtttccacattccatatcaaataacaaatcatatagcaccatctaaaattttggggcattgctcttttccaaacttgctattttataaagaattttagttttgtgttcactgaacaccaagcagagcatgagtctctcttagcttggttgctgaacatgtgatttaaataggttttatatattagaatgccctttttttattctcatggaccaaattaatctgagctcaattgtagaactctaaaaagtactgcggtggaggtgtcagcaacactagcatcaagatcagcaaaggcactgttaaatgtgacattttgcaattaattctagcaaaggtgttcagtcacatcatcccttcagtataatttgtatttgacccttgataatacatactttcttacatttcaagttcattgtttttaagaaatgattttcttcagaacctcctagacttctggtcttaacttggagtgctttttgcttttgcagttgtcttttctttgtactgattcatttaagtagagttaagcaaaaatatcagatttaataccagatttattgtctactgtatcactagtcatattacttcatttatattgggaatgttctttactttattaggttataaatttcttaatgccaaaaacagtgttttttcatgtttatatctttagcacctagcatgatatctgtcacataatggattgaaaatatatgtttaatccctgaa

SEQ ID NO: 27523 - DNA, 2836 bp, Bovine  19866881534474
  misc_feature (1)..(1): n is a, c, g, or t
nttttcctctattactttttgggaactaaatgggtaacaaatgaataagcagacaataaaatgtggttactatagtttgttcctgttataatacaaaccatcactaaatcctagagagttgttcatatgtaattatgccacagcctctattttattcttcactgtgaagttatctgatgtgcaaaaatatctaatttgtgacttaataacatttattccaataaagttattgtgcacaaaaggaaatgatgtccttacaacttctaatcagtttccttgaagtgtgaacacagtactattctgtaacatttggtttctgtcatctttctcaatttataaattgaaactgattctacaatatcatcatgggaaaatagatgctatttatttgaaaattattaggtagcacaattctgccagaatgttaaattcacctagaaaaatggccttaataaatttttaaaaacatgaaattctgttggggttaagagaaggacagtatcacataaaattaacttaaaggctagcaagtctggcagagaacctgcagtaaaatctgcttatctaatattgattttcagaagttgagtgagaagactgaagtggatatttgatatgaaataaaaaacctacctacccacaccaccattttggattgtttaagacttagaaaatagttctatatattgcaagaacagggaatttttgtggggaaaaataatttacttaaaacttgagaccaaaactaaactgaccaattgatgctgcttaattataatgagacaaaataaataaaaggaggaaaacactggagtattctaaagatgggagatcatgcattccataggtagctattctcatgtaacatttttagaatggagccatgtctttaaaatctaccattaagtttcagttaaaccaaaaatagtaatattttaaagcaaagcatgacaaatttaatcaagtaagattgttataagactgaaataggactgtagtaggactttttggattgataaaaatacatgatttattattcttgactcaatggacatgagttttagcaaattctgggagatggtgagggtcagggaggcctgacatgctgcagtccatggagatgcagagttggacatgactgagtgagtaacagcaactatttgaagacttcgatagcagtgtattagctgtttcaaaggaagagggaaaccactagttttgttcctccctaaaagatccagcaaaatagttaatttttataatgaagataatataattaataatagttttatttttcaaacttggggagaatcagtggctactgatttttaaggtttatgtcatgatgtgaagggcgttttttagttctacaatagaactgaatccaggacattgggattggattgaaacctctcagagaaaatacaacacagagtagtttttttcataaagttggaccacaatgaaggttgagggccaaataattgacatgttctggattgatatgatgctggagaagactcttgagagtcccttggacttcaaggggagcaaaccagtcaatctcaaaggaaatcaaccctaaatactcattggaaagactgatactgaagctgaaactccaatactttggccacctgatgcaaaagccgactcatttggaaagaccctgatgctaggaaagattgaaagcaaaaggcaaaggatgcaggagaggatgagatggttagatagcatcactgactcagttgtcatgaatctcagcattctctggcagatagtgggagacagaggagcctggtgtgctaaagtacagagggtcacaaagagctggacaaaagttagcaacaacagcttgaataacaaggacataaggacacaactgaataacaacaataatatagatgcttaaataattcctggtctatacagtgactttattttttttttaattagggatagttgttttacaatgttgtgttagtttctgaattacaacagatgaatcagctatatatgtatatacatgtattgcctccctgttggaattctgtgcacccctaccgcatcctacccatctagctcaccacacagtactaagttgagcatcttgcactatatagcaggttcccacctgctattttacacatagtagtgtatatatggagaaggcaatggcaccccactccagtactcttgccttgaaaatcccatggatggagtagcctggtacactgcagtccgtggggtcactaggactcggacacgaccgagcgacttcacttttacttttcactctcatgcattggagaaggaaatggcaacccactccagtgttcatgcctggagaatcccagggacaggggagcctgtgggctgccgtctctggggtcgcacagagtcggacacgattgatgcgtcttagcagcagcagcagcagtgtatatatgtcaacccctatctctcaattcatcctgtaattccgttccccaccccatgtctatgtgtctgcatctctatttctccctgcaaacaggctcaccagtaccatttttctggattccacaaacatgctttcatatggaatatatacttttctctttctgacttacttcactctgtatgatagactttagatccatccacaactctaaaaatgacccaatttttctcctttttatggctgtgtaatagttcattgtacatcttatccatttatctgtcaatggacatttaggttgcttccatatcctggctattataacagtgcttcagtgaacattagggtgcatgtgtctttttgaattaagttttctcagggtatatgcaaagaaaa

SEQ ID NO: 27524 - DNA, 648 bp, Bovine  19866881637723
  misc_feature (1)..(1): n is a, c, g, or t
nattttgtaagtaagcactaatggaagtttaaaagcctggtaaaaaaagaatgagtgcagagtgttataatacctcctgctttttcccttgactgaatataagaactgtgttaatgcaatatttcttgcctgcctgtttatcaaaccatggtagggtcagtctttctgggactaaactggtagcctctgagtataaagaatgtcaggtaaacggatgtaaattgtctgtgtcctgacctgagggcccagaacacagcatcaagggacaagtgttccacaaacccagcccattaaccaaaaaagccctctgcctgtataggaacagaaggttaccaacaacatgcaagttaaaaacctcactgtcacttagtcacaatttctcttccatgtgtaaaacaatgcattctgtgagccaacattattcagcttgcaaattctgtctgctcaattctaagactaaagttccacctaaaaggtctgattaagaaggaaaaatagagtagtctccaggggcatactaatttcaagcttatgtgagtgttcccatagataaatttaccaaggttacaatgtgcttgcttggcaatttatctagattactgagaagagagtgttgtaggaaaaaattctctctcaaagctaaaataa

SEQ ID NO: 27525 - DNA, 681 bp, Bovine  19866881756721
  misc_feature (1)..(1): n is a, c, g, or t
nttttaaaaaatttcctgtgagttcgatttctatattttcatttaagtaaataaattaaatcatcttgcttaattatcattagaattttcatattttattatgttcaaattctgttcaaaacaaaaacttatatgttaacgttatgaatctttgagctggacagttaaaagatctttatgtatctgtgcaatttttatgcaatttgtgattacctttctactgttttaggttaataatgaaaatatttcaaaggaggtatattttaaagaacagagctgagaagtctgatactataatcactgtttttctgaatttacatgaacaaacaggtaaccagttatggccaggatttgaaatagagccttcggatatttaactataatctgctttacctttttttccctccactctatttggctgatacaactccagtgttaatcttcaattaacctatattaatttgtctactgattaacagaaataaatctctattgtggttgtgcttccctctgttcgtattaggaaaggggtgacagtgagaattatttcaagtatcggaaagagtccttgacccagttaatagatgacataaattctctcatttgattccttcctgcttagcactccataatgtaaagattcaaagccttttagggtgacaaatcgctatttgaacatca

SEQ ID NO: 27526 - DNA, 907 bp, Bovine  19866881815233
  misc_feature (1)..(1): n is a, c, g, or t
ntactgtaataagtaaataaaacacctccttgaacagctatagggcttccccggtggctcagctggtaaagaacctgcctgccagtgcaagagtagcaagagacatgagttcgatccctgggtggggcagatccctggagagggaatagcaatgcactccattattcttgcctggaaaattaagcctggtgagctacagttcatagggttgtaaagagtcagacatgactgagagcacacacatacacatgaacagctatatatcccatatacagttgatctcccgtaacttaagtatgctgagttttaatatcttgttacattactttcttcagtgttccttagtgtatttaacatatagttagtgttctctgtgctccataaatattcgttgtatgataggataaataaatattaaaggcctaattttgtcacacaccctgaaatataaattgacaaattacatgtgtatatatatgcatacaaatatacatacagcctttttccatgtcattttaataaaactttgctttagactctatttaaatttagagaaatttttaaaatctctatcactttgctctttcttagtttacttgattctttaattgcttgctttctggagttagcctgatattcttgcaaggctgcaaaaaatggtgcaaacttatccaaaggtcagttcaagctcatgttcctttggcctcttgccacccaagggataaagttcctgtagaggactatgtaatcacttcagagaatattggtgtttgaaggagcgaaaaggactaaaatatatgaaaaattcatggtccttcattggcattcatgctgttagtcgattttcatcagacagtaaatgagaagaacctgaagtcttgtttgtgttaacagagctcttttatat

SEQ ID NO: 27527 - DNA, 664 bp, Bovine  19866881981369
  misc_feature (1)..(1): n is a, c, g, or t
naaatacaacataaacagaatgctggagatatggaaaaattgatcaatacttatcattattttcttttatagaataaataccaaatatacatttatttggcttacttattagagtgttttagacatttgattaaaatgaatgataattctttagctatagcatgtagagggcaaccccacaccatttaaagtcataattttaatataatataacagctttttttccacctttacttctataaatggagaacagtgctgcctgaaagctgtctgggaattcagccaaagaaagaagaggttgcaaaaactctagggacttgaaagaaaagtagctggcattagcttggtcctcactttaaactaaaattaaaataaaagacagacatgtacagtaatctctcttttaaagaaagaatagaatgcctctatagtaatgtcaagtggaacagtttgatcctggcccaagttatgcagctgttccacaggaaaatagcaaaggcttcagtccaaagcaggcaaataaggcatgattgttcataaacagtcactggggccctcacatttagaacaaagaaaacagcattagcatacaggaggccagtttaggaacatgagtctcagtatgagtcgcaccatcgttttgtacttatacaaaaagcaatgt

SEQ ID NO: 27528 - DNA, 1402 bp, Bovine  19866880084106
  misc_feature (1)..(1): n is a, c, g, or t
natggtgactgcagccatgaaattaaagacgcttactccttggaaggaaagttatgaccgacctagatagcatattcaaaagcagagacattactttgccaacaaaagtccgactagtcaaggctatggtttttccagtggtcatgtatggatgtgagagttggactgtgaagaaagctgagcgccaaagaattgatgcttttgaactgtggtgttggagaagactcttgagagtcccttggactgaaaggagatccaaccagtccattctgaaggagatcagccccgggatttctttggagggaatgatgctaaagctgaaactccagtactttggccacctcatgcgaagagttgactcactggaaaagactctgatgttgggagggattgggggcaggaagagcaggggacgacagaggatgagatggctggatggcatcaccgactccatggacgtgagtctgagtgaactctgggagttggcgatggacagggaggcttggcatgctgcgattcatggggttgcaaagagtcggacacaactgagtgactgaactgaactgatatgttagttactactactcatgatgtacagaatgattcactggaggacacagtaaatttcataggtaaacaacccttgatcaatcccttgggagaagctacttatcttgtgaccaaacatcagtcactttcccagaagtcatggaaagatgccagtgccacctcatggaaatgctcagaacccagagaagattaaaaaatactagtgccattcaaacttgaacagtagtttgtacacatttagcattaattctattaaatatttttaaacacaaatcagaagtgcaaatccaaatacacataggatgctaatacacagctccctgtcaaacactttgcaatatacacagtcattttccctctataattcacacggattaatgttactgttctcacctcgtcttccagcagatgatcagtataattcccctttttaggacactgaacactttcccctacaaaaaatttaaattctaacttgttgagcttttttctttttttaatccctgaagaaaatggactgggaagaggaaaaatgatgaagtaataacacccaggtgcttcctacctaattaaaagaagtttacagctgcaccatagtgaatcatccctgtggattatccacacgtatccttcaagtggcacgtagctccatcaagagccatattccatatgctttcctgaaaactgccgtctcttagctttggtaaaatgatgactatcaggtaactaatggtattttctgcttcctggctttcctccctatggacatctcagttcatttgtatttccttaattctaaaaataattaagaaaccataagcaagaggctcag

SEQ ID NO: 27529 - DNA, 1864 bp, Bovine  19866880143581
  misc_feature (1)..(1): n is a, c, g, or t
nagaaatatcaataacctcagatatgcaatgacaccacccttatggcagaaagtgaagaggaactaaaaagcctcttgatgaaagtgaaagtggagagtgaaaaagttggcttaaagctcaacattcagaaaacgaggatccatggcatctggtcccatcacttcatgggaaatagatggggaaacagtggaaacagtgtcagactttatttttgggggctccaaaatcactgcagatggtgattgcagccatgaaattaaaagacacttactccttggaagaaaagttatgaccaacctagataacatattcaaaagcagagacactactttgccaacaaaggtccgtctagtcaaggctatgatttttcctgtggtcatgtatggatgtgagagttggactgtgaagaaagctgagtgctgaagaattgatgcttttgaactgtgctgctggagaagactcttgagagtcccttggactgcaaggacatccaaccagtccattctaaaggagaccagtcctgggtgttcattggaaggactgatgctgaggctgaaactccagtactttggccacctcatgagaagaactgactcattggaaaagaccctgatgctgggagggtttgggggcagttaggagaagtggacaacagaggatgagatggctggatggcatcaccgacccgatgcacatgagtttgggtgaactctgggagttggtgatggacagggaggcctggcatgctgcaattcatggggtctcaaagagtcagacatgactgagcgactgaactgaactgaactgaggagttaagattttatggttaaagcttcctgttatttagaggatgaagtgttgattttcctgtacaacatacattctcttccccctcaggatgagctagctgctgtaacaaacagcccctcagtcctattaaatgcttacctgcatgtccactgtgctttgactggggcttgttctcaaacagtctctcagagacccaagttgagggaggtttcatcttaacatatgcttccttgatcactgcaatagtcaggtgggaacaagcagaatcacaaataggcccccacaggttcttccagaagcaacactaggttacatttctaggccaaagcaagtcatttgtccacatctaaattcaaagaggacgggaggtacaaactcatctaattccctgaagtcagaaagctaaaaatacttgatgaatagcactccatgccttcttttttcaacaaactttttattatgaaaatgtctacaggaagaagttggcttggatcagctgccctttttggatcaactgatattgcagggaaatctggaaatactttctttcatatgaccagggaaggtagtggacatcatggttgaccactcacagaataggtggtcatggttgtggatcccaattccagaattgaggacactaggcaaaggaaagcacctgggtcctctccatccacctacatactaaaaaaaaaaaaaaaaaaaaggtagatgaatgaatcctgggctggatgaatcacaagtcggaatcaagattgcccagagaaatgtcaacaacctcagatatgccgatgataccactctaatggcatgaagaggagctaaagtgcctcttgatgagggtgaaagaggaggggaaaaagctggcttgaaactcaacatgaaaaaacaaagatcacggcatccagtccaatcacttcatggcaaatagatgaggaaaaaatggaagcagtgacagattttatttttttgcgcgggcgggggcggggggctccaaaatcactgtggatggtgactgcagctgtgaaattaaaagacgcttgctccttgaaa

SEQ ID NO: 27530 - DNA, 899 bp, Bovine  19866880351256
  misc_feature (1)..(1): n is a, c, g, or t
ntataataagttgcactccgagagaaggattacagactcagatgttgactacagacaaaagtgatttttaaggagtttaagggtgacgtttatatttagaacaagctgggccttctggggttgagtcgagaaactgctactggtcattaattaaacaaacccctgctgtgtctctccgtggagcgtatgcatgcgtgtgttcccgtgaaaagcaccagtgggtggttgccatttgcagcttctatctctgagacttcaggtttttagcttgtgatttgtcactgctgatttctctgcccttgtagtcttaacccatatggcacctctcttccaatcattaggacatggaaccttagttttagattctctggagtaaggatcagcaaattttttcctataaaggccagaaaatatatattctaggctttgcagaccatatagtgtctgtcaaaagtatacagctctatcaagtagcccaaaagcaaccacagataacatgtgaacaagtgagtatgagtgtgtcccaataaaactagacaaaaactggccacaggtgggatttggtccatgggttacagagcgctgctctgtaggattaatctcttgcagatgacatcccggtcaaccctcaagtgactttcatgtacacagtggggcccatattaagacaatcatacagagtatagcctcctaatctgttgaaaagcaaataataacacaaatgaacagacttataatatctttctctttcaagtgtcagggatttaagcattttaattccaatagaagaaaaatcaggtggtctatatgctgtatctattactacagtgaggctattaaacaaatcatccccaaattcagtaactgaatacaacaccgatctgtcatttctccaacat

SEQ ID NO: 27531 - DNA, 1005 bp, Bovine  19866880422818
  misc_feature (1)..(1): n is a, c, g, or t
nttgaaaggagagtgctaatgaagcttgtgcttagggagcagtgcaaattagatcctttctgaatcagatggtcttctcggatgataatgcattatgagaggtgccggaatttgttttcttcagatttaacaccatttaagactataagccacaggcccttaagaaatgaagcacacttctacattggacttaccttctgcaaaactctgaggcctagtgggcctcctaaataattcataaaagtttatagttcagggcattacatttaaaataacctatacacatataattctagaatgcagctcctaagatacttgtggcaggtactcattgatgattctcttggtggtaaaaccatgaccactaaaactctttgtatcagatagcttttggtataaacatactgtgtaacaaactgctcacatatcccatagcctgtaataataacatgtctttctctcagtcacaggttggtgaaatggctttaaggcaggctgtgggttaatagatcttggcttcagagtatggggttgggtttggatctgttctgtttatttcctctttcttttgactagcagctactctggcattttcttctgatggtgcatcaatcgagtgtgaaaaggcaaaccagactgcaaagtacatggaaacctctgtgtcttgtcatcctgcccaaagcagatcatgtggttagatccaacattaatggtacagggaaatatactgtatccatatcaggagaaaagaaaactataaatttacaggggaaaagggcatgggatgtataatttttatgcagagatagcatgaagaatcatgaggcatggtgttagtctaccatactgtgttaggttttataggtccaaccatccattcatccatccatctgccctccctccttctctttctttctttctttttctttttgtggtaaaatatacataaatctggggcttccctgggtagctcaactttgtaagaaatctgcctgcaatggcagg

SEQ ID NO: 27532 - DNA, 1222 bp, Bovine  19866880444190
  misc_feature (1)..(1): n is a, c, g, or t
natgggagggaggttcaaaaggaaggggacatatgtatacctatggctgattcatgttgatgtttgacagaaaacaacaaaattctgtaaagcaatgatccttcaattaaaaaaattaataaaatttaaaaaagaaaaaaaaaatttctgggcacaggaaaaagataaaaagaccatctcttccataagcactgtgtggtcagagtttgaattttggtgatccttccaaattcttgctgagaacagaaacctccttacaactccttgtaaatcctccccccgccctcctttcccaagtccactgagggggagcatcatctggtctttacctgtaaagctactgttcatttcaggaacatcatcctcttcctcattctccgcgtggactatgccagcattttgcatatcattgtaggacttggttcgctttggggtcgactgcttggagccagagtgaaggttttgcaaggcatccgtcgtgatcactttcccactgactggctggctaggagggtttgggtgtcccataatagtttcctaggtgatggagagacacatttgcatgttttagaaagaatactttgtttttctcaagtctgcaaatccaaatctcttagccccttcaaaaaaaaaaaattttttttttttttttttttttagattagaaaaccagaacaaactgtatttcatttctggaatgggtaagaaaacatgttggtcctacccagttagacatggagatttcagaagccaggaggaaagctgcattgtggtggggaaagaacctactagggatgaaaacaaaagcggctgtgcagaatggaaaagcttcatcctcattacatttgaatttcaattggtcaccgtttcacatatatgcactagcataatgcagaatccaatttggagtgagtggcacacaaaataacaaattcattaccgccagcacccttacaagctgacacagtggaggtcaccctcccttaataaggaaactcctcaagagggaacccaagcagtactttttttaaaaaaaagagcgtgaacaccacgtggcacctctttaactgaatggcaggtctgactggcacagccatgtgtggctggaacaaacccttgcctagctttcacaggaaactctgggtcagcagtggcagagtggcacccttcacgggtcacttgtttggtcagtgcccattttcatttttagccacttccctct

SEQ ID NO: 27533 - DNA, 2791 bp, Bovine  19866880453017
  misc_feature (1)..(1): n is a, c, g, or t
naatcatccctgcgcagtgaaagattctccttgtccactgaagcttcctgatgctcaggctcaacaggacctcacctaacattcaaattccactctttatcttatttaaaaacaaaaactcctatctcatgtgaacaaagtttgttagggcaataatcctgtgaaactgttcattgccggcggatgtcattaatcaatttgtttacacttggtctagggtaatttggcagttataaaatctgttgattggtttctaacagataccaagggcttatcccataaattctgcagctgtggaactaaggacattagggctgtcccttcatattttggagtatataccaccacagtggcaccccacccctccacttcagaatagatatattacagatacagcatacgttccataaagcaaagcatcgtcttttcttgactcagcagttcttagctgcaaagaccatgattcatctggtcaggtgaatgccagcttccaaatgagaagaaaaaaaaaagaaacagcattagggagattcacctgtaggctctctctcaccatttctcctctaagcctactcttataaagccactgggttccagaatcaacatcaatggatctgacttttctagcttttgaccctcaaagaagacaaaagtgaaaccagagtcttgtaaagagaatgatggggacgatgaatttcgagactttatgaagtcatggaccaataagtgggctggcttctctcagaccactcctcttgactcaatgcctcttccaccctccagtccaaccacagtggtctcctcacaacccctcaaatatgtaagcttttccataatgacgtggagctcttcctcccagattttctcatgcttggcactttctcagctcaaggatcacttcttcagagtagctttcctcatcactgcactgaaagaagcccatccagcttattccagcaatattctttcaacacttcacccccattttattgtttccttaatcctttggactctgaaataactgcttattcacttaccagttcacttttcttttttgtttggttgcactgtgcagcttatgggatcttagttccctgactaagggtcaaaccagtgctctttgcaatggaagtgcagagtcctaaccactggactaccagggaattcccttgttgctgttgtttaatcactaagtcctctctgactcttttgcaaccccgtggactgtagccctccaggctcctctggccatagaatttcccaggcaaaaatactggagtagattgccatttccttcaccaggggatcttcccaacccagggatggatcctgagtttcgtgctttgcaggcagattttttaccactgagccaccagagaaggccagggaatgccctacaagttggcttattttatgtctttctcatcttccacataaggtgtatgagagcaagaccttcacttgccctgttcaccactccatccccagcttctggaagagatcatggtacttactaggtgcaaagagcacttgacaaggggtcagatgatttgggtggcatttccaacaatgaacaactttgactcatttccccatcttcctggatctccgtccctcacctgtaaaaagaaataataatacttacctcacagagtacctgtgaagatcattgaaacaatgatcctgaaaatatatttttaacctgttatcattacatatgggagaaatcccagggttttgtaaaagacctggttagtgaatggatgaatgaaatattatgaaaagtggagagtcttaaccacttgagatgattaaaatttaagatgcttatcccactcagaaaaaaaaaaaaagtatggaagttactaccttaagaagttacatcagttgactgtacagattctagaaagttaaagctgaaataaacgacaagttataatcaagtgagttttacagtcagatttctagagtcctggggtcttcttggaagcccccttggagtctcacagtggtaaaggggaaattgtaatagatgggagactgaagtgacaggaattcatgcccttcctccccagtccagacggatcaactccatttttatgctttttgccctgtttcagaagctagctatttactgctcagtcctcttcccccacttccttcctacaccctgattttctgtgcagtggcagtgggcccaacttcaagctgtggggtctgatcagagtcattcacgacaatcctgtccctcaatccctgtctggctgggagctatggattgacacgtgacccaactatggcttctcatggaaacatgagaagcccgtgatgctgaagctttggggaaactttgatttccttagtagtagggacatgagtggctggttctgaccttgcctttattcccccgcctcccttcatggccagcattgtgtctgcttctccacttgcagtcttgtcaccatgtgtccataagcatgatgggaaagcctggaatcgcacacatggaatttgatcaatgagttactgaatcaatgccagcaaacatctggctccagaattcttgccatgtgaggaaaggaaccccttactgtctaagctacttcatttgggctttcgttcagttcagttcagttcagttgcccagtcgtgtccgactctttgtgaccccatgaatcgcagcatgccaggcctccctgtccatcaccaactcccggagttcactcagactcacgtccatcgagtcagtgatgccatctagccatctcaccctctgtcgtccccctttcct

SEQ ID NO: 27534 - DNA, 1350 bp, Bovine  19866880458795
  misc_feature (1)..(1): n is a, c, g, or t
ncaggcacttccctcctgtcccccccgcccccgctcagctaccgcgtctccagggctcccagcaactgcctggaagggcttccctcaccctcagaaaccgcccgcccgcgaggaaaggcgaaccagacgggaggcaaagaggagacaccgcatttctaagaggcaagaaagaaagaaagaaaggaaggaaaaaaaataatccaagcggcgcagagtggactctgatcccagagagcacggtcgggcgccggaacgtggaccgagaagcaccggaatgcaaacaaagctcgcgggcgcctgtgcagggctcgcggggaagcccagaaagtttgttttatgatggcttgagtgagcgagtgtgtgcaagggagcgaggctgccaagtttctctctcccgctgcgttgtttgggggggaagatgtctctcccatgaaccagcaggggcttgggggcttgtgctgtggggggcacctgtctctcattttatcattatttttttttggcggaggtaggaggggtgtaactcatcatgtcgaaagtgatccagaagaagaaccactggactagcagggttcacgaatgcaccgtaaagcggggaccccagggagagctgggggtgacggtgctggggggcgcggagaacggagagtttccgtatgttggagcagtgacggctaccgaagcggcggggcttcccggtggcggcgagggccctcggctgggcgagggcgagttgcttctggaggtgcaggggatccgggtgtccggcttgccccgctatgacgtactgggagtcatcgacagctgcaaggaggccgtcaccttcaaagccgtcagacaaggtaagtcgggacgcgcctcctggaggcgcccccagaaaagggaacccggctgagaagcctcctcccgcccccctttcgatttcccgcttttctcctgcgaacgcgctataggggcgatgttgaggccgtgtgcccagtgatggtgaaatacaccaagttgttgagaggctgtggattgtttgcccacctgcgttgggaagaggggcttgggttagctcggggaagcgcagagatttttccctggcccggtttgctaacctgttatctccgacaccaagtgcagcagtggcttgcctgcaccgggaggagagttggggaactgaggcaggggcaaagtggacgctctcctggttccctgggcgagtgttgcagcgggcgtaactacggcgttctttgatctcttagctgttttcagacctggagaatgggtatgaaggaggtgagggtctttgattgttggacctccttaatcagaaaatcagcatcaccccgtgaccggccaggtggg

SEQ ID NO: 27535 - DNA, 1380 bp, Bovine  19866880560100
  misc_feature (1)..(1): n is a, c, g, or t
ntggaggctctgttctgtcatctctttgggcggggtggggtagtcatggatggtcatcagatgaagggcctgggggaaaaatggctttatttttcctttctgttagaagaagtggcagataagaactactgcctcattaatgcttccctgcgtggagacggtggcctccttcgagctcctgtctagtgaaagggctctcatatacaatagaacataaatacgattggtgtggattacaagagtaataagaagaaattcagtgcttttttagtggtctcttggtttttaagaatacttataatgttttaaactgttattaatctttctaaacattcctttcaaaaaggaaaaaaacaagcagtgggtatttgtgctttaattgttcatgctgtagttttgtgtattccttcagcttcacctttttgataaatatgaactactgttgtcttattggctctgataaactgaatagtccctggacttttttttttttgctttttattatgagatgatttccaaagactgttcaccacaaataatattcatttatcttactaaatccatgttcctaaaaatgctttaatcttagggcgtgcaaatagacaccccttctccttttttttttagctgttgattttactgacgttttttcgtacgtgtggtcaggacaaagtaactataaagtacatgcactttagattgtcatgggataggagagcatgtttaatgagggtctgctaaagggtctgattaaaattggaatagagaaaggaatcactctgtccatcctcatggcccccactcccctcagcataagtgtcctttggagtcacagctggggttctctccgtacagccctctggagaggcgagacgcagaggtgatgggggctgtgggaagtgctacagcctgctgcccacccacttggacttggccaggaggcagtccctggctggctgaagcagctcctctgtgacccaaaccggacaggagagggaacccagcaacctgtctgaaagcaggccacactgctgggtgaaagtcagcacttaggggacacaaggcctgtctgcagtcttggtgatggtcaagtgttagaagttacccagaggtttgtctgtctccttttcctctccaagggagagacatcattaccttctcacttacagtagtatgtggaattaagtacagtcttttggctaaggtttcactatgctggcaaaagcccgataatttgagaaggatttatttagtctctggactagaaagacccctggagtatgcctgacttcaggccagaagaaatgaagttccatttggagcatcccttgtaagcagtattgctaaacatgaacctggcgtctgttttcactgggactt

SEQ ID NO: 27536 - DNA, 1414 bp, Bovine  19866880565934
  misc_feature (1)..(1): n is a, c, g, or t
natagctcttaaaatctagagcttccaagtcttcttaaaccatgataaaggagctgtacaccaattcgagatcagtaagcatgtctctcaagggacaggtgtaagccggttaatatgacagctttgtcattttttctttcccaactctcttgcgaacaggtaaagtttcaagtgaaagctttagattttcttttgtagtaaacactagtggataccagctgctcttcctgaacatttacaaataactgacttcatcaatgtcattttttaaagatatgcacaactgccatgtaatctagaaaaaatacaaaacagtcaatgtgacttttaagggacttccatgcttgtttttaactgaacatttaagtttatcaaagggatttattaacacatctgtaattcagattgattcatctggacactgctgttttgacagatgggcatataaagaatgcggtattcatggcattcataccatgtgaaggaactggatcagagacttggttaagaatcttcacaccgcccttcacaataaaatgaaatataaggaaaatatatttccccctcaaaagggggataaattaagggtacaatgaaggtgctcccgttgactttaattttcctgtttttcctggagtactttgccttgcagggaggggcagggaatcacacttaatgcggctacatgttgcaatttttctttttttcaaaaaagcagattaagaaacagcctgtgggaatggcagaaactgatctggaataaagcaaaatactgattaaaagacaagactaatgtaggttcattcaataagatattgtgaagaaaaaaaaaatctgtgatagatactgaataacatggagagagaaatcttatcattatcctcatttagttgtgaggaagaaatccgtgtgaattttaacatcaattaggttctacgatcactcaattatggagcctctaatcacacacacacaaaaaaattgcttctcatttgtgctgctagatcctgttccttagatgtcctagaaagtcaaggcctaaagaggcaccattccaaatgtttcggtctgcttctcattctaggtttagagcagctggctatggcagaattagttttttttttttttcctggtgaaaacttttaaaaaagtaaataccaaagtcttgatataatagaaataccgcttgatataacagaaataccatttccatcaaggtaaaaatggcatctgagctagagccttgtgttcctcgggtgtgttagaattgtctgtcaatccatgtagccctcaccagcacttcagaacacaatttgttttactgcaaaaagattcatacatgggaaactcagtcataaatatgtactaacgagaagagcagggacaggtcaataaagcagtatcttcacatcag

SEQ ID NO: 27537 - DNA, 1312 bp, Bovine  19866880570638
  misc_feature (1)..(1): n is a, c, g, or t
nttatgttttctgcatgacaggcaggttctttaccactgatgctacctgggaagcccttgaaagtatatctttaactattaatgcttatttgggggccagtttctcacctagaaaaatgaggtgaaagatagtcatactatctttgcatttttctgatgcaagtcagatcctgtgttataacaagttcagaagtaaatctgttcttatgccccaagtcttctgggaggtaatgcagactgttgaaaggcatacaagatgactttaatttgagagctatataaacattggttttctcctggacagttctggaccttaaccaaataaaagacaatgtcacagctaattaacatgttctcagaaaataaaaaggtgtattttgaacttctctacacccaccgaacatagcttcagaaagtttaggtgccaagatattaaatacagaatgcatcttccaattaagtcatttttataattgaacttgagaagaaacataaagcaaggttaaatcttatcagggaaaagtccaaaaagcttccagatgctcatatgtttagcccctgagggtaggttagaattattccaattagtgataggttagtggtggcatagtttttaaagcatattctcaggatgctgctttgctttgattttccacatttaggaacaaagtttagatgggattcaaaggggatgcagaggtgcagtttgatggagaggcaggtttgcaaactcagtctggatcatatctgtcattttgtgataaattggacctaaatgtgtcctttatgggaaagttgagaaaaggtgataaaaatttttaaatggcctaagccatttccagtaaacttcatttacactctttggttatggtgaggctgtctctttagttaaacacaagatttccaggtcctccatgtcagatctgttacactgggatagccatcagagggtcttggaaacccctgaggtgacagacagaatctctgtgcatgcctttgtgggcatgtgtgtgagagcacatgtgttctctgttggagaaatgtccaaactctttcagtgggacagggctgccggaagacgggtgtgaggtttccctcaggtaatcctgtagtggccctcacagggtcccagaggcttcgtgaagaggagcctctgtacaaaggatgtgagagcttccagagtctgagtccgactttaaccgtaaactgaacttagtgataatggtcggaacccacatctgtcatttgctactcgtttgaaaagcgggaaagggagggcatttaagagaaggatgcaactctcaggtaaccc

SEQ ID NO: 27538 - DNA, 1416 bp, Bovine  19866880571635
  misc_feature (1)..(1): n is a, c, g, or t
ncacttttaaaatgagagacctaaaacaatgcattctgctttcatttatttgtctattattagaacacttgcagggagcaatcaatacagtgaaattgtaaacgaagcagtctgcatgactctcgtacattcattttcatgggaaaaattaagtgctacgaatataatacaattccagtagggatttgaagcagtgtttggaaatgaaacgacatccattggtctttaaatgtaactttgcatctccttcaggaataatttgcttttaaatgatcaataaagatttggcgagcttttcgagtaacttaactgtatgtacaggttcaaacattgtttaatatatagagagagactctcatgtgaatcacagtggtcagtaggataattttagggtctgttctcttgctctctatctctttctcacttactcactctgtctcttgtccagagctgttaatccagatatgatactggatttaggctccctgggaactcctggtaaatgcataaatatattgagagattgcgtctttttattaaattttagcaactctgcttccttcagaaatcttcaaaggttatgtatctgagtggagaacagtcactgaggagatttcagtgctgcttgctgaaatagagatttgactaatgatagtaaaggttatatagataagatagtgtatttaaccctcaaatgaaaatgagttggcacgtttccagctcatcctcatttgctaaatcttttctcatatgccttggtctgtcagctctggagaaaatggactgagagtttgtactcatttttgaaaaggataaatggaagtgaggaagggccattatactgataggaagggtagattggaatttaaatcagaccgaagatgaggaatggtaacagtaggagttaaggctagaaattttgtttcagcagccctgcattgcccttccacgggggacagcaactgacagcaggggtgcctcggcctcctgcaaacatgaaggctgtcccgttgcctccacttcctccttgggggatgaccttctgactacctgtcctctgagcttttggactaagcaggcagggaagaaatagcccaaactgggagtgatttatttttgttttaatatgccatataaagctactttgtttcaaaattaagttgaaaaacccaagaaagggactagctgaagatttaagcagtcttcaaattaccacatctgctacatctgtccctattaaccagatggttttttgataggctgaatctcattgcaggagagatggatgagttttccttgtctggtttgtctcttggtttgtagttgccattgacagatgatgttacagcagagatatctgccctggtgggcaaatccaatttattgttgtgatttcttttacccagtatatagtgt

SEQ ID NO: 27539 - DNA, 700 bp, Bovine  19866880591374
  misc_feature (1)..(1): n is a, c, g, or t
ntcttttggcccttgaacttgagcattttgacaattatattcttccaccaaccaaataccatgtaccaaatatagaactttggtgatcaatcagtaccgaaacacattacagaattattttatcttctctgtcctctgctgccacttattcccaatggcattacagtttctaaactactcccccaaaatgtttgtttttgttctcttcttcatttcaggaagattttattagaattaagtttttaggaggtagcagggtagaaccaactttctgatattactatcgcctttttatttttcccagtctaaatcaagaagagctaagaaaatctcatccagctctctttattctaagcactggtacaggggacaggaagagtagctcatttcctttgtaattccatcaacaacccgacagagcagtcaaaagacttcctttgatcgttagagacaatgggatcaccaggtttgcagagaaccctcctggtgtctccattactacagacacacaacatatttgcagacttggttacaacatgcctatcacttttttacttcaccttgtctttgatctaggcttggtcaacaagaaagtcccaaacactttctgttcctggcatccctctttcttccctcctttttctgagtttcttcccacccccagaccaatgggaacatcaaacagggatgagtaataata

SEQ ID NO: 27540 - DNA, 1045 bp, Bovine  19866880594388
  misc_feature (1)..(1): n is a, c, g, or t
ngatgtgaaagttggactataaagaaagctgagtgctgaagaattgatgcttttgaactgaggtgttggagaagactcttgagagtcccttggactgaaaggagatccaaccagtccatcctaaaggaaatcagtcctgaatattcactgagagtgctgatgttgaagctgaaactctaatactttggccacctgctgcaaagaactgactcattagaaaagactgtgatgctgggaaagattgaaggcatgaggagaaggggacgacagaggatgagatggttggatggcatcaccgactcaacagacatgagtttgggtaaactccgggagttggtgatggacagggaggcctgacgtgctgcagtccatgaggtcgcaaagagtcggacatgactgaacgactgaactgaactgaactgagggcagtcccgagttatacacaatcctgggagacactctacccatcagatcccactcctgcctctcaattgctccctttccctctggattcagaaaacaccccgtagagttctaagatgctccctgggagcaagtaccatctgttgaggactgatgaacccaaagaccaatagacgggaacaggccacagggacagtcacacgtgtgctgtcactccctatagtttatttaggcacaatgtcccataatccaggaccgtggttaatagagagatggaagtccttgcacagcgcatgacagctgaagggcacattctttttggaggtgttttccctgctgttcactttgttaccctggtaattgggggaagttgctatggccgtatttgctgctgacagatttgttttgcagtgcgttgtgagagggtgttaaatgcaggcctgtgaagaaactgacgcaactggagataatttggggggtggggtggaaataagcaattgtgacttcctggtaagcacagactgaattgtttttccagcttagtttttacctctccccatggccctgtatttccagtgtcagagaccatgggtatcctcctgacacagaaaaggaaagagca

SEQ ID NO: 27541 - DNA, 1451 bp, Bovine  19866880594880
  misc_feature (1)..(1): n is a, c, g, or t
naaatgttttttgtctagatgctggctcttaatgtcagcagctgactggactggctcagggaatttttttttttttttttaatgctggtgcccaggccccaggccttgatccctattctgattccaattagtttctacatcagaatttttatatacttccacaggtgatttacacagagagtacaggtcaaactaccatctggaatgatgcagcgtggaaattaaatgttaataaaaaggagctaagtgaccaaacgaagttttagaatactctagcacagtgttgtccatgttcgaaataatctataatctgccttgtctagtatggtagctactagctacagtggctagagtgactgaagaagtcaatttaacatttaatttcaattatttttcatttaatcgagaatagatgctactataatggataacatagctccagaggtccctcaatgcatctcagcatccttggtttgcaacagctaaaaagagggatatggactgtaagccacaaggcaaggtagataaggccttactgttcatatccatcaggaccaatttcccaaaatggagctttgttaacaattcagatgctctgagtaccttacaggaaaaaaaaaaatcaatgccatagaaagtatgtccagccaaatatgctttgaggacacaagtcttcagaatcattctttatttgctctgtataaagcaagtaccacctgcaagccatggctgttatatacaccatatcatacagataatgcaaagaaatgaagacagttaaggatgtgaagaaactgcatcttcatatctttggcatctactaaagtatatatacatatatatatatacacacacacacacacatattccatggattgattagtaatagtgtagaaaatataaatacatttatctaatatcgtgaatattgtagctaacaacacttgaggaatataaaagcttagacacaagttacagtctaaaaatatatgtgctcagtcgctaagtcgtgttcaactctttgcaaccctgtagactgtagcccatgggctcatctgtccgtgggattttccatacaagaatactggactgtgttgctatttcctcctccaggtaatcttcccaacccagagatggaactcaaatcttctgcattggcaggtggattctttaccactgaaccacctgaaaagtcaaaaaaatatccacagtctaccaaaaagcctcacttctacttcaataagaattctaaaaattctctgataagaaacatgcctgtgtgttaactttccttaatttgggctacaagactaaatgtcagtagtcattctagagatgtgtgtatttccctaaattttgccatcaagtgagagggtttttcaaaagctcagattatttgcactttgcatatcaaatgttaaaatattttatatcgaatttaaaacttaacg

SEQ ID NO: 27542 - DNA, 2088 bp, Bovine  19866880647216
  misc_feature (1)..(1): n is a, c, g, or t
ncatcaattcttcgttttctttatagtccactctcccatccatacatgactactagaaaaaccatagctttgactagatggacctttgttggcaaagtaatgtccacagactttagagttgctttataagcagctctgacaaaaccaaggcagggacagggtgacagaacagccaagagagaagctgggaagaatccatcagtggattaaaaattagctacaagtggtaatttacatatggatcattaggattcaggcacagttaaaaacagctcacatctggttttatttggactccctgttttgtctaataaacaagtgccaaaatgtaaggaattctcatttggggcttaaaaaaaaaaaatcaagttaacacaaaggtatttttttcaagtcatacgcaaagcagggttagttttgggaatgcagacatacagctagaaagactgctgctgctgctaagtcgcttcagtcgtgtccgactctgtgcgaccccatggactgcagcctaccaggctttctctgtccctgggattctccaggcaagaacactggagtgggttgccatttccttctccagctagaaagactaagtcactgaatcaactcaccatgagaccctgggcaagtgacttgattttctagaactagcttccttaataaaatggggaaatatgtttcctatagtaatctcacaggattattttaagaatcaaaggaaagtattttgttcaggaaagatttacgaccaagacaagatattaacaaacatgaccaggagaagcaaagcaggtccacctgagtcgacatctggtcaaatctgtccaatgtgttacaaactgcaggataagagtagttgccagtcaccaaaacagaaagaaatgcagttcccatgtcatcaagcaatccacccacagacatcatgaagaatgacataggctttatttagtctaatcatttaaaatgcaacaaagctatgaagttcaatgcttcattaaaaattattcagacttgacaaacttgaatttcacaaaataaatccaatgaaatggaattgggatcatgctctcaccctccccctccccctgcccaaacaaagccaaagaaaccaacaaaaaccatggttcatgttttttaggtaacttctattaagaggcgatctcaatgtatgttctgtagaaagctgataggtatgtgcagttttggaggacaaggaggtgatgtacagaaagcatgggttccaggggagttctctggtaaactaagcatattccttaaatatggtactgcccacatactctaatagagtacgcactttaagttcctgagtaaatgctggaatgaaaaacatttcccaaacatttgtactgagcatcctacaggtaagtatttaatgcgagacacattgaaaatatggtagaaaatatttaaagatggaaatacatgaaacagacctcttttcaaaacatagcaatgcacataaatagcagcatgggagggggagttctactgctgactcagtatcccaagttcccttcctactattcaaggagtactaaggttccttgaacattattaataacttagaaaacattcatatggggccaaaatgcaagtcatctaaaactggagagtcaattaggaaggatgggaggaaggaaggaatgaaggaagaaagggaaggaaaggaaaacaaaaaaatcagactcttctttctctcctaatgatgatgaacaaacttgctttcacctttttttcagtcaagagatttagacttacaaaaaaattcacctcggggtatattattctaatcaaccaaacatcagtcttcaggggatgcaacatttgactctaccacaggtcagcagacagaagttaggcaggaaattctacctaccaaaggccttctgtgaaacatgttaacggtaaattggtaatgaagtcgacccattgttttacagagagtaatgtaaataaatctgaacccacaaatgaacacatcctaacaagcatacttcctgatttaatggtttctgcaattgcaaatgtggatgctatcagggcccatgtagataaccttaatgagtg

SEQ ID NO: 27543 - DNA, 1137 bp, Bovine  19866880697222
  misc_feature (1)..(1): n is a, c, g, or t
ntttcagacgctccttgaatttgtatgcaaaactgtgtgcttctctgcagctttgcttcagaaaggctcaacagctttgtatcccattttcaatcgaggccatggcccataatttagcagtacagacacttgagtagaaatggcatcattgaatcaagagagagctaaaacaaactccagttattttttaatctagcagtgcactaaagccagtaggtatatcccactgtccaagtgcattcagtgtggctaaatgttcaataaaaattaactctttatgattctagttgtagtgtatataaattattggaaaacaccaaaaataagatgaatcacctattcatcctagcagtctggaaggatattttaatacatctttctgtagtctttgggtgtgtgatgtatgtgtatgatataacattttttaaaaacgaatttatattgtctggcaggttttaatctgcttttcatgtcttgtcccatgttgcttgatagtcttcacttttacaatccattcgtttttaatcaattcataattttccatcttgttgatataacaatatgcttgctcattcctcggttcttggaagttcaatttgtttccatttctgccttctttaaataacactgtgtggaacatcttttctatgtatatctgtgtgagactctttgtgttcccttaatacaaatcctaatgataagtttactgagttaaagtcagttgtaatctttgaatcctgcatttagcgttatgcattgttaagtcttagaataagaaagaaaacttgtagggtctgaaatgaaaatgtgctcaaaagtagtcttattctctttgaattctatctaagactagcctctgaccaagttcttagtcttctttctgtggcttttctgtgagctacctctgtctttctgaatatatataagttccttgctccttacacatggcattaccatgttcagcagtggtaaatgcatcattttgctctgcacacttctaaggaatcccttgtgtttgatgatgtaaattagtgacatagcatatgttagaatactgaggcgggaaaccaaatgtttccattaaaattctcaaatctagagactaggtgaaaaggggaatgactatcacaatgaaaa

SEQ ID NO: 27544 - DNA, 1427 bp, Bovine  19866880714517
  misc_feature (1)..(1): n is a, c, g, or t
ngttatcaagtttaaatagctctttgttgagggtggggtggatgtgttttctccgtgttacagattcagaagtagaggtgtaggtgttctgtaacctgcccagcgttgcgcagagaggtgtagtctctgtgagtgctggggtccttggatgttccgctacatggggccaggtaccgatctccggccctgactcctggcccaccatggcaaatgtattcagtctggtcaatgaatggacataggtctttagctacataaagcagctccatttttgatgacaagtggaccacttttgggggagggggggaatcattcctgagaaaacagatgaattttgcaccattagatgaatctctactgattgacatggaataaaagtgaagtgcaaacatggtgtttctgattggttttaaaagtcttgagtttgaagtcatgcttttcaaggtgtttgaattcttcctgatgtaaatgattgaagtggaacaagaaggacttaataagtaatttagaattactttactgtccttttaaagtcttgatattcttttcagtcaaccaaaaaaggcagtctataaaattaactttaagtaaagctcagtattctacacttcttgtgaacttgccagttggtacttataatctctctgaaatgtaattgactttgaaaacagtattgcaaatatgtatctgtgagatgatgctgagggtcttcatggtagcatccccagcagccgtgtaagtgctggttctgctggctgcatcttggcctccttggatgtagactgctggagtgaccaagggatgcttacttttactctgcaggtttagcctaaaagcaatgattcagaacggctatttgagaaatcaagaaaataccagagaaagagaaaatgtatgattgttagccttcctgaaatttaatggcccttgtcaatgggttaagcctgcattcttgcttttatgcatggtttcaagcctggaaataaggactgaatattcttttttcctttctcactcctaccttctgatagcctttacaatttataggaaaacctaaggctgaacacctgtgagtttgatggctgtttaattttttaacctttagaggactgtggaattacttaatcacccagttacccatattgttaattgagggagcattcccatcacaggattgaagaagacaggtctgtgaaaggtagcctggagatttaccccccttggctgttgcacttatttaaagcactgtagaggtgggttaaatgcagggtcccacgtgctggaaggtggttagttaggcctttggttggtaaactattgtgggtatatgcagtgggttattagagtaattgaactgtgcttccataaagaggagagtttcattatcagattcttgttgaatactgtcataatagcagctgggcaca

SEQ ID NO: 27545 - DNA, 1893 bp, Bovine  19866880756945
  misc_feature (1)..(1): n is a, c, g, or t
ncatttatcagtcactagcagatcatttgccatttgttttctccagaggcacactttgttcattggaaactttagaaattcaggcccccaggttttctcacttctgtagatcacacccagagtgacactttgaaggtacactttcctgtgaaatttcctgggatccctttgaagttccaggctctaagagcagatggtgctgtccatggattttttcttctgcctcttctcaaaatcccccttcctttccctgaagggagcagatgagcccattaaaacaggtgctctttctgcccatatgcctcctatgtagtatgtgacgtgatttctacaagacgggcttcctgcttcccctgggaacacaaaagtttacctttgtcctaaggaaaaccactgacatgctgttggtatgggatggttctgctttctgtggcccatccaaggtaggatggcctgcagtcacctccagctaaagcagagccacctagcaggatttctcagtcttggaaaattctgccgaaaagggatctcttttagtgctttccattaggtcttcacagctattttcagcccatctgaatagctttggttgaaataaattataaattgtcatcaggagcttggttccaacattcatattcattagattttaaggtttaatgatgatgtggacctaaaacaaatctttgatttcttctttttttagcagtcaaatggagtctcttgatttttgactttttaaatactgttttgtgggcacatttggctcctgtcaatggtgtggcttttttaaaaagaagagttttggcaactagccagcacagaagagcaaatccctctttatttgtaaaacaacttgctgggtcacttgagcctgggattttttagaagtgtccatggactgcttcttcagagcaaacagactaactggttaccacaatatgctttagactggttgattttgcacagttaatggaagggccattaattaatgtttagtttattgcctcaacaagatgtgaatatgttgttgtggaaagaattctagattaagtctgaagcctgcttaaaatagtccatccactccctgccccttatttccccactggaaatacttcacttgccaatatttgtgtgtgacagtcaagagcacggaggtgtctgaatctgtataatacccatctcttatgccttcccttcagcttcatgctgttctcattcagcattatagtttggagaccattcatgctgtcactaatagagatagcttgtaccttttaacctctgcttcataggttggctgtccctgagtttatctagaacttccagtcgtttccagattctttttgtactagtcacgctgcagtgaacagcatgtacctgtaaaactttgaatgtgggtgtgaatatttcactatgatagaggatccaaagtaccctttattttatatatgaaaatcgtaagagattgagaatttgagatggtcagagttttagaactgataagcagagtgtaaattgaagtcgttttccctgactcctccgaactagttgtagattctttacaaagttttgtagagggttgttggaatcctgggcgatgacaagtctagcaaaagctcactcctgtgaagtattgtttattccaatgcactaagatcagtctgaattagagaaaaatctatatttaaagatgtaatattagcccattttaatgtgtacacagtgactcaaaactaatatcacttgataaaattccttaagggaatctcattaatgaacaaaccaaagcacctaatgattatttttaagaaaaaatgacacatctaaattgctcaagacagttattctcatccataggcaaaatatttcccctagcatgttaaaatgcaa

SEQ ID NO: 27546 - DNA, 850 bp, Bovine  19866880765324
  misc_feature (1)..(1): n is a, c, g, or t
nccccttcagaagctaagtatcctgtctgttttcaggcttgtacgtgggcagatgtttcagagtctgtttacaaacatttcccagacatattgtcgatcagcaggtttcctcaattaacatgcagcttcttcagtctgttttctgtgttctgattgtatgacaaaatgctatagggttttgtagatgcagggacagagaagtttaccaactcagcagagtccagggaagcctgataaggagtctgagggcgaagtgtacagcatggaattcatttaaaattgcacaggaagcagtttggttgcagtcttgacttgagtaagaacacgggccagttgctgcgtgcctatcctgccgggtcccgggcagtgcacacacacattcactcacatgtggtgtcttatggcatcctctgaagagtttggaagagagactggaacctttatttcacagatgaggacagagtggctcagaggccatagaattgaccgcagtttggacaaattctcagtgccccccaagtcatactctgttgtgtcaggctccaaagccctacctgctcgtataaacaaggaattattgaatgagaagcgtgttctggggtgtgttggatttttgtgaaaggaaaaagatatggatgcattgtctcaaaacacgagcacagagattctgagagtcatctcttaaatatgagagacaatgtaaaattttgacatggtccctgataccctgtaagtcatgagttctattgctgctgtttttgttattgatacagaatagcggaagactgtgtagacagcctctgttcttgtacttaatatggtgggcatggttttgagaaacacgggttgg

SEQ ID NO: 27547 - DNA, 1189 bp, Bovine  19866880812402
  misc_feature (1)..(1): n is a, c, g, or t
naacctccatttgtcagcctggtggttttttttaaatacgttgtccctgagaaacatggtagaatttgtttacttctcttctgccaggaagtaacccttctggctttgttagaagtgtggtttgtaataattgtacccaccccagatggctcctgaaaaacctttgaaatgccatctgccaggcgtgtgtccagcaggcagcctgtcattctgctgaaagaaaagagagggcggggtcccctcccaggccctttctccctagcatctctgaatgggagcctgatcatgtggaccaggcccagggccggttgctcagaggataactccagtaagctcctgctggcctgcagagaggaaaggttttgtctgggtagtaaaccctgaaggttttgtgggtggagatgaatactcccccacccccttcccctgctgtttaaaggccattctaagcgtatttatttccaagggaaaatggtgtctgcatgttttcatttttcctctacaatgtaccattttcccccaagttcttgattattttcaatcctttcaggaaattaagtcccagaggttaatgttgtctcaacagttactctgacagattgtttcagaaaacatgactggaagaaatgtcaacgataagatgattataggaaggggagaaaaaaccaaaatattgtctggtgtggaagactttaaaaaaacaaacaaacagatcttctgtttggtcttcctcatttacccgcatttggggagctgggaatggagggatggatttagttaatagaattttggtatggagacttgagtgtgagagttgccatatagaacatatttaagacagattctttcacagcaagtttcaaagagattctgttcttgccctagacgggaatttcccagtatgatgcatgcagacttcgtgttttccaaatagctggctgaacagcttctgcacttggctctgagacatcacaccctcctcctctgctcctgctttgttgacagctgcctcttcatctcctctgaggatcttttcctcttcttagtttccaaaaattgtaaagtttttgtgtttaagtcagacttcttgactgctttttctatactgtctctcccctagattctctctcttgccttcaaatgccagtggtttagtgataactctcaaatttagggcccagccacccat

SEQ ID NO: 27548 - DNA, 1744 bp, Bovine  19866880824871
  misc_feature (1)..(1): n is a, c, g, or t
nacattcaaaataataaacacatcaactgttggttagcagatgctaacatgcccattaaaatctaccaccactacaaataaaaagcaggatcacctatgtttaccacattagatttaaataatcttagagatcaaagatgtttaattcctttgtaaactcctttaagtcaatgatcaatgcctcttacaggttgcaatgatctcagtatcagggagagccttgatcaacatgttaagctacagaaaaaactgacttatcctttcctctttcaaatgacctctgcttgaaaagaaagaggtgttcaatctctattgagcccagagaagggagaaggaacaggaggggtggacttcggcattccagagccctgagactcctagatgagttgtatctcgttttgacagcagcagtagagtaaatgacaagccctgtcaggtaacgcatttatcttcacgggcaaagcagccgttccaaaacaagaatctcagatgttgtcacatcagctaagacaagaagtcataaagcagaatggctatcattgcaggaagtgcagtgatatctagactgtaattaggaggggctgtgaatgggcactccagctccaagctcaccaggagcctggactttctgggtttagattctcagtcatgtaatcagtggagtcttcatcagccaactcggagctcaagccgctgagctgccctttattctgagagttttatggcaagagtagctcttctgattccccaaaatgttaagtaatgaagaaaaaaaataataaaacaagaaaaacaaagtgggtctctatccatctcttcatcagttctttcaatcaatagatatttatcccatgttccagaaactcagccagccaggtgtgggctgatcactgaggtagatccagtcgctggcctcagaagagtaggattctaaaagaacagatagatatacagcaggcagggtacgtggtcaaatggggtggcggggctgggggagcagtgaggaaggcggtgggcacaatctacggaggcctttctggaggtagcagcatctagactaaagcttacaagaagcttatgaactggttagatggaaagatggagagaaaagagacaataatttatacccagttataagaagataccaggcatatttgagaaatggacaaagtttgtatgactaaagaatttaggggaaggggattgggaatgtaagcaggatttgaggggcaggagacagaaatattaaccagatgattctgaggaatgacagaagtcagcaacactgatgatgtttacatgcatttgaaatctacttattggggatccccctggagctcagtggtaaagaatctgcctgcggattggattcctggttcaggaagatcccacatgctgaggagcaactaagcctgtgcaccacaaccattaagcctgtgctctagagcccgggaaccacaattactgagataaaaccaatgaagcctgctcattgcaactacagaatagcccccattcactgcaactagagacaagctcatgcagcaaggaagacccaagacagctgaaaattttttaaattcttttttaaaagatccatttatcttaaggtggttttccatgagtagacccctgatatatctcaagagattcctacagtgattttttaaaagctgaataatcattaagcagttattaaaattcaatactacacatcagtgaaatacatgaaaatcagagagaa

SEQ ID NO: 27549 - DNA, 1303 bp, Bovine  19866880840667
  misc_feature (1)..(1): n is a, c, g, or t
nattttagccatttttaaatgagtaattgggcagcattacttacattcacaggtatacaaccatcatcactatttatttacaaaactttttcagttatatttcaataacacagggagggaaaaaaacccttagtcatcaactcaaataaaagttctgtaattattaagcaataacttcatactctctgcctccctcctcccatccctggtaacctctagtccactccccgtttctatgaagttgtctaaagaattcatataaatggcatcatataatattgctgcctttgtctctggcttctttcaagtaccacaatgctttcgaggttcctctacaaccgataattttttaaaatttgtattttcatatttgaattttgtactacagtggaactgttatatataggaaatcatcaggctttgcgttttaataatgaatgataaacaatgaagcagaagggaaaaaggaagccgccccaagaaggaagaatatagcaggaacggtatgaggacagatggtctacacattggtgtagggagaggagcttacgatcagaggttatgaatctgactggcacgctgacatcagcctaagagagagcaaatgcaacgcagagtgtcttgcagagctcttacctccgggttcaccccactgacaaaagcacagagcatcttacttacaactgaggctctaattttgcaggcaagcacattttgcatgacttggcagggtacaaatgaacacgagaagacagcacctgtcaggctccttaggaaaccaggcagaacgaaatataattccttacctgaaaaacataaacacataacacatattaaaattcaactggcataattttatgtctttcttagtcatttaagctacatgtttaatcaattatttcttcttctcacggaagactggcaaaggtaagggaatactgaagtcttaattcaaagtgcattgttcccaccaactcaagactgttttgatggaaatgtttccatctagaacgtatatttgataagcgctcctaacacaaatatatgaaaccattgcatcaaacttaactcagagttgacaggcaattatattattaatggggcaggttagtcatttccaggacacaataattacataatgaaataagtcctccactctcactcaaaatcccatctaatccctgaattcacctgttcactaggttgaatatccatccattcactcagtgaatcaaactatggactttgattaaataatatattgacattggttcatcgatgctaacaaaaatacacactaaca

SEQ ID NO: 27550 - DNA, 1511 bp, Bovine  19866880842927
  misc_feature (1)..(1): n is a, c, g, or t
nctagagaatctgaggcaatgaaaacaaatatcctgtgccacttaattattgagttggtttcctttgggattccgtagtgtgtaatttttacaacagagctatgaaccctttggaattttctctcttcctgtgaattcttcctctttgttcgttgttcagaattattctaatttgtaacttgttcagcagccacaagtaattcatattaaattgaaagtacaatgggatataaaaattctaatctttgtatctaattataaaaaatgtcattaaaattaatgacttaagtataattaaagcatagccagcctagtcatggagatctgaggcctgagaaaagcaaattagaacagttatattttccttctgaattgaccgtactctccagaaggcagtcttgtgcacttcttaatcatagaggaaattcaaaggtgattgtaacttagaattccaagtcctgtctaccagcaccacagcctgtgtaactttctaagccagtgtttgactttgtacattcagaatggtgttttcagacctggtgtcagaatattatgagttcatctgccagcaatccttactctaaccccatcctgttaggtcattagtcttcagaaggcgttgactcgtgttttaatgtgtcagtccttggtcattgtgattcagggtcagtgagaacatgagagttcgtgttttttctttaactttgcattttatggtggttaaagtagtaatagctaatattaatggagagccaccatatttgaagaagtctggttatatctcattttaatagccagttttttttaaattgcagtatgtaatatgataattgtgattttatattatacagttatgaaattttccttgtggtttatgacactatctcttctctgccacctgaaaacactgagaaccacatttaagatttatttttcccactttcacatattacctgtgctgatatttgcctaataatagggcgctagtggactgcaaggagatccaaccagtcagtcctacaggaaattaatcctgaatattcattggaagaactgatgctgaagctgaaactccaatactttgactacttgatgcgaagaactgactgttggagaagactgatactgggaaagtttgaaggcaggaggagaaggggacgacagaggatgagatggttggatggcatcaccgacttgatggacatgagtttgaacaagctctgggaattggtgaaggacagggaagcctcgtgtgctgcagtccatggggttgcagagagtcggacacggctgaacgactgaactgaactgaactgagtggttaagaacccacctgcaaatgcaggagacataaaagatgtggttcgatccctcgattgggaagatcccctggaggagggcatggcaactcactccagtattgcctggagaatcccatggacagagaagcctggtgggctatagtccctaggtcgcaaacagtcagacatgaccgaagcaacatctacttc

SEQ ID NO: 27551 - DNA, 1667 bp, Bovine  19866880848869
  misc_feature (1)..(1): n is a, c, g, or t
ngcagagaacgcccccagactgtcaaaggagggagacagtccactgcctgccttcccctcacccaggtgtgacagagccctgtgtaagcagcctctgaaaattcctgagtcagttgggacaggaggagataagggggcaggagaaatatttcagggggacaagtgacaagaatataagaaaagggagggaggaagcaagggacatgtctattcctgggggttagggtggacaaggacaatgcagaacctatattcaacatggacagaagaccagatttcatgtgatggtaaagcaggatgatggagggaaaggtgagagggcagcagagacattcaaatcacagggtaacagagacttcacccttgaaggcagcgtcagttgcatttcgcaccagatgagaaaacaaaatgtgttccttcgatatttgctacccagtaaacagtctgtgtgcacatccatcttgctatctgctccctgactaaccgggatgtggacggacagcactgctaaagctccttgtccttctagtcattcatgatggtcaaaaccctcaactctggagtcacactcattgggttctccctattctctctagctttctgctgtggggcagagggtaacttacttgctaggtctgcatctgtttttctccacatgtaaaaggtactaaaactatctacttgttggataatatataccaagtgcctggcacagttcaccacacaaaaaaacggtgctcactaaatgtcacctatgattattattatgactttatctctatgtaaagagtcctcacaacatgaaaacctccatcctctacttctgtggacacctacaaactgggacagctccccaggcttagcaaaaggcacacagcagcaccctgatgtcacctggtcagaaatagataccctggaagaaaaagcagtttcatctgcttcattcttgtctcacatctactttgaggaagctggaaaggccttgagaggtgaatgaggagtattagattacatttttggtttgcaagaaacaataaaaacttaaggggatggtttctttatcaatcatgtacataaaacatgtgaacatttacatcatttcccctcttgatcatcatcaaaaaagaagaaacaaaaaggaaagaagattctacacaaaacttttaaaagcctttagctacaacccaatgctgaaaaatggaatttgtgtattattagttttccacaagaaaatgattgtgcagtacaaattaaattgctcttttgcaaggaatctgcttagagactgcactgatgggaacaaaaatacaaaagccattctccttatgaaagaaagaagggaacttttattcaataagtattcaaggatgtagctttccaatcttcaatagggggagaaaaatagccctcatttggtttggaaatgtccctaacaataacaaattattttcaatcagagctccaaaaaccaggtttctctatgtctaatgaagcacaaggaaaagattccatgaaaatctactttggtttttatcagagtacacacttgatctcaaaaactggctctctgagcttgtgtggtctccagcataagccaggagagatgcttcactgcatttcttctgagtttctttttggcacacacacacacaaatgaaaaccagtag

SEQ ID NO: 27552 - DNA, 1777 bp, Bovine  19866880897739
  misc_feature (1)..(1): n is a, c, g, or t
ntttgtataaattattgtggatccaggaaggaaaatagtgggtgaacaaatttttactggcttcttggcatagaagtcactttactggtcatctgtctgagctgatcttcccctccatttttcctggaggattgatgatgaggaaaaagttgaaagttctgtggaggaacatcctctttgacctaacaagtctctctccaggtttaacacgaccgggtaggtgagtgctgctttcctggcctgtagagacagcaccgctgtcgcgttggggtttcaatttcaaatggaaatcctccaaaaggaagctggactaaagccttccatcaggttcagagaaggaatacatttatagttttcttttttctatctaaggtcattaagctcttccttcagtggtctgctttctactttccatttgaaaaatgaaaacttcattgttttcatgccattccttggttctttgatagtttctgacagagtcagctaatgatcattctctctgcagttgaaagcagcaagctcattcatttattcatttgttcaggaaaaagtatgacttaaactctctgattgagagtaagagacatacctggctacctgttttatgggcgctgcgtacaaccttgcacaggaccattagggttttcaaaatgacagagaagtcaaatatggatctgagttgggaagtctgtattcattttagaagatgttaattattttctttattttgattgtattattggagttggtcatatattcacacaacttaaaaatatattgcagtcaaaagaagtcttattctatctcctgactccacctacctaattttccaccttcagcctcctatatgtacccactcattaatttcttgtataaccttctggtgtttgtatttctccagatataagcaaatataaacatattcttattcgtcccctgtttacatagaaatgctatatatactactctacatccttcctctctcacttaatagtttccctgagatatttccacagggcgtggagaattgcatcatcctttgctcagccacgtgatactgtatggaagtaccatggattatttatccactcctctttagatggacacttgggtatttgcagccacttgctcacacatgctcacaatcttacaatcaataatgaggtttatctgtcactttacttcacgttggtttaagtagagctgttaaaaaaaaaaaaaaaaaaatcccaggagtgaaattgctgagttaaaaagtaaatgcattcataacttcaatagtgattgccaataagctccccaaagggttgtgggccatttttcactcttgccagcaatgtgtgaaaatgcccaattccactatttattacagaatgtactgggtaaaattttgaattgaatttttgccaacttgataggtgaaaaatgatatccttatgcagttttgacttgcagttttcctattataagtgaggtggtcaaacatcttttcaaatgtgtgagagccatttatatttatttttctgtgacctgtcagtgttccagtcatatttctattgctttgctgatatttttctccttcacagtttctaggtggatcttactcttattcgtgaacatttattttaaggatctaagtcctttttatacatgtactcaattaatcctcataacaagcttgggagttgggtattgccaccccattttaaaatgagaaaacagattcagaacagttaagacactaaccgcaggccacacagccaggaagaggcaaaac

SEQ ID NO: 27553 - DNA, 992 bp, Bovine  19866880955568
  misc_feature (1)..(1): n is a, c, g, or t
ncgacatatagggtgtactctgtgctgagagtatggaaaagatggatcagtccctgtctatcaacagcttagagcttagagtcaaggtacagaaagtcagcaagggttatgggttattaacaaacaaggaaggaatgcatgtatctagagcatgaagctcatttcttacaatttttttcctcatggccatataggaggaaggataaggaaattgtatgtaaactaaggtggggacattttaggggagaagtgagagaatggatatgggtgaagagtaccaaaaacccactacccggcacagttctgctccacggcagtcttgtgtattaacatatgtgtatgggcactgagatccacaattctagcttgaaacctgggagattttcccctgtggtttcagcataaaagattgtaattagctcatgattaagcacattttcactgttttggagccactccataggacaggccttcttttttgttcggcaaccgcagggaccagtgacatcctagccttttagaattgtttgtacttactggtttgttggaaaccactctaaagactgcagtctgtccacccatcccccaactctcttctccagagatgtcaaaaccctcttgtggaatctgtgaaatgtgaactatgacttggttatatgaggttcagtgaaatagctggaggttttcccagcagaaggctaagcggaatcgtctagacatcgccttctccttatctcggcaagcctttctgggagcttttccacatggggaatctaggcagaaaggaaaatgaacttgactgtctaaaaacccctctgacttttagatctctcctgaaacttaccaggctgcagtttgttgttttgaatagaacaggaagatatttgcctttgttgttattacgagagagatttttcatttatccattaagactttatcgagcacccactgtgcacagatattttgccgtaagcaatcaaagaggacagaaa

SEQ ID NO: 27554 - DNA, 1011 bp, Bovine  19866881032476
  misc_feature (1)..(1): n is a, c, g, or t
nttttaacctcttaggtttatgctcaaatgactcttcagcgaggccttacctgatcaccgtatttaaattgccactccacttctaacatacacatgtatcttgctcactgtctttctcaccccatttaacagaggcaccacaagggcagaattttggtctgttgtgtttgtggctttacttgcaatgcttagcctggtggctggtacatagtagatgttcaataaatattaaacgaaaatgaaaagtgatttaatatttatgaatgaaatgaatgaatgaaaggtcattttaaaaagtctctattagtgtcctgtgtctctatgtcaattgacttataaaccccaagagatgaaaaaatatgattaattgacatctacacatgttaacatatacccgttaggacctgattatgaatggccttcaacggccctcatgctgtctcaaaaatgttgaccgtcaactaccaggcactgtttaaatactaggaacgtcgctttatagtagctaggaatggcttttggaaggcagaaacaccggaagcaacggcttaaactgagttggttttatttttctcgtataattagaagtctagacgaaggcagtccggggctcgtgcagtggctccaaggggccaccagggaccctgtctgcttctgccttctccatgcggtcccaagtttgctgcctcaactccgtcagtgtctggattcccggcaggaacaggggaaaggccaaaggaaaatgtgtgttccagaggactcctcagcctatgatcaatctcttcctgtaaagttctacccgcacaatctccacttacttcttcgtacccatctcttggccacctagcagcaatactaagaaacacagcattttttgtttacttcattttctttggtcagctgtgttatttcataaacaaaattggggaaaagagtacaattaaaggcatccttgagtaagcggctagcaatgccagctgccctagacttctaagaaccaactccctcaga

SEQ ID NO: 27555 - DNA, 821 bp, Bovine  19866881035163
  misc_feature (1)..(1): n is a, c, g, or t
nctttcactaaatcttctccagggaatcttcccaacccagggattgaacccacatctcctgcactgcaggcagattctttaccatttgagccaccagggacgcccctactccttgttagaggaaagccaattagaatgagtggaggtcagaatggtgacatattttaaaggaaacagtttcactatttccaagaaatagaaccaggttataaaattattccttcatcttccctcgagtacttgcttaataaagaattagaaatgatttgccattcagaaatcagctggacggccaatggtgcttctcaagtgtttgaaggtgattaaaagcagtttgcttttgtaaggtgtttaaatattccctctggaaatcttgttaaactcttcatttgcttcccttttctttaaaaagagggaaaacataaactctgttaagagttgagcctttctgtgccccaattaatgaagctttactcaattaagaaatattgactggctgcattagcctgcgtcttcctctggggtcaacagaggtacctttcaccaggcatttaaaccttagctgatgttagtgactattttaatgaccactccagttagcattttgcattctgccaaatagactaatggggtgaccgtggggataagggacaaagtctcatggcctcctttgcctggaaacagaccccagatcatggaactctgctgtgggtggaggtatttcctctggtggtgttgaataccttcacacaccagacttccacatacattgtctcctttaacccccgcaccagcagacattgattatatttcagctttcc

SEQ ID NO: 27556 - DNA, 1069 bp, Bovine  19866881099548
  misc_feature (1)..(1): n is a, c, g, or t
naaaatgatattaaatatgtataggaaatcccattttgtggggcaattaaagcccagagaggttcagtgatttagcctgggtcacacaacatgtacacactggaataaaatgcgaaccagttcattccccaaagcctgagttctatgcgctctgtgacatcctgctgcatgttcaatatatactacctccttgaaacatgaattgtcttagtagctttctcctgagcttggctaatttaaattttgcagccaacacaacagctgtttgaatgtaattcaaagagcttcagggtcctctcaagttgaagacctcagagggattatggagggggaacacatgcaacttgtctcctaaaaaagcggtaattcagtctaagcgaagccagtctgcaggctactttcccagccagagccagccaaggtcaaggttgacaggaaatcccaaatgagaaaatgaagtgctcagctgtacaccaagaaggctgccaagaaattgattcactaaagaaacaggctccagtgccatggaaagcacacagcttttgataagacagaaaggcaagcacacagacaaaggcctgggaacctccttgtaaataaggaaatggctcaatccattttgcaaccttggtggtgtccagctgggggctcccttaaacaactggctctccaggtcaaggtcatttccatggttcagatcagatcagatcagtcgctcagtcgtgtccgactctttgcgaccccatgaatcgcagcacgccaggcctctctgtccatcaccaactcccggagttcacccagactcacgtccatcgagtcagtgatgtcatccagccatctcatcctctgtcgtcccttctcctcctgcccccaatccctcccagcatcacagtcttttccaatgagtcaactctttccatggttagaatggctatttattcatcattagaaatgatgtgttggggggcagaagagactgggagaacataggcaggatggaagaaaatctagggaaatgggccaagcctaaaatgacaatgttcaatgttaaactacagaaatgccaagt

SEQ ID NO: 27557 - DNA, 1441 bp, Bovine  19866881099662
  misc_feature (1)..(1): n is a, c, g, or t
nggattgaaaccgggtctcccgcattgtaggcagacgctttactgtctgagccacagggaagtaaacctcagttaaatagaatcaggagaccagaagggggagccctcatgccctaggaagaaagacttttctttcctggcaaggactcagccaatgaacagtcatggagcctttgtttactctagccctcccaacttccttttcccctctataaaagcagtttccttccctggctgtgcaaggcttgctggagttgcagattcaaattgcaattctctacttatcccaaataaatgacccccaccttttttttttttttttttgctggagaaatatccagcggtctacttatttcaggtcaacaccctttacagaaaagtttaccaacctttgctctctgatgtggctacagttcaaagatcttcgtatttataccacaccagttccgttgtaacatcaagctgaagccttgggaccaaacactaaaaatctgtttccatggatttttccactgctgaacacatgcattcagggataatgctggacctctgtatcataatgaaaactttaattaaatgctcagcaatgcaaaacccattcagactcccactctttcatgtgtgtgaccagtctgtacaccaggagacacccccgaaccttgttaacacatgcccttgtgcacgccagctacctcgacaaaaaaacgtgacaataatcttaattaagtttaaatccactggattcatattctatcgagtcacaataaatgaatgtgaaagaaaatgaagaaagtcgccttagggaagatgacttttagaacacggttgggaaatagagggaaaatgggcatcctggctgtctttttgaactgacagaaaactgtactgattacattattcagcaagtaatgaaatgttcctacacacttattctcagaggggagaacctggggttttaatcagttggtaatgcacttccctcaaatcttgcagatttgtcaaatgctgtaaatgaaccacagttttctctcttttcgtctctggggcccagctctagtttttcagtcagcacaggcaactttaagcagacaggacagctgggaagggaaacaacccttccaaagaaggctgagctccacgtgctggccccagctgtgtgtgaagggctgctgaccccaccgatccctcaggtttttctgaagcctcctttaaggcggcagaggcagaaggagctgcaatatttaaaaattttctggtctcctaatgggaaagcactcttggtaggtaaagcctggtttctatgctcggttcacagcgaccacacaacgtgctttgatgcctgactcggcttgatccttttcctgtctaatttcagccacttgtcatttctgtttcctcttggcttcaaatgcatcgtggcaatcctttcctgagggcgggg

SEQ ID NO: 27558 - DNA, 1507 bp, Bovine  19866881145349
  misc_feature (1)..(1): n is a, c, g, or t
ncttttggaaagcatgggtcatgttaacaaaggcaaggagatccaacttatgagtccgatagcactgcattattcaaagtgtctggcagtcagacccaaagagccatttactaacgggtcatgtttttccaacgggcaaaggacatatgatgagcagccccattcttctcccatggagatattaaatgtcttcaaaatcctcttgctgaaacaatatctgccctggtctaagtgattatgtgaactgcagagggaaaaaagctgttaccttgactttgtcaatttctaatgacagctgcttcatacggccatgggaagcagtagaagctcatgctttgttcaactattagattgcaggtttcagtgagtcaatactcattttgcgaattggatttgcttaaaggcagaatatgggaatcggtttcacccacacacaccccaacacacataatgccccactcaggatgaatctcaattagaaagaacttttataggtcaagtacatttaagatgcagggaaattcaaggactgcaagtccttttaatgaaatatttcagctgggaacaagatgtacaacagggcatttgccttcaagaagtacattgcatttatggcaaggaagagtaagtagcataaattcatattggaaatgacacagatgatccccagtaagcatttacactgaagaaggcactcaacacatttctcatggtggagatcaaatgccagaatccttttgctccctcccctatctgattttggcagttttttttttttcttagtaaataaagctctaatcaggtttagagttaatgcagagggagaacttaatgcaaacggacccactgaaaatggatttttttaaaaaagctatcattaagtttttgacacttttttatatacgtggaattagccacagatattttggcatgcctcatgcatcatgaatgtgtatagttcatccaatttttctctagcttttggatttaacattctctgagttaccttaataacttatacatgacgaaagaatttctgaaagagtctaaccaataaaggtagtattttgtaagggcaacacagggcagacagatgaatccacccctggccttgaacttctcactcactttctccctaaattaagagactgtggaagccctggttaagaccaaggaggttcccactgctcttcctgtggcttggattctagactccccactcatacattacttccaagaatcccacctcctttcctctgctctctctaacatcctgacagcctccttttctacagcagtgattcctgcatttcagattttaggaaccagcaatttttcactaaatggatttgagcaactgaccacaaagtgccaattccttattttgcaaactagaaacattaaaaagggggtggaaaggtaacaaccaactactattccataagtaaaaggatacttcaaaagaaaaaaaaaaaaagatagagggatataatctcccaaagagagt

SEQ ID NO: 27559 - DNA, 984 bp, Bovine  19866881221713
  misc_feature (1)..(1): n is a, c, g, or t
ntggatctgtcttactgtctatgctctcgactccggaatggttggggatctctgagcagaaagttaaccaaaacgtccctgggcttggcttccttgtcttgaaaggcagaggaacatacaattgtcatacagatttcctttggttctttcattatcaacagagaacactccacagtggagtttgccaacagagcttatcacaacagacggctgctgaggcctgccaaagaacaggactccagacggtctcgtcttcttcaatgacaaacaagaactctcttcaccccacctttattactatgtccccccaaagcagacccttggcaactgcctttttgcagaccttctaagaagcagaacagtaccattattgaaggctgacagacatactcccttcctaattagcatgaagagatatgcaacacataactacaactggaaatgtcacattgggactgtacttccatgctgagggaaaagctttgcaagctcagagtgtataatcaatcagcctcttctacccagaggcatttgtaaaacaggcatgtttggaaccaccctcattgaacattccgcccttacaaactctctcccagagaagtcccaagggctggctgaggcagtgacctgtcgtattgagcaaaaatgtcaacaggagaaaaaaaaaaaaagcaaggaaaaaaggagatggtgcttctgatttatttcaagaatgccatccaataaatgagctcagtgtcgcaattaagctgggccaaggaggaaagacacgtttagtcttgtcttctgtgtcttgccttgatgttgactgcagccagtgacagaatgaggagttggctcaaactgcagagctgagaccaattatgaactctactcataactcgtatgcctttgtgaggggtaatacttaggtttcttaaacagtcacaaagggcatctactctgttggaggatacacataatatgccagcattacagctgatg

SEQ ID NO: 27560 - DNA, 752 bp, Bovine  19866881290499
  misc_feature (1)..(1): n is a, c, g, or t
nttggcagatacatgaactgtaaataattttgctttaaaaatggatcaatttgtcatttttaagccacatgaattcttttcatcatttaagcacctaagtgctgtctgtattagtttgctcttctgagcaaatattttcagctcactttataagtacctcgactttgaaatcattctgtgaaatactaatgagctgactttttcccccgttcccatttgtaaaatccattgcatctttccaatttccctggcctgtcagtaataaggaaatcatttgttttagggggattggatcagtgttattttcaaaggtctcatgacacaagttcaaggctagtgtgtggccaaggacttccaaggagttttcaaaattgaacccgtttctttcttcctagttggccctgatgtgatactcagaaataaaaagtcttgctccaaaagtgtccacctagtgataacagcttgtgttggagatattcagctcaatatgtggtactcctttccaatcgtttatttaagctggagacctaaaggtagatatccatgtctctaggatctccttttcctctgcctaaccattcctcctcccctctgctcctcctcctcgtcttctcctcctttcaagctttcagcaatgcctgtcaatctggcaccaaagcgtcttttgactttacctgtccctcccctttgtcgctgcttttcccctggggtaaaccaccctcggtccttcacccgttctgtacagtagcctc

SEQ ID NO: 27561 - DNA, 1038 bp, Bovine  19866881403333
  misc_feature (1)..(1): n is a, c, g, or t
ncttctgtggatatgcacaaaccagttctttcctgggaacagacacaatgtacattctatagctaaaaaagaggaaaaagtctgagactgctatttttatcttcagagttttccatacagagcatacattgagctacagtagtatggtgagggagaacgcaactgaataatgatgttcttttttcatcaatttcctaagagccaactggggattttattcctaaggctccactgctaggaattctctcactcattctagccaaatccatgatattaaatgatcgatgctctcgattgtggtccagagttttaaataaatgaaatcaagaggtggtttttggagtggatcgtgacgttaacatctcagtgtctctcttgttgtcagagatgtttgacatgttaaaatctatgtgctgcccacctgggcttggctttatccgtgaagacttagtgtggcagtgtcatctgagtttcatactttgaaaataccgtactttacagggactgtacattaaccagaaagataagagtttttctctgaactactgtaaccttaaattggagactgattcttttgagcctactttccctagttccccacttcatgtaaatgtcttgatgagagatgatatgaatgagtattttgtatgattaaatcaaaccctttaggaactcccctcccacccatgagacagttgatgctggaaagaatgttgtggggaggacttaacaccctacttgtattttttaagtttcttttgtgaaagattttttaatgcatttttactgtaaaaatacatggaaatgtatgcattccataaccacgattgcttctggattgatatctttcttgtctctgtgttgtctcaaatatatcagggtcacgtaaccaagtaagagtgtctggctcctaatgcaatgaactatcataacattctgttgaaagggaagagatgatggtctttcagtagtatagttagtgccttgctactcaaaatccagtctgtagaccaactgccatctcgtcactggagagca

SEQ ID NO: 27562 - DNA, 1238 bp, Bovine  19866881570142
  misc_feature (1)..(1): n is a, c, g, or t
nttaaaggtctaagtccagcaaagttccttaataaaacttggggaactaggttctaagaatgagcttttccctatttctcccatctcttgcaaacctcaagagacgctgccactccactagtgagccagtaataacactttataataagaggcacagcacacatgactccaggcaggtggtatctcattagaccagcagagattgaatcctttcccctagtggtacaaagactgctatccttacaatcttgtttctgcagaacttaaaaaacagaaaagaaaaatacatggtgagtctgtgatgtgaaacagaggctgcaggatagatttctgtatgctgatgaagctccagaaattactatctacatttaactccccacatggacaagcatgaaacattttgctagcacttcaggatagctgctttattattattatcctgcctgttttttcggttctttttctcctggtcaatcttttgataaatttcatcccacagcgagaagaaacctgaattaagcatggaaaagaaaacaaggttcaaattccatcatctctatttttctcattatttccagccttttgtgcttcttatattcgttctagttaaacagggtagtagaataacacctgctcagaaaaatgaataaataaaaggtttactgagagcagaaaagacaatggtcccctgctggcaacactatatagctgatatgagcttctgcccaaccctaatcaataaacagctgcatgacctcatgtaaagttgaagtcaaatgtctctacaatcagaaccacgagtggaatctgatgatagtgtgtgtgcgtccttcaagaagacactaaattcttaaaaagacattaggatctaacagaactgtgctcaaccaacctgcaggactcaagtgctaacagtgaacactggatggacatggctctgaaggcaaatacaactgagatgccattggcattccatagtttgaacatccatagtaattaacacagctgttcccctaccgtcccaatctcactccaatttattctcagataagaatagataatgcaggtggtaaactatattctaatatggtctgatatcattcaagcaacagcagactaggactagagttccaggtcctctgacctacacaaggaaatatcatagaagcataaagttaaagtgaattcactcagtcgtgttccaactctttgggaccccacggactgtagcctaccag

SEQ ID NO: 27563 - DNA, 698 bp, Bovine  19866881707149
  misc_feature (1)..(1): n is a, c, g, or t
ntgggatggagagtgtggctatattctagtgatagtaagaaaaacatcaggggaaggagagacttggggcccaaagataacttattggggaatggcacaagatgtcaaaaggagataaccgtgactttgacagcagagcatttacccagcagtagctgaggatggaaactcctgggacagttgaccaggttattcttacggtgcatcttccctaatgggaaaccagcaagcctttgggaaattacagctttgtgacagtttctctcttgtaaagacatacattagttacagcagattttatgacattacagactgaggagaaacctgtctcccctgtcccaggagctcccctgtaccaaatttttgtattttccagcattcagagtgaaggtactggagggaactgttctacttgccaaccagagggaaggtgttaaggaaaaaaagtctgttacttgccagtaggaaagtatgtgtggtccaacattttgtctttaagaaaattacttgtaatttgagatggctataatcaagatgagtttccagcatcgtaatgcatctatgagaggtgtttaatttgtcatgttaaaaaagcacaattttttgaagtgagctttattcacctttcagagtgtacttgcaataaagtttgctcttcttgctaaactattctctgagttttggtaaatgcatacaat

SEQ ID NO: 27564 - DNA, 1107 bp, Bovine  19866881780937
  misc_feature (1)..(1): n is a, c, g, or t
ncaaacagtagggaaaagtacatcacgccttgaagcccaggtgaggcagattggcaagtgctgcatggatctcctgaacttggagggtgccctgactccctaggcccctacctcagtgtttctgctccagattctacttgaaagtgttctatgaaggcaaataccttccattatcgttagcagggggatagccctggctctctgatgtctaaggaagaaagttcctcagtgccatatgtggagcttaagcttttaggagtggaaattttaaaagcgagctgcatatttatttatttacttggcaagcatgcattaaaagcctctgcgtttgagataccctattgtcaatacaaagtctctgcttttaaggaattcacattctagaagagagatacatagataaaataaatgaaataattataagtgattaatattctggtagaaaataattgagtaatcttcttagcttccccagtgggtcagcagtaaaaatgtccctctacagtgcaggagacagaggtttgatcctgggttgggaggatcccctggaagaggtcatggcaacccactccagtattcttgcctgggaaatcccatggacagaggagcctgcagtttggactggtaggttacagtccatgggattgcaaaagagttggacacaacttagtgacttagtgactaaacaacaagaaatgtttagcctagggatggcctcttcaaagagtggacatttaagccgagtcctgaaggacgcaaaggggatagatttaggacaatcaagggcagttaaatagttacaaaggccatgctggagaggctttggtaattctaggcagtgggaggtgtatgcatgtgtgagatgtctcccaggctggtgaccctatgacagacgacagcagtgactcagagagtagtggtggcattgagctttcctgggtttccatttgatttctcatttcaaaggcattgggttcaactgtgaaaaactttctgcctaatgagtccatcaaagaggtggtttgttgtgtgcgtgtgtggatttttaaagaagcagggtggcaagagtctgcctgtaactaggctgagacctttgaaattgacagt

SEQ ID NO: 27565 - DNA, 1251 bp, Bovine  19866881783544
  misc_feature (1)..(1): n is a, c, g, or t
ncgattcaaactagcatcagccctgaagctgcagaggacaggggttaggtcttgtaggtagcaataataaatttggattgtatattaagagtgatgggaaataatggaagaattctgtacatactagactcaactgtctatgggagcagaggcagtaatttactcaagatgatttcatcacttgtgtaatattgaaataattcagggaaatgtataaataattgaagtgaagaccatttgtcaaaatgccattttggcattttaccagctgatgtgcatttaaaactaggatgaaaaatatagctttttttcattcttttaacttcaggaggatataaaccctttattaatcagatgtactttcatttgactccagtaagatcacaagccctatgcaaagctatcttccatttccacacagcaagttctcaccttcaagagatgctactaaaatgctcaaatgaagaagatcccttttcagtctgcagaaaagggatctattctctccatccaggagactgtcaagttggaaaattaaatctgtcactttaagatgtatgagtcctgcactttcagaacttaaagcatcaaagcaagcaagaaaatctttgggaaacaaatctatataacatggggattttaagagaagccatcatttcctccacagaaaccagaaggcctagaaacgtgaggtcagaaaaaggtcatccgacatccaaaattatctacatgtgaattagtgtgtttagagcggtagaccaagcttcccaccgctctcattacataaggtgagtcaaaaaaacttgtctctggtcagataacatttaagaaatcctacatcctccaatctagcattcagtttcctcacatatgaaatgagaataacagtcatgcttattacctcctagagccactctgaagatttacaaggtaatacacgtgaagtgctcagaaccacatttggcacatagtaagtgctaaataaaagttaactgttactgctgttttcatttttaaagcatcatgacgggtttccatgcataaaaccgtgtgaacaaacataagagcagataaatccattgagctttacatgtcccagtctttcccaaacttgtctggccagcagatccttttttctacctgttaaacactttctatcactaggggagctcaagtcctacagagctcaccatgggacacgcagctgctcattcaggaatccagaaggaaatttatttataacagaagtca

SEQ ID NO: 27566 - DNA, 1591 bp, Bovine  19866881791127
  misc_feature (1)..(1): n is a, c, g, or t
naggctgtgtctgcacttctgctgttctaaacataccatgatgaatatttttgtgtacataatgttgtatatttttctgaatatttacttgagacaggtattacatgcagaactgtttggtgatgggatttatacttttttaaggtttttgataaatatcatgttaatacaaatttccttgtatcctactgaacgctcgagttttatctttcacttaaatctgtgataatctgataataaatatagttaattgttttagtaattgggaaattgattctagttattaaaatttttttttctcctttgattttatccctcacttggaaatagtgtctctttgtattcgagggggttatttttattcatggtttgcttatgttgtgtgtttgtagatggtggtataattgagttctccctttattcttccactccatgtggtacaatttatcctttcttattggtaatgagtctgcacttggatacctcatgttctgtgctttctgtcaatagctccctgttgtatctaaggataggcagcaattggttggccatagggaatggagattggtaagctttgtgtgggcctgcaattctttttgttagattgtgagtttgggaatcacattagtggaccatcactttagatcgctttaatatatccatctgttggtgaactacctctatttatcttcctcttttcattcttgttcttttccataacttgtttttcaattagaatctctgtgtctttctttctttttttaacctactggagtatgattctgaaagaattcctgtcttctttctttttggtaaacttggggaattaagactgaaatgcttttttttttccctaatgaacaagaaatatagtagccctggtagtttatttgggagagtcacagtttattgaatgcctgtaggcaattcacatatacataaagctcaagataaaccattgtaatttttgcagtttcctctctctttctttctcagggtaagagacagggaaaataagaccctagagtaggttagaacagtggctgtcctgaaatacatcatttgtctaacaactggatattctgatgccagtgtttagagtaacaatttctgtcaaagaatatcttttgaaaactgtcaatattagtaattcagtaattcacacattccatcttaactgggtggtcttccagcagtagaatcttagtgcaaattgccattttcagtggaactccacaaatatgtctttactgtaattgttgcagagttatttatcttaacaagtatgaagttctttgctatgatccatcctgcttataaacaagatactgtttttcattcttgagaattacatttcagaattttttcgactattttttttaggcaagaagtttctagtgcaacttctgcatgcttatgcttttttaaattgacttttaattggaaaatgattgctttacaatgttgttgttgctttctgccatgcttctgctaagtcacttcagtcatgtccgactccatagacagcagcccaccaacaacataaatcagccataagtatacgtatgtcctctccctcttaacctccctc

SEQ ID NO: 27567 - DNA, 723 bp, Bovine  19866881803524
  misc_feature (1)..(1): n is a, c, g, or t
naatgctaaaagaatggaatctctggggtggtttatatacaattaaagtattcctttttttaaaaaataactttgcatttgttcactttttattttaacatctctgtactggaacatgtgttttgcattacctaataatggagaggtgtgtcattcttctgcctgaaaatatgctgctatcatgaaagcacatgttcacaacgatagcagttaaccataaagagaatggaggacttgaatcaggactaagagagtaaagggagactcatggtctaataaaaggattggagagattaaggtggctcaaagactgggggtgggacttgtagagggttaggattatgcaggcacacagaagcaaggaaggatttcagcccagtatgaagaacagccaagacaagcagctaattgcagcacaagagctgtgccatgcggggagaggaggtgtacagtgagtatacatcttttcctagagggaaacagcccccaggctcccagacctttcttgtcgtcagtatccatgaaagtcaatgccttcattaaactctcaagggaaagacaattaaaagtctaaatctaaaacaaagtccatggtcttcccaagaagttttaaaaagaaattaagaatgtacttctgcatctgagttgggtgagaaaaatgagatctccctattggatctagtgtgcatggtcagtcatgtcaaactctttgtgatcttatgg

SEQ ID NO: 27568 - DNA, 1021 bp, Bovine  19866881829894
  misc_feature (1)..(1): n is a, c, g, or t
naattggcccttttaaagaaaccttatttcagagatgtcaggtgagtgaaagagctgccttcaaaaacacatcattttcagtccacaggcttctccttacctcaagaaagcaaattatgcccgtgtccttaacacaaactagacctaatatgtgtccagataaaatcaggtcaaagatcaaatcaatgactattaaggacagcattttataaaccaattcattaaaaggcaatgacatcttagctctgacatatgaataatctatctttagaaaaaaatcgagtggtttcatttgtttctggtttatttcacacctagtaattaaatgtcatattgcacaatgcttcctggtcctcactcttgagtttctctcattcatcagccctattgacagcgcctgctgatcaagggcaaggagcagggagaggcaatctttatttccttgatctggcagcatgggtaccactgccattagcttcctgtcagcaggtgaagacctgaggacgtgatagatgatcccggagctcttacaaggagttttcaccagatacctgcctcttaacctatttacccagcacttacactttcattttctaggaaacccacatttttgcccggagggagcaaagaatcaacatcttcaataaatccaaaaagcataaaaactgagttttatccaaaagctaccaccatggccatccacagatttggtttcacacaacaaaataaataaacaaaaaagggtataggtatttgattgagtgagctgggaaatccagaaagcttattttactctcaacatgccatacacgttacatctgaaaagagtaataagagactacagcgattaatttttaaagttagggacttttcaccaatctgtacagaagatttttgttgtacatatgtaaaacaggaaatgagacatttaaaagggaagagtgctttcctaaacctttaaatgagcaactaaggtcagtgaatgacatttacaacaaaataaaagtgctataggacattc

SEQ ID NO: 27569 - DNA, 760 bp, Bovine  19866881841961
  misc_feature (1)..(1): n is a, c, g, or t
ncttttttaattataaaaataatctttatgacatgaaattccaccaagtcaaactcttggaggctgagagataaggggctactcttctcctgccctcttggcctggcttgcaccccaattgtagttgatctttcccagccaggcaaatagagcagaggaaggccatgctcacagggaagagactcaattaaccacagctcaactttcttggaaaaatctctcctaaggctcaagagaggcagcatgataaatccaggcgcttagggaagggaatgcaaacaacccacataactatcctctgctttttcctccttgagaagtctcccagtttccctcgaaagaaatatttaccttaaggttcctatttttctttattatcactttttcatctctggaattgctacagttggttgtccttcaaatatcagcatgacaatgactgatctttcaaaatgccaccctcgctcacccgtgatggcaaggaaaggaaaaaaacaaccacacagggctgctcgtcacaatatttaccagggctggaatgttttgttagttttcggtggaggatgctgagacttgacaaaggaaaaacaaaaactcctctgtgtcaaaacacaagctgaagatgatttccttctctgctgccctggtgtcaactgcaaacaaattcagagctgccctgggctcaagggagtgtttatagtcccgcggagctataaacacgccatccttcaaaacaacacacagagccacccaacatcaa

SEQ ID NO: 27570 - DNA, 783 bp, Bovine  19866881887459
  misc_feature (1)..(1): n is a, c, g, or t
ntaaacttgctgtgcaaaggatctttgtagattcatttgcatctttttttcccccaacacattgtggaatttcctgctgaacttaaaggatatcaaacaggtataggggtccgcattcaccaagtcagttaagaattccccatgaccgtttatttttatggaagccgtgtcattagcaagcagcaaaccaattactcaggctacattcctaggggaaaagcctctcttaactgctttgcccacagtctgctggctcttaattaccacaagctaagagactggtgtgttgctgggttagaaaagagccagcccccagcctggggcttgtccttccctggtttctctgccaggacagggatggtggttttcacagcattgctggcaccctctggcagctgctgcacaaaactgggggggctatcagccaaggtctgctgttgccagttagagccttgctaacatctgtgatcagtaggagttctgtacaggtgggttgaaagctgttcccctttcccagtatgaattttgatgaagtcctgccagagagacagatgacgatgagatttttttgggtaggatgggaggaaatcccgtggggaagttgaatgtcctggttccagaacgccattcccatagtgacagacagacaggctgcagaatgaaatgtacactgtctgtgcctgggttatgatacgctgagagttactgttagttctgagatacactgtctgaactgagggatggtgtctgttctttattcatagaggctccctgatattgttg

SEQ ID NO: 27571 - DNA, 861 bp, Bovine  19866882113663
  misc_feature (1)..(1): n is a, c, g, or t
ntattaattaaaaaagtttaatataccctattttttttaaacttccccctatcattttcttttttttaagagagaaataagtcagtaaagaaaagccagacaagagaccaaagagacctgctgggttgtgagttgacaccactggtgtgcatccctccacatggtctcttattaactccatgatgtagagcaaattctgtaatttctctaagcctctgtgctttcatctctgcatggagaaagtagtcctaccttttgttagaaaggttgtggcaaatgggacaaatgttaccaaataacatgtgagaattgcagttaccttaagtacttggtatatatacgttcattaattcttaccacaaccgtgtgggttgtgggctctaatctacagaggaggaaactgaggcagagagtgtctaaataacttgaccaagcatcactcaggtaagaagtagccgagctgggatttgcacaggagacagtttggttccagagtttatgtctttgttacaatattgccagttttccaccatccctccaaccagggtatccccatccttcactcttatctagagataggcatttcacaggttggcataactcctcctatgtaatttgaagcaagaaagcagatccaagaaaccgggtccgtgttgcttgttccctgacacactgtcataaacatttttccaggtcagtacctatagctctacctgggtcaaaatttaaccgccttggcgagagctggccattttagcccagccttggcggggggctggctggctttcagagaaacccagttctagctggcttgttgcctaggaactggctttctttcccacaagtagcttctgagaaaaa

SEQ ID NO: 27572 - DNA, 827 bp, Bovine  19866880551227
  misc_feature (1)..(1): n is a, c, g, or t
naaaaataaattgtctactggggtaaacattctatgtcttgtgaatcaagtaaatgtgacaatttacatttagaggcgacatcagctacacgtgcaaaaatatccctttctcttcaccagcaaattctctctcttgctctctcttttttttaacagtgcataaaaaatcatccttggagtagctttatggttccctaacaataggcctttacagttaaatatcttgatttaaggtgacagaatttgatttaattctactactatatctttcaacccagagatttaatttaatcacctattgtaattttctgtttaatatcaataaaatgtcttccccattgcccttacattgaaaatgagatcagattaatgctgtaggtcttcccagatttatagctggaagggaaagtgaagattgaaatgaatttatttaaatttacactgattgaagctgaatatcctacaagtcttaactaaaaacagcttctttgacagggaaatatgtacagtgcatattagagtttttatgaaagtttaattcccttttagtgctttttatgtcagggaaatatattgaagtagagaaaatttatcatctacttgtgaacatttaatgactaaaagaaataaaggtagatccaactcctactgtatgtattctgcatcatgatcagctccattgctgatcaagcaaggacgattgaaaattacattaacacagaaaattgctcagtaggtccacagtggactggaaaacccccagctctacatctatgggaagtgtcaggagcagattttattaacacatccagtgtcagagtgagtgt

SEQ ID NO: 27573 - DNA, 2082 bp, Bovine  19866880572258
  misc_feature (1)..(1): n is a, c, g, or t
naaaataatttttataattaattttatcacaaacacatgtacatgtgaaacatgtattaataattctataacaatacagcattgtgtggtggttttaaacactttaagatcttttattattctcatcaaaatggaaacacaaaattaagcagtactcataggaaactcacagaccttggaaaggtatctattggatttcagggtttttaaacctatggggcaagtgttaaacaagttacctcaggatgcatgggttctagtgtctttctgagttcaggactttgagaccgatggtgaacctgggaccgctcagttccttgggaggcctgaaccaaggatcaagctattttctccttcagcatcttaatgaaatcgtctgagtacaaagtcattcttctgtttgataggagagtttggtacagttaaaattttgctgattactaggactgacttggagaaggcaatggcaccccactccagtactcttgcctggaaaatcccatggacaaaggagcctggtaggttgcagtccatggggtcgctaagagttggacacgactgaacgacttcactttgacttttcacttccatgcattggagaaggaaatggcaacccactccagtattcttgcctggagaatcccagggacgggggagcctggtgggctgccgtctatggggtcgcacagagtcggacacgactgaagcgacttagcagcagcagcagtagcaggactgaagtccagggctcttggctcaatcataaaggtctcttccagtaactcaccttctaataaaagcagatgggtgggtcagtattttttcctttgtatttgatttttctcttctgggtgattcactgttagatataactgctatcgtgtgaacacaagaaagctgcatttccacagccaaaggaaaggatgcctttccttagcagtgataaagcagcattcaaaggattgatgtgtgacagtcatgtgatgcctttggcaaaactgataaatctcacggaacggaacactgagagtgaggtcaagtgttgctatcagttagtgcttaatacaggttcatgtctttgtatcagcaacagatggttttcaatttaattgtcccacatcttctataattctaaagatgaagctttcataagaaaggaggttataaacaacctgaaaaattaaggcccccattttttttatgaataactcattgtcatcattctatcccaccatttttatagtgatccttaggaagttacaggtacattttaaattatgaaaaaggatgaaaattatatatgaaaactgtagaaagctattaggcctctgtcataattaattttttaataaaacttgattttactttatctcagaagagacaaaaccatggaatgacatgtcgttaatacaaactccctacttgcttgaatttgcacttgctaaattttaactgaggtccagtacacacaaagaactaaaaagagaaatctttcactgcaccgatgtcaggccttcaatgaaagccaccctgctggttgtagctctaataataaactttcttttatacaaggcctttcaaagttacagggtcacaaagttccttgaaaataaatctcggaaagaacagcaaattctggaaccacatccaaattctttaggcctgtgactctaacagagttaataaattgtaggtgtaaatgactaatggcatgcagacccagcggtgagtatgttcaacagataaaaatgaacaagtgttgaggaccaaagaaaggatctatgagcagcggtgatttagggcagatacttccagagtttaactgaggctgcaggaagcatagctgaggccctcagatgagggagccttggagatacatgcagctggaaggccaccggcccctgtggggagtggaaaggggtgatgtcacattcatgagcttgttaaccaccattggctcaatccttgggaaaacaaaaacccatacactattgtgtgtgtgtgtgcgtgcgtattagtcacccagtcccacccaactctttgggatcccatggactgtaacccgccaggcttctctgttca

SEQ ID NO: 27574 - DNA, 2091 bp, Bovine  19866880811673
  misc_feature (1)..(1): n is a, c, g, or t
ntattggaggctggtgatggggatgaagccagcagtgtgcaagtgcatagctagaggggctagcccaggtgtgcacacaatggcagggcagacagcaggggtctaagctgctgccatgaacttctgcacttgtgtgtgcccgcactggctgtgggtcccaggctctgaaaagagcagggcatacagagcgtgaaggaactcaggtggctggtggctgtgaatgtgaacatttgtgtggctaaaactggggatatctgcaggattctgcatagctgtggtgattttttcagtggtaaaactgctggggtcgtctgcagagcaggtgacagaaatatggtctcttccactgcatcctgagagtggcagctccgcttttcctcctgttcctactctctgaaggtctcaactttaccagtctgggtgtggtgaaaccaaagtggagctttcacatggtgccaccaaagactgggataactggcccttaccctgctctgcctttcctggtgaggggaacactttctaactgatcagtgcccacctgggactgggatgattctgagacaatgagcctgccttcctgatctttgtgtgcatgattttccttctactgtaaaatttcttaagaaccccagagctggttttgttcataggtagctgtctttttattgatctttgtaggagaatggagaccagggtctcctactctgccaccttggtgatgaaaccaaatcttaaaaccaattttgactccctttcccagtaaatatttactttgatgggaaagtagtcaaattttcctgatggacatttccccaacatgatttatgaaatggtttgcattttcaccactgatttaatttgctatttttcagttaccagtttttataggttctttttctgggatctacattctgagctatcagtctatttatcacttttttgcaaaatgatctcagttttataactactattatgatttaaatatattttattatcttgtaagtcatgttctctcatcacttttttatatcaaagttttcttaactatttttgtttatatatatgtatagatactacatatatatagatagagaagaaagacaaattttgagaacaggacaagaatttattggaatattaaagaagaagaagaaataatattctatggcatctgaactcttccaacaaccattttctgacctacttccaatcactgctgagccaagctggatcagttataattctgaggctgtcaagcatcagccttctgttctgatttgtagctgaggctcaaagttgtctttcatctctaccacttcactccgtgcatgcaaaagagaagattgctccagagaatcggcaactcacccaagggcaaataaaagctttgtgaagtttccagcctccatgcagatcttgcaattatagaattgaattcaagatagaagatgggtttttttccccttctaaatcttacttagagatctaggtaatactatgcaaattgcttaggataaaaggcaacttgaaagccagaggattggggaagggcatagccatagagactctgatattaaagaagaagattgattggggaaaggcctctgaagtgttctaaggactcaaaacaatcactttttcttttaatggtttcaaatatccaatcaacccagatcaaatacattttttttaatgtactttcaaatacttattatgtaagcctgtaatctattgaaaaggccactaagaaaaaaatagtcattttttttttcatatgtatgtgctttgttgctcactcatgtctgactctttgcgacccatggactgtagcccaccaggctcctctgtccatagggattctccaggcaagagtctggagtgggttgccatgctatcctccagggaatcttcccaacccagggatcgaacccagatctcccacactgcaggtgggagtacactctaagccaccagggaagtgcttttttttttttttttttccacatagttaatgtttataatgtccacaaataagaactatagttccatatgagacctatgatatagatgagtggttaaatgcagttgtga

SEQ ID NO: 27575 - DNA, 4234 bp, Bovine  19866881062921
  misc_feature (1)..(1): n is a, c, g, or t
ntttatgttaattggaattattatacttaatggagctatggaaagggatagtacctctaaacccatctaggaaaacgatggcatttccaagatgaacaaactactggctgagatgttattctttgccagatctaggggatttaagaccaccctccggaatctctggggccttgacatcttcacctcctcgaattaactgtttcacaactagaccagtcacggagactcttaattctttctgggtcattttgaggctgtacaaataaagtgaaatagcagttgatcttgaaaactgaaaatgttacttgttttgtcctgttggactctttgcaaccccatggactgtagaccaccgggctcctctgtccgtgggattttctaggaaagaatactggagtaggtagccattcccttctccaggggatcttcctgacccagatctcctgcattgcaggtggatttttttgctgagttattgaggaagccccagtttatgttaaggagtttttattgggtggcctaaatattatcctagtcttagaagttcttaatatttcatcattgcaattaccactgttattattactatcccaacttttatgcatttatcaaaaaaaaagtatgtatgagtttaaaactgtgctctattgggttatttagaacacacacttattagctcacccccagagtcctatagaggttttcccacttctctgatgtttgaattgaggtacgattttgaccagttcagttacatgatgatattgaaagaaacaaatctatgttaatacttctaggatcacaagagttaaataaaatttaactcttgtaaaatgtttacaacattttaaaatcatgcatagttgaaagcacacatttcttcatcttggcccccagaggagccagtgcagccaggaattagacagaaagagtgtgaagcagctaaggtggtggggggaagctgttttctgctgggagggaaggaaaggatctggggctttcaggagatataaaagtgtgacaggctgcaaggtggagggggaagaggagtggtgaccgtgcctgaaataccgggggctgggatgcccctggggctggaggtgctctggtgataggcagtcagcatcctctggacctgatcagagggtgctcagtggttgcagataaataggacacccactcttcttctttctaaactgaaccaggagtgcagtctctggggaagagtcttcctttcttggcatactgaagtctccagcttgctcctctgtcccctgaagcttcctctcctcaggttttgcccccctcagctccatctttgtccttgcttggctcacctgtgtttgctcacctcagcatggaagtgtgtctgacccacgctggaccccacgttgatggcccttgctgctccctgagtctaagacctgagctcagggttctggccatcaattccgtaactcataggctcaaaaaacccagctttgtccaggggggctcctacctgttcattcccagcatccctgtgtcatggggggttgttcaggagcagggctgagtgtgggtgtgggcagggcaggaggcagcagggctccaggcccagaaacaggtgtcgggggggcccttggtgaatggggtgcccttacagagagctcctctcttccaggtggctggagacctcgtgagacgcctccacctagaagcccacgtggacaaacccgtggccacctacagtgggggcaccaagaggaagctgtccacagccctggccctgctggggaaacctgaccttctcttactggtgagtagtggatggagcagtgacatgccagtgtctccaaataaaatgctttgatctatcagaggtcctctggggaggatgttcaaaatttgcaatgtcacatttctgaactaataaatgttttgccctgaatcaacattttccaaacagaatctataataccattggaattttactgagacaaagcagactctttggagtcctttttatttatccaattgaagattccataaaatcttaacactaaagacaatatttttaaaagaataccagagcccacttgtaatctgaaatccaaagcacgcctgtcctctggcctgttgctttaagtcttctcctgcagatacgatggtcagagctatagggactctgtggtgaatctgagggtgggggtcttggggaaggaagaacctgcgggggaggggagggcgtccagcaggagagcagagcacagacagtggacctgagacagggccacctataatccacatgggcactgaaattaatccagtttggcggatagaagcatgagttagaggtggcccaggtgtcaataaacagagccaattgtttcgcatttcaaaaatagctaagagtagtatcatttaaataataaaaagaggtcattatttgtgggccatagactggattctaaccattagaagacctcccagggttttgcactgaaaggacatctgaggaacatggaacagtatgggagacaaaagacagcctttctttggctgttattgtttgttcagtggagacagcgtttcagtggggggacttaagggagattcagaagacctgcgttgaagaaagggccccatcgtggagtgtcttctggaatctgagctggattctcctcttacttgcactaagcttgctttttcccaaggtctggaatcaaagacgactgtgtaatccatcttctgaaaccgggtaaccaaagcttacgcttgcgtgattttgtagtttgcagaaggccttttccttacaagaggagagtctggcttgccttaaagcgttcccggcggggctgttccctgccttcagcaggatcctccactcagccttgccctgcatatcctgcattggctgggactttggtcctcgatcccactctcagctcgctaggtctcccgtgcttgggcggtgacctgggtggggactcacaagtcctgtgcatgtttcctcctcatctgaagtggtccttgacaacagtgtgtgtctttcggagtccttgaagtcacccttgaaatcctccacgtgaagtgttagtgacaggggtgactgtgagtgtgtgcatctggtggaggaggtgcgctgaaggacactcagcatcctccccagagacaggacaagtgtcctgctgccgacacttgtgtggaaatgtggagtgatgcctccagctctctcagggaacagtggccaatcacgccttccacttagttggtttgtaactattcaccgtgtcatgtgattttggggcagtggatgacctcagctcttaagaaaaatatgttcggtactccctgaccgcaagagcacagaaatgtgtaggcagcctacacatagctctctctaaaggggctcagagaagaagtgcttgggtgtttgttgaaggaggaagcttccggtttaaaagagatttcactgtccttgatgttgtgaaaccaatgaagcctgtttctgctcttgtatatcttctagggtagatgcttctgctgttataaagaggttggggtgcatcagggaaggcctgcctccccaggattccaaggggagcccagcagacttgaggggtgctgtgcctgctgagcatagcgcgtgggctggagctggggctggatttcccccagcctgcacccttgctccggggagtgtgttcccgagtgccttctccccctcccctcaccctctgttctctctccttcaggacgagcccagctcaggcatggacccctgctccaagcggcacctgtgggaggcactgaggaaggaggctgaggagggctgtgctgtggtcctgagctcccacaggtgagcccagtggctccccaaccgagtgcagtgccccacacagcactgccacacagatgccacgtgtcaccccctgacggaggtcgggacactgaccaggccgttcccccggtgcgtggccccactgggactctgcagccagtgggccctcactgaccatactctgtctgtcagtcatgtctgaagagccaggcatcctcctcaggcccttctgcgaccagtttcagcccctttattccagcaggagaattagctgaaatgaaaactcagcacgtttctaaatagggtctcgtattttcttcctcacagaattagtcttgtagtgagattttcacatggttggcttctttttggctttatgctgcactgttccaggccgcagagggacgcagt

SEQ ID NO: 27576 - DNA, 667 bp, Bovine  19866881511121
  misc_feature (1)..(1): n is a, c, g, or t
nctgtcccttgcttcctgtttcctcgtggccctgatatgacctttatcaaggcatcttttgactatacctatttacgatctgtgatgtctgctaaaatttgagtctggaaggacaaaagaatgctattctttctctatcttctgtggtcccttacacagaactcaatgaatagtagcttaatttgagaaatagggtaaaaacacccacagatccagagtggagaggaaggagtggccttgttaaccagagagaatcatccagaattgcataatgactcaacagagccagttggcatttgggaaagcgtgtgttaaactgttggcccagtaacgctttccttgttcatctctctcatcacctttctgggcaaaattttcataaaacagcttggaagctcagatgctctcaggctgtcatcctgtcgctatgataattactgtgctaatcaccaacaccttgcagattagtggagattaatggtgggctggaggagtgaggaggcaggctggctcaaaggctgcatttacagggcccccagaggactattgcatgcaggctggtggaggagaaacaaacaaatcttctggtgagttgctcaagaaggctttggtgagccctgtctcctgggagttagtttctggaggggtgataggcccaaacctcagt

SEQ ID NO: 27577 - DNA, 1119 bp, Bovine  19866881571677
  misc_feature (1)..(1): n is a, c, g, or t
nttacagctggcctaatctgattccctacagcctggccagaactctgcagtgatgaaagatactgaaatttacggcaaagctacatctcataagtaggcagtgtgacctctgtataaatagtcttcaagtttctgacaaatgagaaaacacttttagaaggaaagggacatattttccaaggaaatgtggctcgtaaaatgaaaacattatttgtggcatctgtggaaatactctgaattgcactcttttgacccattaatccaagaacaaatatgaaagtttgaaatttttttcctgaaaaaaatattgatccacgaagttgtttactagggataattactgaaagcaagtttcaaagttatggcttacttttaccacttttttgcttaggtctaaaggtcacttaaaaaaaaaaaactagctttacattatccatgttgccataaaattcaaatgcttgttctttgtgcatgcatgcgtgccaagtcggttcagtcgtgttcaactctttgcgaccctatgggctgtagcccaccagattcctctgaccatgggattctccaagcaagaatattggagtaggttgccatgcccttcttcaggggatcttccctacccagggatcaggcccgtggcctgttctttaactcctttttttggttatcttcaaactcttagctgtatttagagcactgctggaagcatgagaagcctgtccttactagactgcaggaattggaaatagtgctagattgggactcctgaggcatctcctacatgggcactgcttcctctccatgtcagcacatctcaaaacttcacgtgcagcagcatggcccaggggcttgtttgagctaatgtggattactacacatcatcccaaaggtctttgtgttgttaacaagagtccccaggtatagctcctggcaatcaaaccaaattaagaaatgtggggcttctgggaggaagcgacctgcactgtgactctccccaccctgcttgctgtccagtgccccgctgccccgagccagccctggataggacaggcatcggctccaggggatgctgggctccatgggcacttcctcaggcagagcatgtcagggctaggggcacag

SEQ ID NO: 27578 - DNA, 1380 bp, Bovine  19866880490617
  misc_feature (1)..(1): n is a, c, g, or t
natatctcccctgttttaaaagtgaggctctagctgttcgatctggttgcatttgtctcaaggctatcagaaggcagtacagcagatgagcagagccaaggccgctgggctgtatccagactgcgtttcctcatctattaaaaaaccaaacaaaaaatgaggacaatgaaaaatatctcatgaaagaagcttgtgaagatttaaataaaataatgcacctaaacgtgaataatacatacatgtggtggcagtgtagttactaagttgtgtctgactctttgagaccacatggactgtagcccaccaggctcctctgtccatgggattctccaggcaaaaatgctggagtgggtagccattcccttctccaggggatctcctgacccagggattgaacctgtgtctcctgcattgcaggcagattctttaccatctgagccagcagggaagccctgacacatacatgctgctgctgctaagtcgcttcagtcatgtctgactctgtgcgaccccatagaaggcagcccaacagacccctccgtccctgggattctccaggcaagaacactggagtgggttgccatttccttctctaatgcatgaaagtgaaaagtgaaagtgaagtcgctcagttgtgtccgactcttagcgaccccatggactgcagcccaccaggctcctccatccatgggattttccaggcaagagtgctggagtggggtgccattgccttctctgacacatacatagtgcaggcttaactcataatcgtgtgtgtgtttatcagtctttatggcagtcacaacaatctctaagacctttttaaaatagtataccctgcttcttttattgacagaaaagagagcaatgaatccgtggaagatattcaagtaaagaaaggtttagtaaagggacagtcttgtttgtatttggatgaaggattctaagctactgaaatgtgaacaataaccaactgtctcattcggaggaaggtgcttctgctttcctgccttgctttccagggactcactggattctggctcctcgtgtgtttatcctgaggccatggtgtctgtttgctttgcagcactgagttgctttgctgtggaactccctgctgggtctggccaccccgcactggtttctctcttgaaacctggtgccctgaaggcagtcaattactttctaacctaaatcttccatgaaaaattgctgacttcttctggaggtccacagggagatggattttcaaagccttccctgtgcttatctgccccacgtgggtacatgcattttggttgcaccggttctcacaagtactttgtcattaattagagattttgctgtgtttagggtcccaccgggcttctcagcaccatt

SEQ ID NO: 27579 - DNA, 995 bp, Bovine  19866880504244
  misc_feature (1)..(1): n is a, c, g, or t
ntaaaactgcactccattgctaaaaatgtttgctggtgcctgattttcatagatgataatgtcctaatgactgaccttggatttgaggcactgttacattttggtcttgatttacatttttaacttctccctaccccaccctcaggtcactttcctattcaacttgaccttggtattctcccgtggagggagctcctcttactcttctttgtagtacataatagatgccgggagagtggttgttcaataggaaagaaatgaagcccccataatctcatattcagtgcacagtgtcttttggaggcagcctggaagtccactgtccttggaatggcaagtggggacttaagaaatcagaggatccatcctgctgaccctgagctccccctaagttctagtatctggaagggaaacctatgccctcaggctggatttccccacattagtctgttggacattcttctacaaattcagaagctcttgctaatcttatcaaacagcctcaagcctcacagcaatgagagctcccagtttgggcaggtggtctctctgtgcgctggaatcccatcttaccatctctacctctcagctcaagaagatgccactaacatccttgtttttttgagctttatagtgctaacaccaccgtaagtcatatacctcataaaacaaaaacctttacctgtgataatgcattcatttaatttcgatgctaaatacagaatgagtaatgtgataaacagttctgactgattgaaatgaacccttcatttttcacaattgttccagaaggacactgagggaaagaaaatattaatggtttttataatgaggacttcacttggggtaagcagaaagtcactattttctcccgggatctcatttatcccagttcaatccaattaactcaattagagatcctggtgccattttaaaagccattcttccacccagttttagcactggacaatatctttatgctttcacgggattca

SEQ ID NO: 27580 - DNA, 1123 bp, Bovine  19866880504979
  misc_feature (1)..(1): n is a, c, g, or t
natttctcagcatggctatcgggatccccaacaacccaaccccaacctacagcattcctggctatccaagaagccagagtatcagtcaaaggaacttaagccaaactgcacagagggatggggaaaaagacacagttacctcccatctatggtaagtcctatcaaggtgtctcatttaattcacacagcaatctaatgcagaaagaattaacatcatgtgtacaaaggaagaaatagatcaaaagcaaaaaaagtagctaagatcacatgactaggaaatgatcaagccagtgtctggtggtctgggcatagccacctcatatccaggaagccactgacggccccccaggaactgcccctttctcctactcacaagtagttctcccaaagtctacgcaaaccgcccagggctgagaacagaacagacttgtttgtacacactggcatttgcacatgacaaaaatcaggctttgccacctactaattcccttggcgacagcaaaacagctatgttttccaagaatctgcaagaagctattttaagtacatttcataaacgtgtgctcctccaggacgcttgcttggcttgcagcagcccttcccaggatctctgtccagcaccggccgaccgccactgtgtccgaaggctggcccacagtcggctgctgggcgaccagattcgagagaccacggcaaagccacagcagccctcttccgttttcatctgaggtctatccaattaacaagagaaaaatgtaccgtatataaataagcataacttgaatgatttcctgaaagatattttttatcatgatataaaaaaattgaagcttcagaagattggaatttctaactttgccattaatattttcctaacaaatgttttacatatggccatagggcttccctggtggctcagacggtaaagtgtctgcctgcaacgtgggagacccgggttcaatcgctgggtcggaaagatcccctggaggaggaaatggcaacccactctagtactcttgcctggaaaattccatggacagaagagccttataggctacagtccatggggtcgcaaagagtggacagactaagcgacttcacttcacttcacctcataggcttc

SEQ ID NO: 27581 - DNA, 1743 bp, Bovine  19866880505680
  misc_feature (1)..(1): n is a, c, g, or t
naatgtggattcctttcctgaagcctgcacatcacaaggtgatgaggactgactacccgagcaggcagcgaaagggtggggataagaagagccgatcaggcggccttgcccctctatgggggtggggggtggtggcagtgaacaccattgctataactcagatacacaggagatcctcagacaggcccccagaatggtctgccctctgcagatcctgcttgttacccaggagccaaggctgtagtcatggaaagagtctggcagcaaatggaagaaagtcaggaaccccgtcactgggggcccctgggtccacaagcaaggtcctgaggatgcctgggagacaggcatgccccctgtctgtggcccctttatctttaggttggagaaaacgtgcttgctatggagcagcttcccctctgaagttcactgaaatattcaccagagatggtgggaggcagtgaggcagttggagggccccagagatcagccagctcaggactgtccccaaccacagggttagagggggtagccagggccagacagggagagactctctgggtcaaggaggccccaccagagtctgcatggactctgagccactggactcccaggcctgcacctgtcctgctaaactgggcagcccggacctctgcagggccttcccatcctgtctcacctcatcaagctgggtggaaacatacagtctgcgtcctaggtcatcaccttgacatttcacgtatgaaaaacaggtggaaaaggaaaagtggctcatgccagaccacagctggtacctgacctggcaggtttggggtccctttgcctagggctcacttcaccacatgcctgggtctccctaaggaaatgccccgagtctcagcccaagccaccccctcgtttccctcctggaagatgtgcagagcatccaaaggctaacccagaagacccctgcattgccatccctagccctggaggctgaatgtctttaccttcaaatgcccgggcagcatccacgaggtgggtccaatctaaccctgtggccgtgtctgggaggggcatcaggccaggatctgcgcacttggacttatccgataaggacccatcggagaaccagaactcatctagacaggaaaaaacccagagcgtcagtcagatagcagtgtgggtactggctgggccttcagaagggcccaggggggttcttgtcccaggtaagaaacacacatcccaccgctgtttgtgaaagagccacaactgccaggctcacttaggggtcgccaataggcaggggccggtgcaagatcagggctgaggttcccacaaaccagaaaagcagaggtgagctcctcctgggtgggctcctctgaaggacattacctggatctgaccaccctgaagatcacgtcctgttttcctcaggatgacttacccatgggaagagtgttgcaagcctctaccgtaaaaacggtttggtacaatctctcttgtacatttctctatgtataaaagtggtgattgaatttcgcttgtgactcaatgagatggtctgatcagtggctaaaccagaacccgctccccatcctgcactgagtatttgctagtcttctgtacaaagacaccctgtacacttctcctgaactctcatcacaggacgtgaagcacttacgtcaccagtaatactggctgttaagaagtcattatgcatctgcagacacgcttcctgaaggctagagctcctctaacacg

SEQ ID NO: 27582 - DNA, 1689 bp, Bovine  19866880572589
  misc_feature (1)..(1): n is a, c, g, or t
nctactctgccagttgcctgctggaggtctgacaatattggttttattgctacaatattggttttattgctacaatgcctggaatttcttgaggttagctcttgaaaagtgggttagcaaatccggtttttgctcccttgaccagggaagtaccaagaagataacatctggaaggagaccctgaattcatgtaaggaatctcttgtatggaatcacggggcttccgtcagctccacttctgtgctgctctgtgttcactgcctctgagcaagacactgccctactcacaccacactgcccacaccttagccgcaggcgccagctgccaacccatctggggttcctgctgccgaatgccagagggtcagaggcagggagggacctgcatcttctgcattcccttccattttaagtcggggcgagcctccatctgttgggttcttgggtgtggagctagtcttaaacattaatcattttacgagagtggtgaagagggcttccctggtggctcagatggtaaagaatctgcctgcaatgcaggagatgcaggtttgacccctgggtcaggaagatcccctggaggagggcatggcaacccactccagcattcttgcctggagaatcccatggacagaggagcctgacaggctacagtccctaaggtcacaaagagtcagacatgactgagtgactaacacacttggtaaggcagacatttgaggattgttcctttgctgtaggaagacaggatacagaggagcttgcctagagaatggcatctgatgggcagatgctttattagagatagcttgttaactgtgccgtatagatatagatttagatatatagatatagatatcccaccctgacagtatatatacacacccatacatgtaagtatagatgcaaaaatatatttctttttccatccaaatgctgaatgttctgttaaggcatctgatgaaatgctacctcggagggaaaatgaaagattgtctcttattacaggctgtttccatggtagcttaatacccttgggtagcaccctaatgatgagttattactttttagctaaaacatattgtagggaactgattaataatataacttgcatagccaaacaacaggttaatttttcttacgtttgttctcagaaaggaacacacactgatacatgtgataatttctctctacgtctgactcactcatcttagctctttcttcacagctaacaaaggaagggaaaaggaggatggatagacccttggggactccctcaggcaaagcatataggtggcatcttagaggttgtgcccgggaaggagggttttaatcaggagagtcccctcttaaaactgccagaccaagtgttccagcagctgtattctgtcagatgcaattgtagccctggcgcatcttcagcgctgtggcaggactaatataacaaaatgggctgactgtttacaagggcttctgggaggcagttgtgcctgacatcctgagaaacctcttccctggaggagtaactgaatctgtggttctcgtgtttgacctgccagctttagaggctgggggcagtgtcctccttgcggctgagatgcaaagacggcccagggcccttcgcaggatcgcctgtgggagacgggtgatgacaggggttaatacagaccagagaccaaacaaggaaac

SEQ ID NO: 27583 - DNA, 2353 bp, Bovine  19866880692927
  misc_feature (1)..(1): n is a, c, g, or t
ncgatgtccgcgtggctatccgttctgacgatgggaaacctggctgcattcgggcctgaagagcgaccccagctaacttcaagattctagccagcaaggctggttattgttttcttgtgttagttttaaattcacagcatcaccaaaaaacactgcaaagcccatgcagagttatctagtgcagacccttatttttgccatcaggaggccaaggcccggtgtatttatggcgcatagccagggccatcaacttatcaaagacggtggttccctggcctgcttcctccccacacgccaggggacctgacacctcatgttcccctttcctgaaagtgggttcagaggcagtaatccaggtaaactgaatataaaattttttaatcagttaaatagatgatttaactggttgttcctgtgctccatgggccatgctatctagcctagacacttgaagcaaaacttttaattgtgtttcactagaaatctgttcaagcccattcttggtttcaaacatcttactcttttcctcatgtaatttcatacatacatatatgtatgtatgtattatatatgtgtgtatgtgtatatatatagtcacatatttcacaattattgatatatatggttgctttggggtcttccccagtgattcagcagcaagaatccacctgcaatgcaggagtggcgagatgccagttagagtcctgggtcaggaagatcccctggaggagggcatggcaactcactccagtattcctgcctggagaattccatggacagaggagcctggagggctacagtgcctagggtcgcaaagtcggacacaactgaagcaactgagcacgcacacgtgcacgcatggttgttttggttttatttttgcttttttgtctctttcaaaatacaaaaataaacctataatttctaaccaaaataataacaataatagattgactccccacagccgggccacatgaggacccacagtctgcgtggggcaggggcttcaaccagacgtcctaccctgagctcagcagaatccacctgagcaggaaggggaggaaaacgatgcacagccctgtagtagctaaaagaacacataagcaaattcagtattaaagccattaattaggacagattcctacacagatgtttgactgaatttgattttgaagcagcttctgcattacctaccacattttaatcagtaaccccaagaagcagaggggacaccccaaagaacagggaaatggggtgtttactgtactagactcccagacttgccaccatcttcctctcccttcaggtcacagattcattaaattccaatacactctgacacataaatatgcaatccagctaagagctcataaaggtcagcctccaaattgggtgacccatctcccaccccataactctagcagctaatgaactgttcaggctcccagagcttgaaaaacattggtaggaattcatgttctctgaagctgtcagcatgagcaccaagccaaaaacaaagctgtaagtgcaggggcctccagcacaagccctcacattctcagggcaattttaggatttgaatttcaacagtagggtggctgtttaatttgcatattttatcaagcagaccctgtgatgagaagccctttttagaatatgcacgtgaacatgtccagtgaagacagatgtattgagggttttcaggctttgaatcgagttccaaactggaggctcactgttgttgactgtgaaatgtatcagctgaagaaaagggaggaggaagagcacttcgctttggaaataatcatccataaaatagtctcatgattggcaaaaccaaccatacttaggaaacagagagcagacaagagttcggctttaaggatatgagtgacaccccagttttattcctctccccagtccctgccctccaatatgtgtggtgtgagttgtatgttgtaaatacaagaggaattattgctttatgaagagagggtaaaaaagtggaatttcaagatttggagggaagattggatgaaaatcaagcttaattgcattttatcactgtgggtgaggtgacaagatagaaaggcattatataaacacaagacattattatatgagtctttatattatagtataaaattaatgatgaaacctagaataaggtatcaggtttcagaagtgtcatttacaaattcaataatttgtggaggaaactgcattgacatcgaaaaccacaattacctccgttttaaaaacctactcaataaacctctttccttatctaaaagtttcctcagattcttatatcacctcctgccaagtatataataataaactacgtgggcca

SEQ ID NO: 27584 - DNA, 881 bp, Bovine  19866880763217
  misc_feature (1)..(1): n is a, c, g, or t
ncttgagtgatcattaacttatgagggtctcccatacttttttctccccttataatcccccagtgggattaactatttaattacctactttgtcgttttactctgtctgtatcactcaggttaaccaagagcagaagatatggattctggtaactaactttttcataaagctggcttgaaacccaccatcctttaatataagcatgattaaggagaggttttgagaactgttagttttaatcaactaacttcctgacactgttgttgggtgggttgcctggtggcacattttacagctaatcgaggctgatagattcacgacagacatttcacagaaacatttttaaagattttcccagagccctggaagggactgatgagtaaaaatccattttgaacattttccaagacaatgtcatctgagccttgctcagcaccacagccctacagagacacaatcaaactcttgttcatttgctaaaacagactcaagactgcttcctgaagaaaactgtggccttacctgcagaaagaaagggtaaaggcatttgggggcagaaagccagaagctcagaatagatcataaatatcagggttgctaagaagtttagagcagttagagttttaagatacatttctcagaggaagaggttagtattctgtactaggtttaacacttagagagttagtcagtcacaggtggtaatgggattcttggtggtagatgagacagcctggagcaggacagattataaaatttgtgggatccagtgcaaaatgaaaaggcagaggcccttgttcaaaaattaggaattttaagatggcaaccccagagtgtctgtctaaggcaggactcttctgagtacaagtaactgcacagg

SEQ ID NO: 27585 - DNA, 2578 bp, Bovine  19866880848432
  misc_feature (1)..(1): n is a, c, g, or t
naaactagacgttagatctttgaggatccgatgacctggacaaccatggaaacaaaagcacttatatgcacaggacctgatgagaaatgcagcactgcccactttgctctccgtttcactcctgctttgatgagtatctgtgtttataaggaagttctgtctgcttctgttgcaggcagctgcttgcatttcctcctcctgagaaaggggctgtaaaaaaagataaatgacatggggctcaagcaaattttgcaagcctggcagatattgtttctacatggtggttttttgaaaattcctatataacgagcctgaatggtcttcttgtccacttcctcatctttaacttttccatgtagagagagagggacaaaggcattgtcaagattaccaaggacgaccccacagccctctggactgtttgtggcacacagaaagtcctgcccaatatcgagccagaacctctcccgctcttgtctgaactattaaaaaaaaaacagtcatccacagtggctgtgaaaaagcaattcattttcccctcctcctttattcctcttctacctttctcttttattccccaaaggtagaatttagacagatgcaaatcagaaagcaccacagactccactgtgagctggaaacaagaaaatgaaatcataaaatgcttagccctctctttgctggttggggtcctctaattaaacagctgattgaatatactcacccacatctcctatggtgcgtatcataaaatccaagcactaaacgtcgggactctattggaaagatttttcacacagtactaagacagaagcagcctttaccttaacaaagctctagctctttcctgatgctaatagttgggtttaaatatgaaaaatcatttttgtgtcctctgctctttaaggatgttcactaacctacgcaagtcccggtgaactcccagccaaattaggcttgagaaaatgaaagttactaagctagcatttccttttctgttggtctatcagcgtgaagacccgctctctccccgcagtgttaataactgaatatgaaatatttaaatggctgcaaattgcatcaattaaaattgtttccattccaagtaagctcagatggcatgcatgttttgatccaatgtctttttatgtttgatatactttcttaattataaagtacattatattaagcagaaaaaagcattggtaattgtagcagaaatgtttctttaagtgcaaaattaagaaaaaagtttaaaaagaaaggctgaggtaggtttcttttgtaagacacatactttataagatatatactatgtattcagttcagtcactcagttgtgtccgactctgcgaccccatgaactgcagcacaccaggcctccctgtccatcaccaactcccggagtccacccaaacccatgcccattgtgtcggtgatgccatccaaccatcttatcctctgtcgtcctcttctcctcctgccctcagtcttccccagcatcagggtcttttcaaatgagtcagctctccgcatcaggtggccaaagcattggagtttcagcttcaacatcagtcctatgtattactatttcattatcttggcaatgcaacaagccatggatagaagcagtgctttttaattctgaaggtgaccttggtttctgtctctaggacatgctgaccacttggtatggccaggacttaagaagcagagacaatgtgcaagggatctaagagaggatggcagtgagtcctgagcacgggtcacttccagcatttaatgagaggttttagaaaagtaaatcggatcagcctttctcttacttaataaccactccccccaaatgcttccatttagaacaaatccaggccattgatggaagaccccagggccctgtacgagcagacccacatttctctctttccctcacccacctccctctagccacgctgactttgtttccttgggaactgagattacccccacctcaaaacctttgccctttctgctccctctgctaagagggacatctctttagagagatcttctctttaaagagagaacagaacatcttcctgacatattttttgccttgctgactctctttttttaggctctgttcaaaacttcatttctttagagagattttctctggcctctcaatctccccctgtgcctcctccccctgtcacagtggtggcacatttgataaaggccaaatgaatactagtgatcagaaatacgggggcttcaaagaaagggagagaggactctgggctgggcagcttataaaagatcatcagagactatatctaaggctaaagccttgagacatggacacgcatctgtccctgttttggggacaattgattgggttggaacaaaatatccaaacttttgattctgaggtcactactcaacacttgtggttacttaacctactatgatggggttttccatgatggctcagtgttaacgaatctgcctacaatgcaggagacacaggagatgcgggttcaatccctgggtccagaagatcccttcccttggaggaggaaatggcaactccagtgtt

SEQ ID NO: 27586 - DNA, 949 bp, Bovine  19866880874719
  misc_feature (1)..(1): n is a, c, g, or t
natacaatgtccttgcatgttaaggagcttcagtcatgtccgactctttgtgatgctatagactgtagcctaccaggctcctctgtccatacggattttccaagcaaggatactggagtggattgccatgccctcctccagaggatcttcctgacccagggatcaaacctgcgatctcctgtgactcctgcgtctcaagcagaatttttcaccactgagccactagggaagcccccaccaagtttttctaattctctcttccctttgtggaatcatctccaaatgcagaatgaaaaactgaacacaggacatcccaaatccaagcaaaaagaaagttgtaggaacaacatacaagaattttaagatattcttcttaccacccgtactttttaaacacctcatgcatgcagtgccatcatgaaaaaaaattgtcatatcccttcctcaggtttaatgataatcccattgtgtacaaaacagaggcaactttgatgagtcatataaatggaagatcgagtctttgacatccatagaagacacatgagagcatgacatggggcaggagatgaatacttctaaaatttcttcctgctttcatctgaaaatttcccctcagaaatgaggatagtgaaaacttatgagcatcactgtataagcaggatgcgtcttgcatgttttatcttgttaatcttgcacagctaaagctatgtttaagctcagaagctcatatattgctagtggtctatactctacaaaaggatgtatgaaaaagatgttcattaaaaaacatctaccgtgtcagccattacagtcctttcatctgaagaggcactaaaacagaattcccctgtgcaagatttgcaaggagtacttttctctttaagggcacagtgatttcccccaagaaagggaagaactcaatatcctctttattctgagtttcctctca

SEQ ID NO: 27587 - DNA, 1350 bp, Bovine  19866880957587
  misc_feature (1)..(1): n is a, c, g, or t
nctgtcccttccttatagactcttacaaggtaagagccaggaggaatcttagagattattaattccccctgcattgttggcagcctcctggctcagtgctcaaacctcctggctcccagttcaatgagagaagtaatttcattgcctgcaaatgtggttataggcaaggttgactcagtggctgttattttcccttggaggcaaattggagactccaggtaggagagcctccgttttcaatgtttgggtagtaggacctgtcttacttgaatgatagaagctctgccatgaagaacaataatcgtgggagtgaaaatggtcacagatgaatcattggattgcaacaaagatgaaaaatattgtcatattctctacaatgtccaaacaattcctaagctggaagccagattgcagtctctttctttgatgtgctttattgtctttttaatgagccatatctattttcctccttataatgggataaactttaagagcaactacaaaaagaaaaagacatcatatcctaggtcttatttcctttagaaagaaccaaaaaagcttagttatccaagttgtatgttcttaaggatggtggaaaatcaggttgctattgttgttgagttgctaagttgtgtctaattctttgtgatcccatggatgtagcccaccaggcttctctgtcctccactatctctcagaatttgctcaaaagcatatccattgaattggtgatgctatctaaccatctcgtcctctgccgcccccttctccttttgcctgagatctttcctagcatcagggtcttttctagtgagttggctctttgcatcagatggccaaagtattaaagattcagcttcagaatcagtccctctaatgaatattcagggctgattttctttagaggtgactggtttgatccccttgcagtccaggggactctcaatcgtcttctccactgccacaatttgaaagcatcagttctttggcactcatgcttccttatggttcaactctcacgtctgtacacgactactgggaaaaaccatagctttgactatatggacccttattggcaaagtggtgtctctgctttttaacacgtctaggtttgtcgtagctttccttctaaggagcaagcaaactgtggaaaagcaggttaaatttctataaatacaaaacagtacaatctgcaaacagcagtagaaataaaatatagattctcttaaactaaaatagggcttccctataaagttcaataactctgttagtagaaaccctgactgaaaatttgaagaacaagaggttatgctaaggtttctaggtttatttttgtttgttgtttaaaaa

SEQ ID NO: 27588 - DNA, 1540 bp, Bovine  19866881002174
  misc_feature (1)..(1): n is a, c, g, or t
ntgttcttgcctggagaatcccagggacaggggagcctggtgggctgtcgtctctggggtcgcacagagtcagacatgactgaagcgacttagcagcagcatgtgaccctaaagcaattgctttctgttatgagaatggagttagagagcacattttatcataattactcgcccacatacaccttcaacgctcgctcttcacatcctgctcctctcatttcctatgggaaacagtcaagtagataatggagagaaatgaccatgtttaaaacatagcaaaatcatgcaaaaagtggggttctggccctaagtactcaaaagacagaaagctcacttacagacataccttattttaccacggttcactttactgtgcttctcagatgctgtgtttttcacaaactgaaggttggcggcagctctgtgtcctgcacgcctgtcagcactattttcccagcagcacttgctcacttcgtggtttggtaattattgcaccattccaaacttgttcattattattctccttgttagagtgacctgtgatcagggatctctgatgctgttcagaagatggttagtgtttttagcaacaaagtattttttccttaaggtgtggaccttgttgttttagacataatgctattgcacacttaagagactctgtagagggtaaatgtaacttttacataaaataactgggaaatcaaaaaagtcatgtgacttgctttattgccctatttgctttattaccatggttgggaatgaaacctacagtgtctccaaggcgtgactgtacattttcaaggttttacaccctcagaggggcaaaaacatatgagtcctgcctccctctgtattgtattctcaaagcaataccatacgctcatcgcattcttcaaagctccctgaacagaggccaagttataagactgatttatctccatcacttatcaaatgcagttagagacacaagacatagattgtacgtgttacaataataaccaagagtttgagataatatctacaaaatccagtgacacacacactcaatttgggacgtgactgaagattccctagattgggttcaggtatgaaaagggccatgttcacagcgatcatttgtcttccttgggttttcactcccatctgctaatacagaataccacctctgctaaattaccggctgactcacatgtttctgagcatctttgaggttgagtcttaagtacatatgactgattctatcttgtatcttccaccaagtgtactgtggcttcccttaccgggtaaagccacacagccagacaccgccacctgaatgagtccttttcatcctcttcctcccggcccagcccttggtaccctgttgctgcttctgttacctcctgcagggcactgcttcagatgtgccactgctgtttgcctttttttgttttgttttgcttttggggttttttgcttgtttgtttttggtcgtgttgggtctttgttgcagcgtggaggcttctcttgctgtgctgcagggacttctctttgcagt

SEQ ID NO: 27589 - DNA, 3328 bp, Bovine  19866881074452
  misc_feature (1)..(1): n is a, c, g, or t
nagagttggactcgactgagcgatttccttacttttttaaattgcaatgatatttgcctccctttgctgccttgctatcatatggaattggaagggtgaactcataacaagaagactctgcatgggaggtgggggtttccagtgacctctccacgccccattcatctgtctaaggtcactcggctgtttagaggctaagccacactgaggatgcatgtgttaaagagctctgcattttccagaagtccgtgtttcctcactgctccccagtcaggcttcaagttctctagtcttgggaaggtgtggacagaacttcaaggctccttgcttctggggggccctgtcaacttccagagcccctggtcaccttctggctataactcagagttgcaccaagatttccagccccccatgattctcagccaacttgtatccactgcttcgggacaacccagagctcccacgaagcccagtcattcccagtctttcccagttccgcctgccttgcccagtccccactcacagctctgcctcctgacagttgctacccacagtccaatctgatagcagtttccataaaggattgcctcagctcagattttttttttttttctgctttccgaaagaaacttctcaaggacaaaatgataagaggtgacaaattggcctggcacacaaggaaagcatattcaaaaggtaaagtactagcaaacacaggcacaaacactgctgaacttccaaccccttgtttgtaaagagactccaacaagccctccagtcgtctccacccctcgctctgcctcatgcctcctgggtgcactgccagctctctaagggctgtatttaagcaaagactcactttgctgcatttggctcacatgtgttagaaaactgctgtcttgcttcataaagagtcttcacctgctcacctgtagctgctgcttttctcggagaagccagtctcgcctggtgatggacactcgcaaactgtcctgagcagcggcttccaacgtctttggatccattctcagccgggcttgggggtcgtcaccgccagctcttaaaacacacacacacacacatatatatatatatatatatatatataggcacagatatgaatgacctgaaatcttcagacctacatgaatgttaatgcaaagaagcctcacaaagtggctcccagctgccctcatccttagaagggtcatggggaagaggtccctagtgtatgtgttggtttgaatgataatctgttggggctttagcagttgcctagagtactcttgcctggaaaatcccatggacggaggagcctggtgggctgcagtccatggggtcactaagagtcagacatgactgaatgacttccttttcacttttcactttcatgcattggagaaggaaatagcagcccactccagtgttcttgcctagagaaccccaaggatgggggagcctggtgggctgccgtctatggggtcacacagagtcagacacgactgaagcgacttagcagcagcagcagcagagtcaccttgctttattggactgggcgctatcccgctccacaactatgcatgtagctatctgtactgaaagcgtaaaatacacatcagattttaaagtcttagtatgaaaacaaagaatgccaaatgtctcattaatgatattttcacattcattacatgttgggatgacaacattattgatacactgggttaattaaatgtatttcttaaattaatttcacttgttttttttttttttcttacatttataaaatatggagagtagggacttccctggtggtaaagtggctaagaatctgcctgccaattcaggggacatgggttcgatccctgctccagaaagatcccacatgccaaggggcaactaagcccgagctctagagcctgtgagccacaagtactgaagcccacatacctagagcccgtgctttgcaacaagagaagtcacacaatgagaggctccgcacagcaaccagagagtagcctctgctcactacagctagagaaagtccagcaacaaagacccagcacagccaaaactaaattaaaaatcttattgtggctactatattatttaaaatcatgtatgtggtttgcattatacatcattggacagccctgcctggacccatccagagccaaattccagggcagatcttggctgtggacactacagagagggatggctgatttgaagatgtttgggtcagagcttctcagaaaatgtgtgctagaagactatcaaaaaaccacttaaaatctgtatggctctttctcctatgctcacaggagttggcatattgggttgaagcaacactggtgaagatgtggctcaggctgccaccttacatgagtgagttggccttgcagaaaccttgcagctgtttctcatcaaaggatgacaaatcaatttctaactgaatgcagtcggctgggaaaaaagtctaccctaagcaaaactatgtcaacaattcaaggaaacagtgtctatgaaagctccactgacgacagttaaaaggcaaacaacaagttggggaaaaggaaatattgctaatgtcaagagtgctagcaacagaagaagaaaaagatgagtacatctatcagaaactcaaaaaaaaagagaaattatgaaggtttatcatcaaaaatgttttcaaaagcaaattcaaacaacataaaatatcatttttcatgtaacaattgacaaaagcttttagaaaccacaattccttggtgagcacagggaataaaaattagatccaaaacatgcctttggatcctcttgtctgggctttaaaaattaattatatgtaaattgccttttcagactattcatggggttctgaccatccttatggcagaaagtgaagaagaactaaagagcctcttgatgaaagtgaaagaggagagtggaaaagttggcttaaaactcaacattcataaaatgaagatcatggcatccggtcctatcgctccatggaaaatagatggggaaacaatggaaacagtgacagactttattttcttgggctccaaagtcactgcagatggtgactgcagccatgaaattaaaagacccttgctccttggaagaaaacctatgaccaacctagacagcatactaaaagcagaatatcactttaccaacaaaggtctgtctagtcaaagctatggtttttccagtggtcgtgtatgggtgtgagagctggactctaaagaaagctgagagctgaagaattgatgcttttgaactgtggtgtggagaagactcttgagagtccccggacgcaagagat

SEQ ID NO: 27590 - DNA, 1822 bp, Bovine  19866881151799
  misc_feature (1)..(1): n is a, c, g, or t
ngaagtccccccttccctttaatatgagctctagttttaaaactttaaatgtttgtatcttccaaatttcataggcaagggcatagtcttctttatggggaaatcactaagtaataaagtccttggagagcctgaccacggagcctgcgagtgtggttttcagcagtgtgtggggtgcaggcatctgctcaggctagcgactgaatgtatttttggatccaagtataaacctttctagataaatgtttttagaaagtcattttaatgagaaaatcctgcccaacaaaggaaatccttttttctgttttaaatcacgcttccccagtttagtgagtaggacagaaatttgacatcagccctaattcaacacagctggaaatttctgcccgaacactcaagtctacgggttttgatcatgaggtgagttacgcaaattctctttgaaatattgcctgaccaagttagggctaccgaatcagacatgtgtggaaggacaggagggaagatttagggctcttcttgaggctgataaaaggcaagtgtgtgtggaagagcggggacagacacacaagacccgctagttgccctagaggcaggagatcatcccaggcaagctgctcttggctgcatccagggaaggaccgagtctagggacatctcacaggtctctgcctggctcttcacacttggtgagaggcggccttggccaaggcaggctgagaaaccgcattgcttcctcaagacctggcaaagaagaagtctccattcgttgcttcaacaaatgtgtcctgagcatgttttgagaactaggcaagttgcactggaactccagggatggaaggaccccattctaaccccgtctagttggagagataggcaggtgcatacatgtgagagaagttctgtccatggtatgggaggaacaccccagcctggagttgcggcagtaagagattcagggattcaggagcatgtctggaggaagtgaggtttgcagggtttctcagaggagagggtgcgtcagccaggcagagaagggaaaagctcactaagaggctctattcctgctatagctttttttcattctggcctgtggtgaaaatagttactcctagggctaaatgatggaataaatgtgtacaaagaaaaaaataataatttgaatggctgaaaagactgcctgatgggacaaattactagagttttcaaagccactttgaaatgccaaacaacctgtactttgtctgttcagaattgcaaataccacagaactccatttcagtcaggaataccaatgatttttgttgtgggggatattttaattttcaagtatcagtcatgtagtcatgtaacatttttggggccacatttaatttaataactaagtgggagcaaatgttaccaatttcgcgctgagaggagcccagtgcatgaagaactactgaatatggttcagagaatgtccattgggaatctagcaagtagatgggaaagatgggcagttaaggctctcaaattccagaggggtagtggtaaagcatgcaggttccatccctagctcaggaagtcccttggagtaggaaatggaaacccactccagtattcatgcctggaaaattctatggacagaggagcctggccagagacagtccatggggtcgcaaagaatcgaacatgactgagcaactgaacacacagatacatgttcttattcagaaaggaaaacaggccatccttcccatgtgactcacccgctgtcctctgcctccagccttgggtttcatggacttggagaccaaaggtccctcactcaccactgcat

SEQ ID NO: 27591 - DNA, 966 bp, Bovine  19866881157498
  misc_feature (1)..(1): n is a, c, g, or t
ncacagaataagcttaatctttaagtcaaaataatgatcccaaactagacaagtgcactaaccacatgcgttttcatttctactgaattcttttgtgaattcagctcttgtgtccatcttcttgtatgtgctgtctcaacttcattgtactaacttatgtgcttgttgctcattgtcaacagagagctatatgaactttattgtaactggtatgatgtaaagtagaatgagttagagagggaagaccttgcatgctcaaatgaatactcaaatctttggtatcctgtcaacttgttctgaacctactctgctatgtgtattgagagctgaattaatgctgttgccaagcaaggtatgaattagatctttttaagtgatagcttttaatcactttataaaacaagtctcctctaattgttcccttattaaatgccataatcaaattcaatatgctggaataaaattgacttggtagccaagatgctaagttcaaattgtgttatttatatactgcaagcattacatcaggagttgaaagtgattactcagaagatggtgatgaataaaagcatgcagcaaattgcctaatctcatcaccttgggttagaacgtctggtggtagataataataacagtaatgactgtgtattaatgtcttcctatgtgctaggccctgtgctatgtgatttactctatataatttcactttaaaaagaaacaactagaaaggctaaatattctacttttatgtggtacttttatctgaacccaggtcgatctgactgctaaactatcatcatttttctagagactttcacaccataatgtttctcttaaccccaagagaacacacaaaaaatcaagtgagattttcgctttggctaatttcaatttgatttaatgaaagattgttaggagcttaaagtgtgctttgtacaacggctagaattttttttttttattatc

SEQ ID NO: 27592 - DNA, 1504 bp, Bovine  19866881158907
  misc_feature (1)..(1): n is a, c, g, or t
nactggagtgggttgccatttcctcctccagcggtatctttccgatgcaggaattgagcccgtgtctcttacatcgcctgaattggcaggcgggttctttaccactcctgccacctgggaagccccgatagtaaaggctagtatttgcgttgcacaccggggtcagcaggtggcgctcgcggctggaagtggctgcctgggatctccggggccccagagcccatctactaccagggggcgggggggatcaaggtccttcccaccggtcaaggaccaacggaagggaagctctgactcacatatttttaactccagtccttgcatttctaaaaaaaaatagctttatgggaaactttccagttcttgaggtatttgattatgagggtaggttcttagttaatgggattccaatttctgcagcttattttctttgaagaaaaaaatgtctcgcagtgattactgcttatgccttctcttaggagattgaatgtctttgaaaaaataataagagccatactctgaacagaagtggatctctgctcatctgtagcatgacagagtttgagcatcactttagtgactttagcaactgtgagtgagtctctcttgatgaacagtgtctaaggaaacattctcaaaatcaacacttggagactgatctttttcaactggttgtacagaactcatcaacattagcaggttttctcctaagtgatcatcatggtgttaaaaataattcgtgtgaggtatgggcttcccagttggtgtggtggtaaagaacctacctgccaatgcaggggatgcaagaggcagattcgatccctgggttgggaagatcccttggggaaggaaatggcaacccacgccagtattcttgcctggagaatcccatggacagaggagcctggcaggttacagtccatggggtcaccaagggtcggacacgactgactgatatgcacagtatgaggcatgctcctgtgtgatgatcataatgatgatcatcatataaatacatggactataacctctgagacttagaagaatgaaagctaagggggctgtattttcaataaaaagacagaagatacttaaaaaacatcaacctagagatgaagagtactgacctagaaacaagtgacctttctattatgtcgctgaggcgaccattggcggggggtggagccagggaccttgggttgtctattttgagtcgcatgtttctttctttctctctcatccttttgggtttccagccgagatgatccaacaaagattagaagccctggagaaggagagaagcagcctgcactttcagcttccttctcaacagcccgccctcagcgccctcctgggccacctgggggcccaggcccaggcttccctgcgctgggcagctcagaggtaagcgctctcccggggtcctcttcccttctccccactcctgagtggggaagaacacataggagcctagcctaggagaccctcccttctgttggttggg

SEQ ID NO: 27593 - DNA, 964 bp, Bovine  19866881165022
  misc_feature (1)..(1): n is a, c, g, or t
ngtctaagtggggctagtggaggttgggtgtcagtattattttaggtaccctcagtttagctacactctgtgaggctgtgaaaaacaccaatggctcagcaggtagagaatcatcctgcaatgcaggaaatacaggagacatgggtttggtccctgggtcagaaagatcccttggaggaggaaaatggtaacgcactctagtattcttgcctgaaaaatcccatggacagaggagcctggcaggctacagttcaaaggtttacaaagagtcaaacacaactgagccactaagcaagcaagctgtgaggctgaatgatgcggctgtctacaatccctggtgaaacatagatgttcagatctgtggtttggttttttttttcctccaaataattttgcattctgagtttacatttaaacaaaacacaattagagaacaggcatgaatgactgatctgcatggatcagcttctttctcctgaacacatgtacatcaaaagtgacttaatagctgacttcaaatatatacagaaagtatggaaaatggaaattccgtggtatctcaatttatattcactgagggcaagatgaggataaaggaactcaaattgcagcagaaaggaattagacatcaggaaggaaacttcctaactttgggagatgtctgatggaaaaaaaatgaagccgctgtctcatgatggatcactgtcttagcccatgaatatttatgcagtgaatacatgctgcaaggcaggtgctgggcttggcactgtaagatccagtctgtagaacagacagatctgcaccctgaccacacagctttgaagtctagtgggggacacagatattaggctaagacacaagcaggtaattataagctgtgacagttgccatgaagggaagtctaagagtataaaatgggtacacggcctagggccaggaggcagaggaagacctctccaaggag

SEQ ID NO: 27594 - DNA, 910 bp, Bovine  19866881177819
  misc_feature (1)..(1): n is a, c, g, or t
nctttaattctactgtacgtttgtccctccacaagtctccgtaagaaagccccatcacctcctctctccttctccccatcctgtcatccaagttcatacatggagaattaaatataatattgttgccatactgttaagaaaggcagaaaatccacttttaagaaacaaactattgtcttgctgtcaaattcctctacccaaggtttgagaagcctcatcaccatcatgcttcaaggaaggaaaaaaaacctcatatactttagtcacagagagcacaaaaggggatttgctttagatgtttccatctctgtgtccacatatcatccaaggccaaacaacaggcatgtttagtgtttgtaattagatgaaaacagcaatacttttttataagaagcatcttatcttccccgtatgtatgtgcacacactgacagccatgagctgggtgatgtatctaacacagcctggcaagacaagatgacctttctaattgtcatgatgagaagcacaattgcaagtgactttgaaacatatggtaaacttcattatgctaaaatataatagcttcttctttggggctcatgatgaatattaatgtcagggctcctgaggaaaatgtgctctaaatattatattgtataaaaccctttcaataccaaagagagcatttatttatagtcttcaaccttcttcatagatgctgttaaatattccattaaacatggcaaaatggaatgaataatcatggaacattggaggtgggtggggacaatgatccctttccgagtatcaagccaagctccaggcagggccataagaaaaagtcaagagatagaaatacaaggtcaaggaggacacagagtatacagagaggtaagtcggtgggttctgctgcggagggcatcctcaca

SEQ ID NO: 27595 - DNA, 2213 bp, Bovine  19866881232421
  misc_feature (1)..(1): n is a, c, g, or t
nttctgttttttgttttgttttttggcccaaggcatttatgatcttaactccctgactagggactgaacttgcaccccctgcattggaaggtaaagtgttaacccctgggcaactagggaagccccaggatgttgtttctaaaacaacttttgtgttcccaacctactcagagtctccctctgattctggcaaaatgtcatccgcatggcagtaggattcaagccaccaatcctgaaaatgcaatgcttatttttacaaaaaccaaaatggttttaacttttctgtactgacccaaataagaagtcagtcagttatcacttagctctccttggtcttgggctcccggggctccacacacttgctctcctggggaccctgcctcccaagccacccattcagcaggtgttcccaagtgttgacagtttaaactgttgatggaaaatttggcctctctgtctctctcttttttaaaattctgtgatgttttgctttggggcctggaaaggagccttcactcactgactgctgcagatagacctcacctcaccgggggtggttttcttcactgagaaacttcacacccacgtgcacacaggcacacatgtacctgcgcggtgcacattcagactacctcttagggcttctgcctgagaaagcatggctgctgggggtgggtttggcccacgtgttaacacacatcatgcaggaaggatgtcggcagtgagttgtatggttttcgagatccgtccacgacagcttgacacagggcatcagacggtgcaaactggagctgcctgagaactaaaagcaagaattctgctctgaacagcttcagtttctggctgcagcactgttacccggagaggaggcctgatgagggctcaagggtgtgtgtttctgaagtcataaaagcgagcgcttgtttgagttcatcaggcaagtcctgctgtgtccctttacttattctctcctgtattaagggcttaaaagtggttcatttccctgaataaatttggctttattttccctgaaagcttagtaatgatttaatgacggaatttgaggagcttgtcatagaaacacatgtaaagggaaaaagatgaatgtttcccccagtgagtaaggcagctgactgtcagtccaaggagagcagcagaagaaagccctgttcctctgtccctggggagcgacctgcacccaagcccccagagcctttgggctaagctcactcagctgcacctaccagggatgctgtgtgtctgttcatgattggatcagggaaggaaggagcagtctcgtcaaaggaggcatactgagctccagggctacatatgggagaaaaatgctctcctggaaaatctactgaaatactttcagtgttcagcagagggtgtgtggggtgaatacattcacatggctgatatgaggataatgtggccatgtgaatgatgcagggaaaggggaggaggtgtgatcctgggaaccctgattctgcttaaagagatgctctgtattctcagccaagcataagggggacacaactggtctgttgagaaaatggaagggtatctgcaactcaaagaaaaaaaaaaatatgattctcttgctctgattattggctggcattagctcagaatttgtcagtcttatgaacaaggtgaggttgtggtggccttataaatgccaggtaattctggcaccttgaaaacgcgtctagagttgagaggagacttgagaactcgtctagagacttaccaccctcctcccctgtactcttgctgcaggagactgctctggcctcagtttcttcatctgaaagttggggataataggattagcaaccctatggtgaaggtgtgcacccaggacaatctttaggaagcccagagctgtctgaagtggccaagacttccatcagagctgagacttccctggtgctggactggtccagggacagctgattggctggtgtcagggatcatagcagagaatgttcacagccatggaggtggggacaggatgacttcagaggtttcctccaccagtgagataacacaaagtcccccttatgaatcctgtaataggggtgaattgtaatcccccgccccacgaaagacaggtccaagttctaacccctagtacctgtgaatgtgaacttactcagaaacaggatctttgaaaatataactaatttcagcatcttgagatggaa

SEQ ID NO: 27596 - DNA, 1024 bp, Bovine  19866881245039
  misc_feature (1)..(1): n is a, c, g, or t
ntgcctggaaaatcccatggatggaggggccttgtaggctgcagtccatggggtcgctaggagttggacacgactgagtgacttcactttcacttttcactttcatgcattggagaaggaaatggtaacccaccccagtgttcttgactggagaatcccaggaacgggggagcctggtgggctgccgtctatggggtcacacagagtcagacacgactgaagtgacttagcagcagcagcagcagcaaggctctccaggggtttccaggtggctcagtggtaaagaatccccctgctaatgcaggagatacagattcgatccctgggttgggaagatcccctggagaaggacatggcaacccactctagtattcttgcctgagaaatcccatgaacagagaagcctggcgggctacagtccacggggtcacaaaagagtcagatacaacttagtgactaaacaacaaggctttccagcgcttccttctcataacagcaatgagctcagtgttggctgtattaaagccaaatgcccagtgagaacttggtcataatttgttgaatgaagaaaaaagtgaatgaaaacaaaagcaacaacattaacacaaaaacagactagagtctgcgtgtaatttggtcatacgaattataacatcaggtcacacaagacttactttttaagttctatttgataacgattcgaggcaaccatgatcagctgccaaagctcacacagtcgacgtaggagttgggtctgctacgcagaaatgtttcaaactcaaaatcagaaagcatatgcacactcataaagtgagaatgctccttggatgctctttgccttttccagtcgaagaaactaagaccctgagcaatgacttgatttgttcagaagcacacagtggaggcaaggtcatggaacttaggctcttgacttccctggcagcttttaacccataaagctgctctccacccccagcccatctgcgactctgggcatggcatctgtattcgacccagcttctca

SEQ ID NO: 27597 - DNA, 883 bp, Bovine  19866881255467
  misc_feature (1)..(1): n is a, c, g, or t
ntcaatatcctgtaataagccataatggaaaagaatatctctatctatatataactgaattgctttgctctacagcagaactcaaccacaacattataaatcaactatgcttcaataaaataaactttaaaaacaagaaactgacattgcaatcaggttttttaaagatgatttcaagggaaaacatgtacagtgtgggtaattggatcctcgctgagctcaccatttacatgaagttcatactctgagcctccctttttcttatagtcttgtctgtgcctttcggttcaatgtcagtaatttcttggttactaaatattttattattaccgaaataagctctggaggaataaagcttctactggaaactgtcactaaattggccattttacaaagtagtttagtgtctgtacttaatcaagtagcattctagttgcatttcagcctcccaagctttttggattcaaagtgaaatcttctttgtgaaattacattgttggcaaaactctatttttggcttctagcctcctgactggtaggaccttgtttctccccaaggaatgtttgaatggctgccagtagtaagttctatttcttcaaatatgtggctattttatcaattcaggtaaaaatagaggaatcaagccaagatgttttcattgagatatttagacttgatgatcagaaccaactatattaagaaagatagaaactaactgaattatcactgggttgcataaaatgtggatgagtcaacaaaacttttaaaaagtgagaaaaataaattctttctttcattcactttgttcagtagttaaattcgctatgaaataaaaaatgtgtctgctgttttgttttttttttttaagtggtgattggtttc

SEQ ID NO: 27598 - DNA, 3432 bp, Bovine  19866881369271
  misc_feature (1)..(1): n is a, c, g, or t
naatatacttagtttccttttatctacaaaatggtgcaattccaattccaatcaataaggtcacaacagattggatcaggccaatgtataggttcttctgcactgtgctgtgctatgcttagtcactcagtcatgtctgattctttgtgaccccatggactgtagctcgccaggttcttctgtccatggggattctctaggaaagaatactggagtgggttgtcatgccttcttccagggtatcttcccaacccagggactgaacccaggtttcccgcattacaggcagattctttaccatctgaaccaccagggaagcccatgaacactggcgtaggtagcctattccttctccaggggatcttcccaacccaggatggaaccagggtctcctgcattgcaggtggattctttgccagctgagctaccagggaagcccacgtctgcactacttgtagacaatgttcacttatgttagttctcacttagaacaccagaggaaataggaatcggcacaggatagtaaaaccaaattcttaaacccgtgtgtccagcgtcaattttagctcttagataaaggcatgggacataaatgaggcagaacagcagggaagagtcatgcctgctagggataaatgacagtatggcatgatacaaggctcatggtatctcaacccaacagatacattctattttttaaagcctgtcttcaaacgtgctgactaatcatatgtgggcccagactttttccagaggggtctgacttcagtaaggcatcttaagctgccttgatgactctgtaatgattaaataggcacatgggagctttctggactatcttttcttcatgatgttgagtctagctcaggaatagctttgagaattggtacagaaagataaagtcacaagcagggcaactggtcatcctggtaaagacctttctttttaaagtgctgagggatgcctatgctcacatcagcactattcatgacaactgagatggaaaacaatctaaatatccatcaacagatgaatggataaagcagatagggtacatacatacaatggaacactactcagccataaaagagaaggaagtaatgccatgtgccgcaacgcagatgcacctagagactatcatactaagtaaagtaagtcagaatgggaaagacaaatatatggtatcacttatatgtggaacctaaaatatgacaaaaggaacttatctatgaaatagaaacagactcacagacatagagaacagactaggaattgccaaggtggggggaaggtcaggggagggctggactgggaggctggggtcagcagatgcaaactatattatatataggacggataaaacacaaagccctgctgtacagagcagagaagtataaaccacaatggagagaaggaatatgagacagcatgtgtgtatatgcatataaccgaaccactttgctatatagcagaaattaatacattctaaatcaactatgcttcaataaaactaattaatagaaaaaaagtggtcaaggggatggatcgcatctggtcaccaccgtgtccatttacatcacagtggagctgacgctgatactaaagaatctgattagccaaaggtctggagttgcagatttttgaatcttcctgaactgactattgtctcaagatggcatactgccctatggattggcactgaaaagtgactggaacttttaaacatgacctcaactccctccatattttctgtagaatgttgtttggaaagtttagaaagggcagggaaccaaagtccgctcccctagcaaagagaatctcatgttctatctgttcaacttaggcaccccctgccctgagtcactggctagctgggatgtccctgctttttcctcccttgtctgagagtgccgatgcccagctggcctcgaacatcagctcagaaacaccctgatgaaagaaatgtgagggtagggctaagaggagcttgccaggtctctggaaaggttttcatttcatagatgagcaggctgaagcccagcacaagtgtgtacctcagaggactggagatcaaccttcagcgttgcaataaagcacgtagctgacttgtccaaaggcccgcagcccatcagtagggctgcaattacaatcacagtccatggatggataatccagccactgctgtctgtgccactgtgctatctggacctcccacccacagaccagctccccggaaagtcccacttcatagcagtgattttattctgcagaggtagaagggaatcaagcaaagagacaaatgacggtggagaccgacatgaagtatatatatatggtcgtcgtggtttagtcgctaagctgtgtccatgtgtccaactcttgcaaccccatggactgtagcccgccaggctcctctgtccatggaattctccaggcaagaatactggagtgggttgccatttccttctccaggggatctttctgactcagaaatcgaatctgcatcttctgcactggcaggtgtattctttactgctgagccacaaggggttcccatatattcccacacacatactgctgtaaatcagaataatgaatacaaaatgcaaaaggatctcagaggttaaaatctatgccgtgagctgcagcagctcaaaggtgcagggagcttgtgcatcttatacctactggctgctctgtactagctctcctcatctggttaccttgctgtgcgcttgataaataaagataagataaatttaagaaacagttttcccttaagaaactcatcactcaataagaagtgacagagatatgaataatgcagaagggagtggtaggtactatgcaaatatttatgcggtgggggaacagagaagacagaatagaagttcttagattctcagtgggcagtgagacaagagcgtacagaggatatgctagagaaaatgcagctccctcctgtctaggctgctctggacagaggtgagacctgtcatgcctctggggctctgtcacaccaggctagtcttgggagcctgagaaatcactagagctttcatagcccactctaaccaacttctggttgaaagaaatgaaggctgcgttaccaagcagacaggagcattctcaagttttcacacggaacaactactttgtaaatccaaatgcaaactccattagtacttggcaggtccaaaacagttgtcctctccccatcaagggagcaggaacagcccatgtgttttgcaggaatttctttctaagtttccccctctcatctatcacagctaaatgtcccagagcccagactaactcactttctccttagaccccaccctaaaaggtgcttaggaccagaggcactgatcccagctgatgagtgaaactgactagcggggcagcttgttaagagaggcagtcagggcagca

SEQ ID NO: 27599 - DNA, 979 bp, Bovine  19866881457662
  misc_feature (1)..(1): n is a, c, g, or t
ngaatctgctcggccaggccgggtgtcctgcaaggtcttggtgacctcctgcagctcgcccagggacaatcctcccacaaggtcgcagccctgccatgggagaagccgctcctgctcctctatctcccgtctcagctgctgatcttttgcttccagaacagacatcctggcttggagggtctcaatttctttctgcagagaatggagagagcaggtttttataaattaaccccattcatggtcgactacactgctcagaactctctctttacaggagagttcgccacctgcgtgagggccgtgaagctccccttcaaggcgggcagatttttggaggtttgctgaactggaaaaatcatgccagctttgtatttctgattagctggcataaggaaaaagcttccctcccaagcattaaataactgtgggtggtgagccaagaattagacgtggaagaatccagcaaatatgtaagccacttacttcatttcaggtgacagagccagaacacagtgcaacaaacttcagggacttgagataccagcaaagcagctaacatgaccgagaaaggaaaagcaaacaagccatggctgatctgaccccaaacatgcaaatgtagcatgcgtagaaagattagaagtcatagtttcttaagtctaaggattgaaagagatgccacagatagggttatgcagtctaaggttcataaaaatattaaataaatttaatttccactaatacggcaaaccaaatcccaagaattgagtatcttccaatcttgaggtcaatgaacaaaataagcagcaggtaattgaatgcctgttgtgcacacagtgttatggcagataatcatctcagtgcccatagcatcctgaatctccaatgagactcttgtaattaacatacacccatgttttctgcattggctgccagctataagagcacagctctatacggcgtctccccatctcacccacat

SEQ ID NO: 27600 - DNA, 1313 bp, Bovine  19866881473260
  misc_feature (1)..(1): n is a, c, g, or t
ntattaaagtccagccttaaatatgttcctttgggctgttttccaaatacaagcttggcaaatacattccagaaatgctatatggttttcctttttctattgtccacataaagaatatttacctcaaactcctgtccaataccacaaaggatatctttcacaatctatttgaaatagattttgtaagtattcaggttttcacataaatgctgagttctgcagtcattatgtaatgccaacaagcagagaggcacatggtgacactaatggtacatcgttactactccataagatacatgtattcatccaaatattcagactatatggttacaccctgagtaagtgggtatttcttttaaaggcatccagatgttgttggtggtaaggaaagcatctgaaatgtttagatgtctttaggtcagaacaagtcaattatttgtcttcaagtatctgcacactgagtcgggggaatatcccctggagaagaaaatggcaactcactccagtattcttgcctggagaatcccagggacagaggagcctggtgggctataatccacaggatcacaaaagactcagacatgacttagtgactaaaacaacgaaatgacaaatctgcatgcttatttcaaagaagacactaagaaatgagttctaaatagaaccattaatagaacaaaagatatggctgaaagaagaaatggcctggtaattcatgtatgttcattggcctgtggtttctagttcacatgaaaggcaagctttagaaagccatatttcctagcccatgatcacgtgagagaatttggtctgcttcctttgacacaccaatgttgcctaaggccaaactgtactggaaactttggaggaaaaaaatctatctgtaaaggagattgatagaatcagtgaatacctaaacaatctgtttaacacaagacttcagattctggtgatagccacataaactctaaggtccttttgcatgagaaaatgaagacagaacacttctgggggggttgcctttcaggggatgtgtcctgcgtgtgtgtgtgtgtgcatgtgtgcttcagttcagtcactcagttgtgtccgactctctgcgatcccatgaatcgcagcacgccaggcctccctgtccatcaccaactcccggacttcactcagactcacgtccatagagttggtgatgccatccagccatctcatcctctgtcatccccatctcctcctgcccccaatccctcccagcatcagagtcttccaatgagtcaactcttcgcatgaggggccaaagtacggagtttcagcctcag

SEQ ID NO: 27601 - DNA, 1173 bp, Bovine  19866881799914
  misc_feature (1)..(1): n is a, c, g, or t
ncttgtacagctggcccagcaccatctgtttcacagatgaagatgctaagactcaggaaggatgggagtcttgtctgaagtcacatggatgggaggggtcagggctaggatttgaatccctttatattgtgatttcaccttttatgtagatttatattctttatgaacctgattcctaacatgaggtctttccaccctcccttaccaccggcttactacccttattgccagccacctccatactgcactcaagagtcgagattatggaacaaaagtccactaacaacatctcttgatgatgttgagtgtcctgaaaagagagactgttttcatttttgaaatttctaagtacacattctgtatttcaggccccaaatgactatctactgtctgcaattttcctacactcagttcatcatggaacttgacagaaggttctctaggtttatcagccatgtaatattcacatattttgtattaaaacccaaattatttttggaggataactaatagggacttaccatactaccacaaatgagaaaaaagttgaattatagcaatttagttggatacaaatgtggtaacttcaaaccacttttggatattttattttcaaagaactatggctagttctgcttcctgttcaaaaatgcttaaatgtcagtgttttcctttgtagtcctataagatcaggcattgaaagtatattgatatcccagtcagagtttttgcgggagaaaccccctgtttgcctttaagaatttactaacatgccatccaattgattatgaggaattaagctgcaaaagggtggctcagatggtaaagaatctgcctgcaatgcagaagacccaggttcaatctgtaggctgggaatatcccttggagaagggaatggcaacccactccagtattcttgcctgggaaatcccatggacagaggagcccggtggctacaggccatggggttgcagagttggacacgactgagcaactaacgcttggagccaaaggtaaaccactttttcagtgacagttaccatgtgagaaattttaaaagtatcagcctttaacttttcaagtcagcgtttctcaaactggtgaaccttggaaattttagggactaataaaaaaaagtctaattagtcacatgaggcctgtagtctcaaattt

SEQ ID NO: 27602 - DNA, 963 bp, Bovine  19866881835826
  misc_feature (1)..(1): n is a, c, g, or t
ncacattcctgttggatcaaaccctggtgttgtcagtggaaataattccctcctgtcatatcatattatatttttaagggtcaattgccattttagactatgggtataaagctaccagttacaattgatttattccatttgtcaaagctcagcagatactctatgcaactaatttattttcatatactattcagatgtggggaagttcttgacattgtaaaaaggtggaagctgggttggggagcatgtgatgggagggttcattgagtggctgcatgtagatgctggaacagagggtcttctttctgaaagatccacagccctggactctgccctgcagatgagcaggacccctctgtggtggtgatagccaaggctcatgccagcctctggggtcagtgcggatgttgcatgctattggctcttcctcatcagatgtatgatttgcaaatactttctctcattcctggattgccttttcccatcagtctgccggtagtgtcctttgatgcccaagcatttttggttttgataaagtccaactttcatagttttgctttcattgcctcttttgatgtcctatccaagaaatggctacatctagtgccgtgaaaatgttgacctgtgtttcctttaaaattctgtgaattttgtagctctgactcttaatgtttctgtctctcatccgtgctgagttaatccgggtgtatggtgtgaggtaaggatgtgcattcctttgcctgtgggtgtccagttgtcccagcaccatttgctgaggagactctgctttccctcttgaaagtcttcctcttgagaggtcgttggacccgtacatgcgggtttatttctgggctctgtatctgggtctgtggatctacatgtctttctaccagaaccacactctgttgattattgtagctttggtagtaagttttgaaattgtatcaatatgagagcccgcca

SEQ ID NO: 27603 - DNA, 941 bp, Bovine  19866882104550
  misc_feature (1)..(1): n is a, c, g, or t
naatcccaatgtaaactatggactctgggggacggtgatatgtcagtgtaggctcattcattgtaaccaatgttcccttctggtggggaatgtcgatattttggggaagtctgagtgtatatgttgtggagggtataaggaactctgtacttcctgcttatattttctgtgaacctgaagatgccctaaaaaaataaacctatgaaaacaatttcaatgacaagaactctggatgtcttcccaccatactagagataaatgcatcttcattatcattaccatgggggacagggccctgggcccttggacacactgcttcccttacttagaatgctttcctcactcctcccatttccacctctaattcctactcagctcagcatgcatatgcctaagaaagcttcctctgattccctggacctggccattgaggtcttgaagtgaaaggcttattgttcattgtccatctcattaagtgaagttttgaacctgtgtctctccttatttaaactactctgtgctatccatggtgccacggagctgcctttaaaaacgggccaaggtatactgaaggtatagaccatcagcgtaggataacttcttattcacgactgtgtgcctagaatgcaatgcagagtcactcagtacatatttgaggaatgcctgagcaaagctgcttaatatttacagagtgactgcattcatttcctatttaaactgctcaaacttggaagatcggcatatttacttcatttgataaataaagaaagctgagactcaaacaagttagatgacacttttaaaaagcagtagtttggattagaatgtgtatattgtaaattcaagtccaatattccctccactattccacagtgctgatctccaacatttaaaatgtattagtcatttaaatatattatacatatttgttctaactgaag

SEQ ID NO: 27604 - DNA, 1411 bp, Bovine  19866880501510
  misc_feature (1)..(1): n is a, c, g, or t
ncaaagcaaattttcagcttgggtagaattttgtcatcttaatgaattctgaaaactatttcaagttaactctgttgctttggattagtaattcactaaatggtgccttagtggcttgcaagggtaaatatgatttcccaaagtgctgaattcactcctacactgtaactgagaggatcaaacgtaatggaaagtaatgatagtcctaactcaaagagacaacaacaaggtaaacccttgctcttcttcttcctccttgattaacatttcctacacagaattttgcccaaaacagcagtacaataaatcaaagcatgttaagggagaaaggattactgttttagcaacagattcctccttcttgacttaaatagaacaacccacccatgttagacatgaggctatttgtgttcaggtgttctatttggtgtggagaatctacttgacagctttgcttccaactttgtttttcaagaaaaattttaaagcaggtctcaccaggttataaccaccaactccctgctaaggcaagtggatttagggatggtttatcagcatggcgtacatgatgcagtgtatatacttagtttgtagaggtgagtgagcaagaggaagcttgctttgtttacattttaagctagtaattattgacaagcatgcagtttggttcatcttagatggagctgggctattctgcactggttaaaaatcagaacgggcttatgaaaataagtagcccggtgtaagttacttttaaaattagtattttttctcttttctgcttaaaaaaaaaaaacagatgcaggaaagaggaaatctgggcatgcatgaactctttcttgctgtcccgcagagaagcctgttgtggaagccagaacccagggcttttcgatggaaggtgccctcaacctgagaactacagagggtgaggcttgtacacctggtggagcatttcatgtctaatagcatgtggtgaactgccgtgaaaagtgaaattggctcagtcacagtccgactctttgtgaccccatggactatacagtccatggaattctccaggccagaatactggagtgggtagcctttcccttctccaagggatcttcccaacccaggaattgaacccaggtctcctgcattgcaggtggattctttaccagctgagccaccagggaagcctatgaattgcatggggaggggaaagacagacagacacgcaggcaggagacgccagctcagaaggctcactcactctatctgttttcaatgacacccctcagtgactgctgagccccatgatagtgaaaaacagggctcacccaggaggccagacaagaagacactggatgtgagtggttatatcagttctcaaggccccaggttgacaatatggccaggtgcaccccaaaat

SEQ ID NO: 27605 - DNA, 1717 bp, Bovine  19866880573123
  misc_feature (1)..(1): n is a, c, g, or t
ngcagagaggagagtggcttcagtaccacgggatccagcccctgagatgccccttcccaccagtggcttgccctttccctggcccaaaccctgaaggataagggggtgtgtggagaggttgtgcttggagaagtgctccttcacaaagggggtgggcgatggtagaaagcacacaggggacttctaagatctgctggtgcagctcctgtggtctggagacggccagaggcagcaggagaccctggctcccgaagggccttgacggtgacccagaggcatgacccttcatctgcctccctggatcgatgaccacaggaccccagatccaaccagcgcttgccctcggaaagtgaacagcacccccgggaaacagaacaggggcgaccacaaatcactgtgactggtggaatgagggcttgaataaaaattaaatccaggcatttgaaaagtctgtggtctgagacatattttaagtctatggttttaaaccgcaaatcagacctcacacagtaagtgcagtctggctccctgtgcacagtggcattggttgtcaacggttgcaaagagcaccaatgtcagcttcatgttaatgacctgaagacccagtctggtccggccccgcccccccccccgccctgaggaatgctgtcagtccccaggcaggcactgtcatggtgctccccctaattctggcctctgagtctcctgacaggttagtggggcccttgaccctttactgctctgtgacacctggccgactttgctacctgacctcctgcactctggactcagagttcctgggtccacgaggcctggtttcatcaacctgctgtggctgaacgtctttgaacttggtctttggacaatttgacttagagctctgccagtccaacttcaggctcatcccttaacccagaccagcccattcaagattctccagaggacacagagaagacccctctgaagtaagacagcaccccatcccctcaaagagctatttgtagagacaaggatggacctagagtgtgtcacacagagtgaagttggtgagaaagagaaaaacaaatattgtatattaacacatatatatgaagtgacgtgaaagtcgctcagtcgtgcccaactcttcacgactccatggactataaccccccaggctcctctgtccatgggattctccaggccagaatactggagtgggtagccattcccttctccaggggatcttcccaacctggggatcaaacccacgtctcctgcactgcaggcagattctttaccatctgagccaccagggaagtccctgtaaatactcccaataattttttttaatagcactgtcaagagtagcaggtaaaagggccattagaccctgaagaagagaaggtcaaactgcaggcctgaggtggaatttccacatttcacatcaagctagatgaacatgtcaagatcactaagatgctagctcacatatttattcagaactggccacagaaataattttgcatctcaaagcagccgaaagagttgagatgaataatacatttttatctatcccaatattttaaagcccaagcagccccgtgctatttgctcaaacctgtcggtgttttacacagcactctagcatgagtgttcgagtagaaatctcatttgagatgtgaaattgtttatggtgcgacacaaattcaaaacaatctaccatctatcgacgccc

SEQ ID NO: 27606 - DNA, 1975 bp, Bovine  19866880737536
  misc_feature (1)..(1): n is a, c, g, or t
naaataaaggaataaaaaaaaaaaaattaaaaaaaaaaataaataactgtctcaaaaatcaaaaaaaaaaaaaaaaaagaaagcagggcagtcaagttccctagagttctgtgggaagagtgaacaaacagactcctgcttaaggaacatggggcagaatttgtgctggggcaggtgagaggtgaaaacctgaatgaggagaggtccctgctggcgggtgtggtccgaaaggctccgggagccatcgggaggctcagccaatctctgtgggaggggcctcagggcagaggacacttggccctctgagaacagtgggcccctcgagccgactagagaaatggatgcctcttggaaggaaccttggggtcaagtcaacaaatgggaccagaacccaggagaccagagctgccataagactaaaacactgatcctagaaaatcgagttaacttctctggaccacctcttactcctggatgagagaagcaaccataatatcagggcttgcttcgcaagtttgagagtgagagaagacttaggcagaaaacacttttgaaaagttaggccgatcattgttaacatccccatgcaactggaatcctcgtgacaataatttttgcgtgtcgggcccagacgagggatccagaggaggcacagtccggtggcatctgtgcgctcctggagggagacagaagaccgctctgcatcatggcaggaagggagtttcctatttccaggagaaacaataaaaaagagctatctcttccctaagagcttgtctctgaaagacatgattctcatcaacattgtcattcaggcataagtgtatgtggtaccaaacagtagcctcagttcccctgctgggggaggacgtttccctgcccacagtaaacataaacccagataatttcacagccagtcggcgtgagtcagcaagcactctgagctgcccctgtgtgcttcccacacatgctgccattaccaagctccaaaccaatgctgagagcactggcacccgctcccaccccgggggcttttcatcaggcagatctcgtattagcggatggggctcccagcccctggtcctacagcgcttgcctttcccacctggatgcaggcaggagatgtggatctgcaggtggtgacaggtggggaaggggctggaacagacggccactgtagctccaggaatgatcagcctttaaatgacagatgaggttcaggagccatcatgttctacagacgtcagggtgatcagtgctgtcactttgttagttcggcgttcatttgaggaggtggggaagatcttagtacatgtcatgggctggtgccagacagttagctggctctgtgatcagtgttccctagaaatgatcctgtttaatctgcaccagcgccttccactgcagcccattttatggatgagaaaattcagcctcggggaaggtaaacacctttgaataaagccacagaactaatacgtgatacttttcaagatcacattaaagcttgcagcaatccaggcgttttactaatcttgtcagccctctgacatcctgggaatgaaattctctgccccccatcctcattccatgcctgtgcttggcaggtaccagcactcaataaatatttttggattgattgatcacaagtggagtgaagatggaagtgtggcatctgctgcccagcatgaggaggaaattagctggaccagctcctccgagatcctggggcttacacggcgagaggacacagggatggggaagcaaccaagaactaaggaggggagtaatgggggaaggtgacagaagtgaatcagaatgagtaaagaaagtagacagaaaaagcataggaagtaacagaaatgaagtgcttggagttagaaaacagtttgatctcgcctatatacggaatctaaaaaagtccagggcataaaaacagagtgaagatggagggccccaggggtagaggcagggt

SEQ ID NO: 27607 - DNA, 725 bp, Bovine  19866880911888
  misc_feature (1)..(1): n is a, c, g, or t
ntcctctctccatggggttctcctggcaagaacactggagtgggctgccatgccctcctccaagaatgcaattatactccaattaaaaataaattgaaaaaaaaaactgccagctgccaatctggagtgactgcctctttcttccctatgtccttgccttctgggtacagggaccagttggcaaaccaacaaaacatttattcaacagtttttgagcatccacttctggtgaggttctgttcccctcccaaactggccactggcttaactggaaagagaaaagtctggtggaaaagcaattcttacactataggattgtaagtctgtaataaggatcataatcgatgtgcaaacagatttcttcaagttcttttctggtctcctgcagtgcacacatgcacacaggattcagatttttacccatctcccttctaatttgtctaatatagttcacatcaatatgtccacaagaaaatatcatgacacaccaatgtgttcctttgcaaatataattaggtattcttctggcaaacaaataaactcctagctaatgcaaaacttgttttcaaaatgtttttttttctctctctctttttctgcctggagcaggcttacaaataaatattgagtgtgccaggaagttgctcaattattcatgtactgaactttttaagcgtatctgggaaagacaatctccttgaatttacctacttgcccaaaagcta

SEQ ID NO: 27608 - DNA, 871 bp, Bovine  19866880964969
  misc_feature (1)..(1): n is a, c, g, or t
nagtgagaacgagcctttcattcctcccaggacttgtcctctgctctctggagagaggactcctgagagcccggtggaggtcccctcctcacccggggagtctgtcctgcatggggaggacagtggcagaaatccagggcccctggtgggtgaggccagagtgttgatcaccgaggagcacttcctggacacagtctctcatggcccctttcccttctctccccatctcataaccctgtaactttcccctcacgtcactaccctggtgtctgcggtaaatcatcagagctgtgtgttgttgaaaaccaaccgtgtatcttatttcaagcagagaaagtgtagcaaaaacctccccttcatcccttcctctgggcatccatcccttggtggttcggtatctacttctggggaaggaaaggactaaacagtgctgatttaggagacaagggacctgggctgtgctctccgctgttcctggaactcgccgtgtgacctccagcaagtcagttaacttctctggctctcttatctacacagtgaagtttggggctatgattctttctaatctcccctccagcttttctctttgataattcatggcttgcaaaaccacagaaggcttcatcatttttgactgatctcattaatacaaatgaagggaaagaatctggcatttttttaagaacagcagcccagaactcagcgcgtcaccattctctggggatgggtttggtgatccccggaagggaaaagctccttactgcttaatccctatctctccaacaagccagacataaaatcctttaatcaaatctaataaactcagctaagcttcagaatggggctaagaaataactaatgtgttttctgt

SEQ ID NO: 27609 - DNA, 1005 bp, Bovine  19866881385321
  misc_feature (1)..(1): n is a, c, g, or t
ncctaaaagcaagctattctggggccactctgtgatccccaagccccatgtagcctctccaagcagctgttcattcacagaataaaagaacgaaaagtgatagcaatagagcaaaactccaattaggtggaacttgcccctgatggcttcaaattcttgatcaaacattcagcaagaaacacagctttaaaagctcccaactgcacccaataactcagaccatgaacaatgtgttgccaagtggaaagctttggagcacctgctttaatagaaataattataattcgcaaagtgattagagtcagaatctgctgcttgagcatctcccagggaataatgattgttattaatttgctttgacttaaaaatcggccttttcagcctaccactgacacggggaggctttgagtgggcactgctatttcacccatccaggacccatttcccctttttctgataaacaaagagtcagcccccctggatatcatgttcccctcattctctgtcccttgtgtggtggagctgtgtccagcttctgctccaggggtggacatgggacccaggcctggccaaatagtactattacagccattatagcaggtgtgaggtagtagctcagtaaggttttgacttatgttcctctaatgatgaatgaagggctttccagatgccacagtggtaaagaaagaatcctcctgcaaatgtgggagatgtaggttccatccctgggttgggaagatcccctggagaagagaatggcaacccactcctatattcctgcttggagaattccatggacagtggagcccggcaggttacagttcacgggatgacaaagagccagacatgactgagcgactacacgacaatgatgaaggatgcagagcatctcttcatctgccgtcttctgaatgcaggcttttaaagaaggcattgtgttgtcatctaaccattttgggaagcacttttaggactttagaaactcaacaaagcccctataatgtg

SEQ ID NO: 27610 - DNA, 1015 bp, Bovine  19866881458442
  misc_feature (1)..(1): n is a, c, g, or t
naatgctctgacttcccgtagtcttggatgtgaaaggcagattgggtaggctccttgctttcatcctctttacagaaataacagctccagagaaacattttccaagttcacagcttcttaaaggagttacatatgaaaaatcagaaaggcgtttcaactttcctaaacaagtatttaactgagttccagaaatgtgacacaaagttagaaaactccattttatttggactgaaatgtgtatcttatttatttagttttaaaacaacttaatatagtttaactattattgttatcactctgaataatcttcaacaacccaggaacagaacagtctaaggttccagtttaagaactccattctgtgtagaaacgtggttatgttagattcccttagagtttaaaattttagaatcaaatcattttagcctattaaacactttttaaaacttgcataacatctgacaaaagactgttttatgatacacgtcaacgaaactcaacaccactttctccaatagtaaaaaagtgttttttacattggtactttttaaatgacgtgaaagtaaagagaactggttgccggctttggagtcattttgcttggagaagagtattctgtgcttcaccacccgctgccacgccttacagagatagggcctatagtccacatccacgtcactcaggcaattacgggcgcaggaaggcccttcctccgggtttgaggctttctgcattatactttgtgttgttgcaaagagaaccaaccgatactcatttacaagcttctccaagagctgagaacacttcctcagagtagactcctgcaggttaacactttctcctccattgacgcggtctatccaataaaaagctgacaggctatccaaaatcaaaaggcagacagagggatgcctacagagcatcgtttccagcgagcacagggtgaggagtaactgggtgctgctactgcagtacaccaaaaacaaccgcccaaggcagtgtttgaccatctcct

SEQ ID NO: 27611 - DNA, 1017 bp, Bovine  19866881459180
  misc_feature (1)..(1): n is a, c, g, or t
nctagagaataaatgcagaccgagatgaaggaaaaaccctaggaaaactctataggacgtgccaacatttacgaaggagccaacaaaggaaatggaggagcagaggccagagaaaccaaagggagcctgccagaagtcaagaaggaagtcagttccaaggaaggcgtgatcaccaggtcagaggctgctgagctgtcctgaaagatgaggaaaaacgccatctgccttggtgagactgaggttgctagcaaatttgacaagagcgggttctgtgtggtgatgggaatacaggctgccatggaaatggggatgaaatagactccagacgtcacccagctcaagccttctccacagacacggtgccgcggagaaatcggggcctctcttcagggctcagactgtaacttggggtgactgtgaatgctcagccttcgccactctttaggatgtgtgaaatttataccccaagaggccaaaagccagatacgccattcatcacagcacaccactcagcacacaatagccatgcgtgttctatcaggagtcactgatctggggcccactggatgtatgggtttaagagagaccatacgcaaaataatgtgcaaatacattctctagtgaaagggaccatagcctttctcagattctcaataggcccatgtcttcctctcaaaaaaaaaaaaaaaagagagagagagattttaagaactttgttctacaccaaagaaattgtacagccggctcaccaggccacaagagcccttctctgagatcacttccctgtgaaagcatcatctatcatcacccagggcaccaagcggcagctgcaccacagtcagaaaactccaaatggtccagcagcccaataaatcacccgcccatcagatcgaacactcccttttaaaggctttgattccaaggaaatgtcacttccaggcatggagcttcagaggctgataaatgctagatgatccatcaaatcatgtgaggacagagattcagggggccttagcg

SEQ ID NO: 27612 - DNA, 867 bp, Bovine  19866881553858
  misc_feature (1)..(1): n is a, c, g, or t
naatgcaggagacttgacttgtatatgttggagaggacccagaagtcagaaaattacagaagaatacactaaggccccatgcagtaaattgccccaaatagccttcagggaattctgacccatatgaaatgttaaagacatgaattctgtgactattcacaaatatttcttagtcttttaaaaagagatcctttaagaaacttcaaaatacatgaatggaataaaaaattactaactcctctgcgtgtcagatgcactcaacacgccaatgactgcaagtgttgctcagagtgggtggtcactctccctgttgtcagggctcaacttaacccaagagcactcttgtgatcctgggttctcttttttcctctgtcactctcaacaaacccactagtcaatgcaattcatatcattaaatcaatgttcttctgggcaaccacttttaagttgctttcttcacctgatttcctcaaaaaaaaaaaaaaatcagatttctcttctttcattagatgatgctattataggtggcactaatggtaaagagtccacctgccagtacaggagacgcaagagatacgattttgatccctaggtcaggaaggatcccctagagtaggaaatggcaccccattccagtattcttgtctggaaaattcaatgggcccaggagcctggcaggctacagtctatggggcagacctgactgagcaactgagcacatgctcttatatcatctgtggactgattacagtcagatttgtatttctgactctcacctttcctctgagccctagacttgtattcctgactccttataccagagctccacctgagtgtctaatagagatattaaatgatcaaatcaaa

SEQ ID NO: 27613 - DNA, 1123 bp, Bovine  19866880356133
  misc_feature (1)..(1): n is a, c, g, or t
ngacatttaagaaataatattaaaggatgtgtcaccctggatctagaaaacaggtcatcatcagtttcctccagtagcaaaatcctccaggaggggattttggaatcaaaggggaaacattccctggttagcttacctgtcttgccttccactaacccaccttcccagagcactttcatcctgtccgtattcaaatgctaccctggaaacctcactgtaattcctcaacctaagatacacaaacatctagaactaaccaattctgtagcagacggataatgctactactaaaagtctctgctggaattgtagaatattagccagaataagagctgggtaaaggcttacaaatttaacccttcctttgtgttcacttgcacatgatgattttattaaaatgacacagtgttttcatttgccatgaaatctcccatctcacagttctaataggattcacctcactttatctgataggtgagattttaggaactttcatgacccatagtccaaactagaaacgataattccaaactataatgacactttgtgtctgattctgcaactccatggactatatagcctgccaggctcctctgtccatggaattctccaggccagaattctggagtgggttgccattcccttctccagggaaccttcataacccagggatcgaaccagggtctcctacattccaggcagattccttactatctgagccaccagagaagcccccaaatatgctagttgctcagtcgtgtccgactctttgcaaccccgtggactttagcccaccagactcctctgtccatggaattatccagggaaggatactggagtgggtagccattcccttttccaggggatcttcccgacccagggattgaactcaggtctcttacactgcaggcaaattctttaccatctcagccatgacattattccttactgtggcttaaaaatcatctttcaaatataacactggagtgcagatatgaaaataataacagcattaataaatgatggctgtcatgctatttttttcctccaaataacctccattttgttttcactctcattgctgtggcatgtgagggttttgctcaggttccatgggaaggtg

SEQ ID NO: 27614 - DNA, 1776 bp, Bovine  19866880407031
  misc_feature (1)..(1): n is a, c, g, or t
ncattcctcaaacaagtttgtgaagaccttgaaacggtgggtcctttgtagtttttccaggaagtcttagcgtctcaggagtctactgattttggttctgaggggaaacccggtaaatatttctgttttattattaaaagaatataaaattcacctttgttctgagaatctggacaaaagagttatttctttgaattctagccagtaaatttgtggtacttaacaggaatcttttcataggtatatttcaaactatcatttatcatgccccaaaatattatttccatgattcaggcgtggagaagatggttgaggacaatttttattttgctttttcttttcaggggactctacatagctgttatattttattacaaagacaatatgttagtcaccaatgaagatcaaataccgattgttgaaatagacgactctcacaccagttccattacacaagattttctgtggttcacaaaggtatcctgagttctaattttattcttccccactttgcaccaacagtacctcacataaatctctaaaactttagttgagaagttgaggagtctccagtgagcaaaatattggagtgggagtaaatcatctcaatggtctctttctggcccaatatgccctttgtcattaaaatgctaaaatagtgtctacactacattttcaaagcaaagaagcctccatcctgtcagattgtgtctccactattctgagttatgggatcatttggcaaagactaaaatggggatctgattgtttcattaacattcagatctttttccaattggacagagatcaaaaagttgttttgcatgtatctgaaaatggactggagaacaaacatcgggtgtcgggtttccttccccctgctttgctttgatgccacaacctaaatcatgcactggcttggatgatgatgtgacctcgtgagttcttttgcagctgtcctgtatgtgggaagatataaggtggttgcggcaaagtgtacctatctccatgtcctcatccacagtattacaaactcggcagaagatgcttgcagcaacagcccagctacaggtgaggggctaggtttcaacacagacctccaaggaaattttggaaacacatgtcagttaagttaccggtcccacctggaaagggaaagggtgggctccttgctggtttagatccttagacgtatgaagtcttctcggatactctgagcggtacagctgtctttgtagtgaacctgtgcttttgacactctcctgggggaggaacagaggtttatcttgaagaatctagaagtaaacaaggagtaaagagacctgaattctggatctgatgttaatcggtcaactcatttctgctttctggatctgagtttcatcatttgcacgataagagtttgcctagctctcttgatgagttctggatgttttggtatcctgtggatctgtatgagtgtacagagatggaaaaagagaccctcagatattttaaagagcttcttcgcttggtgttatgggaaaacaaatctatctgcatacatttttaataattaaaaaacaaaccaaaaaaaaaaaaaaccaaaaaactcttaaagacttatctttcattctgaatttaacccttctgtactattaacccaatcagatcatatctccaagccctgcaagaatctttgtcggttacagagctcctcttagaaatgacattgaattctagccaggcatttctgggtttccctttcattgttctgttttgtttcaatattatctg

SEQ ID NO: 27615 - DNA, 1260 bp, Bovine  19866880418648
  misc_feature (1)..(1): n is a, c, g, or t
nctcccaggactcgggctctgctgaggttcagttgttcatgccacagacataattcatttcaaagagcaacaacggcaccttaactctggtgctggacacccgaaaggaaagaaggcgaccctctcctttctccttcactgttaatcccgtccctgtggttactgtggctcctttctctgggtgcagcaagaaggaaagaaaaagggtcacaggttgtttggaaacggttcttccaacctagtttgtgatctcatttgcacattttcattaatgtcaaactgtctccatggctgtctcaagatgatgggtctcccaaggattttgccagagtggtgtctgcttcacaggaattcagagagcagagcttcttttcaaatgttatgagaggagctgccttcccacctactgccctgaaaacttgcaggaaaatgtttgctgaagttctgaggtgaagagatgaacttgtgaatttttacctggctcgtcacacagtcactccctcccattcccttcatccccctaccccaccctcaaaaaacagagcagggaaataatggagtcaatttttctttaaagccctctaacgagccttgacgactcacacttaattgtcttgaaaataaaataggtgtttgggtttctgcggagggactggaaccactaaagcctcagcagaggtcctaaatggagccagcccgtcggctctgggctccagatgaggaataggatgctccagagagaagaggagacgctctgggccctgggaggtctgtgtcagggagggcggcctcagccgtcctcaactctctctgagaaggttctcagagcaagcatgtctttgcacttgcccagcatttaggaaagataccagggtactttcgagctcttccctacagaattccactggcgctgttctggacatctctctaccttgaaatgcctatcagaccctttcagttaatgattcactacctaggattttgatcctttggggacccatgcaggaagagacgtgcttctcagaggtattcccaatatgtcagaaacacccactagagttacagaaccaactgggttcagaccacagaggagaactgacgcctatttaattcaatttctatcaactcaggatgtttctgttggttctgtggcaacggcagttctttttattaataacaaaatgaggaaatgatttctcaataagtgtatctggtgtatatccatcaaactatggacttggagaggaaaggaaaaataat

SEQ ID NO: 27616 - DNA, 1827 bp, Bovine  19866880429771
  misc_feature (1)..(1): n is a, c, g, or t
nagattgggctttggtgcattttagtccgttctgtttttcagcccagtggtgggtggttttgatgagggtatcactttattttgaaaacaatctgatttctctgtagatgccggagatggaagattaaagtgtcatgaaacagtacctatcacatacctacaggcatgcatacaaacactcccatctgcacacaaaaagctcctcaaactggctgctccctcacctcaccaccacacaggagcgctgaatcatttaactaaccctggaacaaagatcctcctggaataggagtcagccctgccctgcagcccagtgctgacttaaaaactcttttcaacatgaagaaccttaatgccatttccagctttacttgtgcctgatagtcactttggggcaagtcgttgcctctcaatgcactgattttaatctttcgctgacttttccttaaatgcaaaaatgttttatgattgcgctctctttttaagcagatttacatacaaatgacataaagtgaaaagctctctccccttctcacctcacccaattaccccactcttcagaggtaatcattacaattaatgagttatattttagagattttccccttcacataatcccttcatagagaataaaaacaaggattctagggctgaaccagtctagactttgatcagaataaagttttgtttttgttttcaatagaatctgtcttaaaatattgagggcctatgatcaccatagggcttccctggtggctcagctgtaaagaatctacctgcaatgcagcagctacaggagacctgggttcaatctctgggtcaggaagatcccctggagaagggcatggcaacccactccagtattcttgcctggagaatcccaaggacagaggagcctagtgggctacagtccatggggttgcaaagagtcagacacgactgaaaagacttagcaaaaaatgatcgccatattctttcaagtatttctaaactcaagtataagttcaaattggatttttaaactgcttgagacccttgatggcccatgataagcccccagtcttccagccattagtcctcaaaccccagcacttgccctggtcagcttgttacagaatttggaccatgttccctcctcacactgccccaagtgtcatccagcccatgccccctcctcactcagcctgaggagtggccctttggtcactggacattagatttcctaaaaggtttttttggatcctccacccgcactacaacatttctgtgcttcatcatggcacttgacatcctgacttgtaatctcgcatttatttttctttattttcccaacggtctttgaaagtatccgcaatcagggtacctgcctggtgactacatggagaaataagacctggatgatagcaggtagtcatagcaaatcattccaagtctgcatggatgcttggctggtgaggagacagaggtaagggctaggaaaaaattcagagatgtgagacttctgcgtttaggcagaaacagtggctggaacctgtgaatcaccctactcacatagcagtggttttcactgtatttttcactccattgagttcctgtctccttgttatcttgagtctttgaggggataagggaggctagaccatattatctcaataaacatctatcgaggcagcaggatgagaggatgtggggggagatgtgagcttaaactgagatgggtgcttgtgtgtctgatgggggagggctgtgtgtaaattcctcatggtaggtggctaagagggactgtctccaggaacccttacagcctggggagcaaaggagggccgg

SEQ ID NO: 27617 - DNA, 1405 bp, Bovine  19866880445160
  misc_feature (1)..(1): n is a, c, g, or t
nggtgtcagttattgtgttagtcattcctcaaactggaagctgaaagatgttccctgtagtgtggggaattattgaagaagtggaaattacatatttcatatattattagcctacctttatacagagcctgtatacatttatatcagcagctcagattaagtggaaaatcccatctaaacataaagaatttgaaatcagacagcatttatttagcatctgctgctgctgctactgctgctactaagtcacttcagtcgtgtccgactctgtgcgaccccatagacggcagcccatcaggctccaccatccctgggattctccaggcaagaacactggagagggttgccatttccttctccaatgcacgaaagtgaaaagtgaaagtgaagtcactcagtcatgtttgactcttagggacctcataggctgcagcctaccaggctcctctgtccatgggattttctaggcaagagtactggagtcgggtgccatcgccttctcctatttagcatctactgtgtccaaatccatatcaacataacagtatagggtgggagagacagagctagatggccttccccaggggcacttggcagaatcttggcagatacagctgacagttagaaaaaaggatcatgttcattgttgagcaccaaaccttaagaaaatgagaaaagtcattctgcgtcctcttaaccctagtgatgccacctcgggagaagctgcttgctcacactgccttgagccctttaacgctggtctcatttagtcctcacaccacacctctgagtacagtactagtaccctgcccatttcacaatgacagaaacaggctaggaagacttcctagaacctcctggcattcgtgatagcccttcaaggggcaaatgagcacctctaattccagttgccctttgccaccagtaacgtcttaatttttagaggctcggagaatcctcttatagctaaggaaataaaaccacctccacctcaagattccaggagttaagatctgtccgccatgtgtccccatctcctgtcctctcctggctttacagctttttttattggataattccttcttcacatttgaggcatcctaactgttcatttctaagcctgctttgctaagagactaccaagatgagagtctgagctatggaacgcactgcaatgggattttgtacttacctggctcccagactcatctaacagaggccaatcggcggctcccatctcttacaatagtttccagaagacaaaacatgagagctctgttccatttttttcctgggattctttatcttgcatgagcatcagtaatcaaagtggcatttactagcttagcaaatgaataaacctttgctttcccacaagttcagttgtaggcgtcaggctctctga

SEQ ID NO: 27618 - DNA, 3543 bp, Bovine  19866880517870
  misc_feature (1)..(1): n is a, c, g, or t
naatggactggttggatcttctgcagtccaagggactctcaagagtcttctccaacaccacagttcaaaagcatcaattcttcagtgctcagctttgtttatagtccaactctcacatccatacatgactactggaaaaaccatagctttgactagacggacctttattggcaaataatgtctctgctttttaatatgctgtctaggttggttatagcttttccttcaaggagcaagtgtcttttaatttcatgattgcagtcactatctgcagtgatttcgaggcccaataaaataaagtctgtcactgtttccattgtttccccatctatttgccatgaagtgatcggactggatgccatgatctttgtcttttgaatgttgagttttaagacaggtttttcactctcctctttcaccttcatcaagaggctctttggttcttcattttctgccataagagtggtgtcatctgtgtatctgaggttattggcatttctggaagttctcggttcatgtactattgcagcctagcttggaggactttgagcatgactgctagcgtgtgaaatgagtacaattgtgtggtagtttgagcattctttggcattgcctttctttggtaccggaatgaaaactgaccttttccagtcctgtggccactgctgagttttccaaatctgctgccatattgagtgcagcactttcacagcatcatctttcaggatttgaaatagctcaactggaattccatcacctccactagctttgttcgtagtgatgcttcctaaggcccacttgacttcaccttccaggatgtctggctctaaaggagtgatcacaccatcgtggttatctgggtcatgaagatctttttgggataggtcttctgtgtattcttgccacctcttcctaatatcttctgcttctgttaggtccataccatttctgtcccaaattctgccctttattctgccctttatgcaaacatatctttgcatgaaatgttcccttggtatctgtaattttcttgaagagatctatagtttttcccattctattgttttcctctatttctttgcactgttcacttaggaaggctttcttatctctccttgctattctctggaactctgcattcaaatgggtatctctttccttttctcctttgcctttcactttgcttattttctcagctctttgtaaggcctcctcaacaaccattttgcccttttgcgtttctttgtcttggggatggttttgatctccgcctcctatccatattaggaacctctgtccatagtttttcaggcactctgtctatcagttgtaatcctttgaatctatttgtcacttccactgcataattgtaagggatttgatttaggtcatacctgaacgatctagtggttttccctttcttcaatttcagtctgaattttgcaagaaggaattcatgttctgagtcacagtcagctcccagctttgtttttgctgactgtatagagcttctccatctttggatgcaaagaatataatcaatctgatttcggtattgaccatctgtgatgtccatgtgtacagtcttctcttgtgttgtcagaagagggtgtttgctatgaccagtgtgctctcttggcaaaactctgttagcctttgccctgcttcattttgtactccaaggccaaacttgcctgttactccaggtatctcttgacttcctacttttgcattcctgtcccctatgatgaaaaggacatctctttttgatgttagttctagaaggtcttgtaggtcttcatcgaagcattcaacttcaacttcttcagcgttactggttgggacatacacttggattactgtgatatggaattatttgccttggaaacaaacagagatcattgtgtcatttttgagactgcacccaagtactgcattttggactcttgttgactatgaatgctactccatttcttctaaggattcttgcccacagtagtagatataatggtcacctgaatcaccctcatgacctcatctaaacctagtcacttgccaaagtcctgtcttcttcaaacaccaacacattgagggtttgggttgcttttaaaggagactcaaggcccagaaaatgccatgaaatggataacctcaggcagaggaacttgcaagtgctttcaggtgatacatttctagaagtggaaatgctagctaaagagatgttttacattctgaaagctgtaaccaaagctccctttgagagtttggcaccaatttgtacggccatcagcagtgcagaaggatacaatggtagatacttcacattagaattatctgcaacatttcttaaaatagccagctttcttggtacttatgacttccagttagattcacgtgccattttcgagcagtcaccttactgactagatccagacacgctgcctggagcgtacgtgctggcttctgggccagccctttccctctctgctggggaactccatggggacatggttgctctagcttttcctacaaggcctgaggtgggtctggtctggaaatggggagccaggcactctgaaaggctttcccacgggtctgtatttcacgctggctctccaacccctccaaagatcagtgcggggtcatgccggtcctcaggggcatcaggaggtgacagtcgtaggggacaacttcttgaacacagaggagcttgtggaatctcgatctttgtattttggaaacaaataactcagccaccttggcaaagaggcagggtgcttggacgttaagaccctttgagattcttgaactcctcctcctccctgcagttctggatgtcaatctccatccatctacctttcaaatctgtagttggcaaacccagcctatgactcacgtgtggcctgcaacctcctgttgtaataaggtttgttggaacagaagcagtgctcatgttcagattgtctgtggctgcttttgcaagtgttgcagtcgttagatcgcatggctcacaatagcttaaatatttatatctggccttttacggacagagtgtgctgtcttctgctctaaatgtcttttgcgtttgtcctccttccttaacagttcagcccatcctgcctgggccactgcagtagtcagcaagctggtcaccatcggcgtgagccttctgagtgcagatggaagggtggcaggcctgcagatgtctccatttctactggtgcctgctgttggaagtggtttgctccctaagatcctctgagtctgcaggctgtgtgcagtcacctcgctgcatcatgtacgtgtatgttccatgaatactctacagtccgttaattcacctggaacatggagctaatggcatctccctagtgtttcggttgctgtcagctactgagctttctagacatgctgcttgctgtctcacccttggccctggacacgtgctggttcccttgccccaaggaccttccgggtgtccctggtaaactgccactttttcacatgccttttcaattctctcattagcaaaaacgccttcct

SEQ ID NO: 27619 - DNA, 1657 bp, Bovine  19866880533460
  misc_feature (1)..(1): n is a, c, g, or t
naaaatggcacacacatttgtcagggcccagtatttgactgcaagtctctcatctttggaacagtgatacttctaagctgttccttcagaatcatctcttcttggacttaagtcccatttcaacgctttccagcttcaaaaaattcattttatcaagatatggagtggagtaggttaacccaagtctgttcaaggtacaatcaaaggttaaaaggaaccagtaattttttaagcaaagtatgcatctttaagcctctaagagcagagtcatctttcaaacttggaccttaaggtggctatgttccaatgacacatcaaataatcaagtccccatacttctttggagactgccttcagagtctgctgtatatcccttttaaaccctacaatatcttcttttgacaacataattaattttgtaaaagaatagccacaggtcagtctggtagggaacaagatgatcagtcaagctgggtaatgtaatggctctttgggttagaagagaagaaatagctgagactttggggggatgtattgagatgtgcgagtgttttcttattatcttttagatctctgtcatctctagtgatgtcccattctgcattcacagtactcatgggcgcctttgctcagtttgtcttgaccaatatttttgtcagtttgtcttatcttgaagtcttttcaaaaatctaacttggaagtacgacccacaaaaggaaaagaaaatgcagccaatccccttgtatcattcattgactgagagggaaatttccagcagaagttgcaataaaaggttttgagcaagtgtagtagatctgttctgctaacactgagactccctgcaaaagtatgtccttctttcaatcaacaagactagcacgcaggtgagaattaatgagaagatccccgccttcaaggaggccatgagcaaagaactacctcccatgttgactacttttacagaaacaccactgatttgtctctaactcatacctttcattttctccatttgctaccgggacgttacagtctcactaaacagcagtgtgctctcccccatttcccagattcccttgcagttagattgtaaccacatgactagttctgaccaatgggacatgggaggaagaatgccatttccaaactcagtgatgtaagctcccagtgtggccctccagctttctccttccaggctgcagtggtcatacaatggcatgatacatcccccagataggaacatctgggaccctgaatcaccacccagaagagaagtacccgagagagtccctaaactcacactggaaagttcagggggtgagagtgagaaatcttggtaggatgaagccaccgagtatggggctttctttgttaccacaactgaggtttcttgtctaaaattctgaaataacaacagaggatggcaacatggtgtagtgggaagatcaggggcttcagagtagtcccaacctgggagaagttagtgacaggcttagaggctgctcatcagagtcatttgcagtctacaaatctccaataagaccaataattttcctctgacagagcagacttactgctcctggagacaggaaatgagaactgatggcctgccttggactctccccatggccaacttgaccacagaccacccgagtttttg

SEQ ID NO: 27620 - DNA, 806 bp, Bovine  19866880570194
  misc_feature (1)..(1): n is a, c, g, or t
ncctgaggaggccgagcgactaggacctgcccccgaggggccacggggcctgcctctggcccatgctgccagcctcccggaggagcggaaaagcagcctccaggaccctaggcctgcggtgcaccgcatctacgtggaggcctaccctgcagccctggtggacaccaaaccctgggccgccttgagtcctgccatcgtaggccactcgggcctgcccagcgccgcgggcccagagttgagcccagaggaccctaccacctcccctgtgtcagagatactcagcagcatgctttagggaggtctacagttggctgtcctcttttcactgcgagtccctgcattttccatccccgtactccagtccgcctccacccatgttttcacccaatttaaactgctttccaggttaaaaatccaaaggttagaggttcaaggtcctctttttttagagttggagtggaggcaagagtggccagtcttatacccagttcagcctataaaggacgtaaaagagttttggtgtcaacatggagtcctggacacaagagtgcaagcataccatcctgatggcgcacctgtggcggaggtttgttgttcagtttctgaggcgtgtccagctttttgtgatgccatggactgcagcaggccatgctcctctgacctctaccttctcctggagtttgttcaaagtcatgtccattgagttggcaatcctatctaaccatctcatcctctgctgccgtcttctccttttgccttcaatctttgccagcaccaggggtcttttccagtgagtccacttttcg

SEQ ID NO: 27621 - DNA, 1989 bp, Bovine  19866880573333
  misc_feature (1)..(1): n is a, c, g, or t
ntttaccagatgggtcttgtctctgctggggtcacacatacacttcttggtaggtctgcttaggtgactcctctgatcttggttaagcattcgtatgtttggagatgggtgtgctttaggctggtatcggaaggctgggctggaagactggactttaaaaacaatcccacagcaggttaacttaatcatcttgtgagactatcactgtttcatggtgatagcaaagaggaactagaaacattcaagtggtttttctttttttttccaccattcttctttcccattggccaaagcaaaccatatggccaagaccagaatcagagtagaaggagaccatgaagttacagggcaaaagatggacatggggaggccattaactgaccattaatgaaggcagtctaacaatatgctagattctctcttctaacaaacagctgctgaaatctggaaaaacagtaaggcagtcacttggtagaggtcactttgtagtcatgaaagaatgcagttattggcagaaacgcagtgctgaagcagggaggagcagcaaagaagtatcctacccactctctctctgtctgacctccagtgtcctactggtgcctctcaatggccaaatccagcctgaagacagccagtgaaagagtctggaaggcacaagccatagaagtcaggctccctgggcagagggtgaatctgggtgtgtgtgtcaagtaggtcattcttactttaattgtaccactgaaaaagaatggaaaaatttgattcatgattccaaggtcaagaacttttgagatgggctcgtttctaaacttggccatgctcaacaccctccctctctgttacttcctccctccctacattggttaggttctctgagatgtagatgctaaggggatggtgagggagaaaggggagggggccaaagcaggttgggagagccattagaccatgatccaagtctgacatctgtgaaggaaagaggaataaaacttggatatgtagaatcttacatggcattgtagttctaaaagagtttcagccaggtcagtggggagttcttgagccaaagtccacatcaaagggatcccacattccacaggaactgtggccttagttccctgaccatgcttactctttggctgaaagcagtgatggggtgcatggtcttggtgtccactcagaactcagcagctgcatctatcagctgctgattatgctcttggtagcaggagatctgagaggcacattttatggcttttgcccctttcccttctacccttcctttcttcctccctttctcctttccttccttctctttctcccttccttctctcttttttttctgttttttttttttttttttaagtgttgtttaagttccagccttagtgccaggtattggtgatatacaatgaatatggcaaatatgatatctgctcttatggaacttcattgttcattcttctgtaggactttggggtagagttctgttgaaataactgaaaacattcttgatttcaaggaggaagagagacttacctagctccatgccttccctccctactttattatcccacagagcctggtcagttgcctcatacatcattaagatgaccatatttactaagttcaaaaccagcccattcttattcatgacttttttttttttttggcagaaaaagtcgtaaacaagtatgaaagttaaattgtagttttttttatagttttaatgaatcccctttcaagaattagggcaaattcgtgaaattggactgatcccaggaaacccaagttatatgtcaaacatagcaagtaggctgacttaatcagacttgtttgggtgaaaaaaaacaaattcattcaaattattcaaaagttcgtcttaaggttacatgtgtgtgggaacttgggggaaagttattcagttggccttgggaagatcaagaactccagcagaatctgggccacacagagactgaaagtggaatt

SEQ ID NO: 27622 - DNA, 785 bp, Bovine  19866880661714
  misc_feature (1)..(1): n is a, c, g, or t
nggtgaggtcagagacaaaggggagggaaggtgggacgcccgggcagtgtgtgcgggcgcccgggcccagccaggttgtccctggggaggccgagctccctccgcagctaggaagagtgggtcctccgagcctcctccgcggcgggcccggtggcgctgcagtccgtgggcgcgtgggctgtctgctgttgccctgggggctggttagccggtttgctcaggagctgctggccgggttctcattgccaggtgagctggaggacgaggaggaggaggaggaggagaagctcaccacagccaggcccggggggtcagtggccgtgttctgtcctgtgaggctttttcggcagacggggcagctgtcgtgctgctccagccagggcacgatgcagccattgtggaagaagtggttgcagggcagctgccgcacatgctcacccagcccatagtcatccttgcacacggggcactccagccccgagccaacgtgctcctcagtcacgggcacggtggggagggcctggattttctctttgtctgcgggtgggggacccgagttttcaaactgattaaggagctgcgtgatgatggcgtccaggctgttggccccccaggtgtagtccatcgggtttgaatgcaggacgccccagggacccaggcccaggttggggatggtggccggggtgatgatgccgttgaccagctgctggatgatcccttccagcgtggggtcgccttcgtgccggccggtggcccgccgcgcggtgaggcgggcgcagggctgc

SEQ ID NO: 27623 - DNA, 2478 bp, Bovine  19866880751050
  misc_feature (1)..(1): n is a, c, g, or t
ncctccgtcgcccctttctcctcctgccttcaattttcccagcatcagggtcttttccaatgagtcagctcttcacatcatgtggccagagtattggagcttcagcttcagcataagtcctttcagtgaatattcagggttgatctcctttaggatagactggtttgatctccttgcagtccaagggactctcaaggcacaacaatccaaaagcctcaattcttcagcactcagccttctttttagtccaactttcacatccgtacatggctactggaaaaaccatagctttgtaagtaagcctttaattatttaatgaataattagaataagtgcaaaagttgtctaataattgaatggagcagagttcaaaaccacctctataatagcttccttcttctgctgttggtcatcttgtcacttaacttgttccctcttagagaaaagattgaagactgatacttcagggaaccttactactatgtgccaagtattttgatttgatttctcaggcaaagctacacaacagttatcctaactatttgataagtggtacatgtatactgaaagaggttacataacttgcccacagtaagacagttagtaagtcgaggaatgggaatcgaaacacaagcctggctgactacagaaccaagaaagtgtaactacatcttgctgcttcttgggtgattatcaaagtacatcagcagcatcctttagcatcagcttctaaaatggagctgtgatttactaggtttcgttaggatttgaatttgactgtgataactccattggctacatagaggaatttttcacaatgagatcttagctgcaacgcataatactcagaggcagtttttttaaaagacactagccctattcgatttactccttgtgagatttctaaagaaggttgcctgagaaattagaatcactcgtatgtggaatataaaaaaaacaaatgaacaaaacccaaaataaatgaacaaaccaaaccaaatcagaacaaacatgtagatacagatagcagggtagtggtttccagaggggaaggggcagggggagtgtaaaatgagtaaaggaaaccgactctatgatgatagataaaaactaaaattttggtgctgggaggctgtagtgtatacagaggtagaaatataatgttgtacacatgaaacttatataatgttataaaccaatgttatctcagttaaaaaataatttttaaaaaaggaattagaaccacatacttattgattggttattgattttccttccagcatgtgagaaatggcaagaagggacccgtatcagttctgctcactgttgtaaacctggaacccagaactatatggtgtggaccaaacatgtaagttgctcagtcatgtctgactctttgtgactccatggactactgcccaccaggctcctctgtccatgggattctccagggaagaatattagactgaactatatggtggtactccatatttaacgaatgaaagtgagggtaatgaactccccatcgggtagacttctgcatctctggattaggattccaggcaggctgggatgatatgtgtgaaactgggactttggggaatccaaagcatggtcctgtgaaacagctggagaaaatgaattcagactatggagaattattctctcccactcagttatatttcacattcctcccacacaataggccccaaatcagatggcaaggagcatttactcaaacttcaggccctttttagttgcaggcaagcatcctctaacttcccaaacactccatatggtggctcctatcagcagcagactgtgaaagagactttatctaccctaaggcctgagtcttcagaggtttgggacccggagtcaacatcatttagctctcagaggtggagagaagcagaaagaacccaggctttctttggagcatggcctcttgagactgaaagaaacttaaatgtccttctcatttgtcacctgaaaaacatggacccaaagtcatccatttcattagtagggagagtccagactcaaactcgggtcttcggacagcctctaatctaaaattattttacccaccctcatccccactcagatagctgtgtagttagagagccagcacaacacagagagggagcagacagcagagtcactaacctcatgaactgtctggtcaccagaatccttagctaagtaaaggacaaagagaaggacagatatgccctctgaaccctgagggacctgtgtgtgagtgctgtctgagccaggcgaaatagagctctggaataacataaatagcaggatgttgaagaagcaatacaggcatggagtcaaaaacatgggtttgaattctgagccagctccctgctagttctacaacttctgccaagttcctgaaactctctgagtctcagttttgccatctgtaaaatgtagacccacctcacagggttatgtcatcaatta

SEQ ID NO: 27624 - DNA, 1752 bp, Bovine  19866880768234
  misc_feature (1)..(1): n is a, c, g, or t
nacccatggacgacagcctgccaggctcctccgtccatggaattctccaagccacaatactggagtgggtagccatttccttctccaggggatcttcctggcccagggattgaacccaggtctcccggtactgtgggcaaatgctttactggctgagtcaccaggttctccaggtgggctgcccatccagagagctggcactctaaaacttaagctctttctgctcgtcatgtgcacctgactcagatgctgggctgaccttcccaacctggagaaggtcgtccctctggagacatttggaggaggaggagcagcagtggctggtctccgagacccagcctgtgcctggcagggaggagagtgcttatcttggaaacaccctgggcccctcagcaacacccccccacccacctcagacagctgtcaggcctctggagactctagaagggtctccttgacattgtgggtgaagaggtctaactactgactaactgcttcattcaggaacacagaaaaaagataattatgactagtattttaaaaagtgatttgtgtgatatatatacaatggaatattactcagccataaaaaggaatgaatttgagtcagttctattaaggtggatgatcctagaatctattatacagagtgaagtgagtcagaaagagaaagataaatattgtattctaacacatgtagatggaatctagaaaatggtactgaagaatttatttgcagggcagcaatggagaaacagacatagagaacggacttacagacatgcggagaggggaggaaagggcgagatgtatggaaagagtaacatggaaacttatattgccgtatgtaaatagatagccagcggaatttgctgtatggcccaggaaactcaaacaggggctctgtatcaacctagaggggtgggatagggagggagatggggggacaggttcaaaagggagggggtatatgtatacctatggctgattcatgctgaggtttgacgggaaacaacaaaattctgtaaagcaattatccttcaataaaaaataaattaattttgaaaagtgatttgaatactgggaggacggcaatctggcatgtcatgggtttcactaggttctagttccaggtccagtgttaatcaggtttgttactttgggcaagtctctgcacctctctggaccttggtctccccatctctaacgcgggaggcctggagcaatggcagtcacttggcctctctaatgtccccaccgcgctggtcttctgcgcctctgacctcagttgctcctggtataggcttctgttcctcactgttgaatcttctgtcaagtctgcttctcataagacagcagcatttacagaaaagcatccctatctggtgttcacaggcttttccaatgagatgccagtaatctctggggttatctctccccgttttccttctctgtctgggtggggacaggctgagtgctctttggagaagcacatattaataacagagacttgtgtttgctcagggttttagagcttatgaaggcattaatattatcagtcacacagctgggatggggtaaaaagcttagcgtcaacatcaaagtccctgcttttaacaacccacattacctatgtcttcaaaagatctccttaagttgaagttggaattaaccaatgttcattaaacaaacccccacattctgtttggatctgatttaaaaagaaaaagccagaaccccttctcatatcca

SEQ ID NO: 27625 - DNA, 2923 bp, Bovine  19866880838702
  misc_feature (1)..(1): n is a, c, g, or t
nccagacctgctatgatcatgggacatcaagtccatttcctaagggctctgagattggatcatgtcatcagctaaacagatggcagtggtatctctctcgtacagttgtggggagtgaatgagatgacccaaagagcatccagcacagtgcctagcatatacattctcgctatgattttattattcagaagttttcttaattcaagtcattttggcctcagaaatcattccatgcaaatataaactctggatgtgcctacctagaaaagcgggagtttaagtcatgatgtaacataacagttctgttgaaaagaagggactgggctcaaaactggagaagaactgaatgtcttatgagaacaagtccaccttccttcccagaaggcaggcttgaggcagagatgttgaggaaagtgcccttggtggggaagtcaagcacatctccacgtgacattcaaactcaggtaccagcctcatctgctgtcaccaaaggacagcgaggcaggtggcgagccaggaaggaaaaccccttcctgccttgttctctctcactgctcaagccatcacttcagttcagttcagttcagttcagttcagtcactcattcgtgtctgactctttgcaggcccatggactgcagcacaccaggcttccctgtccatcaccaactcccagagcttgcctgagtgccatcacgattaccaaggcaactacatagatagtctagaaatctaccacaaggactctgattcagcaggcgctactgtagattctgatttagtgtgctttggataaaacccacagatctgtattatgtatacaaacatataatatttaatttataatatttatagtacatattttacaattgaacttttattatcattcacaattcaaaatggacaagcgtaaagataataaacatcctctctcctgccccagctcccttccctggaaataaccaatgttatctttgtattcttccagaactgttttattcatatacaaagatacatttattttctcatattttacataaatgtggatcagcatcttacggttttcagagtacaagtcttttgcctccttagataggtttgttcctaggtatttcattctttttgatgcaatggtaaatgggattgtttctttaatttctcttgctgatgttttgatgttagtgtatacgaatgcaagagatttctgtgtattaattttgtatcctgcaactttaccaaattcattgatgagctctagtagtattctggtggcctcttcaagattttctgtgtatagtattatgtcatctgcaaacaatgacagttttacttcttttttctgatttgaattcctttcatttctttctcttctctgattgccatggctagggcttccaaaactatgtaaaatattagtggtgaaggtggacattctaccttgttcctgatcttagaagaaatgctttcaggtttttcctattgagagtgatatttgctctatgttgagtctgcacacccgcttagaactatagaatatactggaaggagcactgtgcctttgggtacagagagagtgggaataagtcctatttttttcaggcttcctgtttttaagtcacagcacagctccaaatgcctggaatgtaggctttagttctctctgccaacacagtccaccaagcacagacttttgtcccagaaaacgacagtcactactccctgtaagctcaggctgtgtggaaggggagagtccttgggagaaacacacttgtaaaaagaaaagtgcattttacatcctttcctccataccctcaaagaagtccaaattaattgtatgaatttaaaagtggctaatttttaatggaaatttaatctctctgtttccccagtgaaaaagtagcctgtttacaaagcaagaaggtcagtgtggtaagtgtaatccaatcatgctttgtaaatggtcatcttttccctggactattgtatataacacagcttttacacaagcttgttaaattttagatattcaagacaattgactctaaaacctttgattgccttggttatagtttctcatcactggttaagactccataatctaataacagcaatttatgtaagaacttccaatttactatggagaagaattagtagataatgactctgcctaaagaaagaatgtgtcatgagctaagtgagacctaacgagcgtggttgtttccattctgaatccctccattgtccggtagcgtaaactacccatgctagccttagtctgagaacagtctgctaggagttagaaaagattaatgagaacatttgcaaaaactcaagtcaagccgttttactggggagtagagaagggttgattttaatccattatccgtgagcttggaaggaaatcagtatttgcagactaccaaataagaaatatgtgatatttcccttagtctctcaaaatgtgggcattttccccttggaaatgggaagggcagacacagccttccctcctctagttctctcacctatgaaaggaagcccggattcatccggcttgctttttcattatttgaggctgagaacttggagtaaacagtaggggagggtcacgttctgaaagtttaagtatggtcagaggtaggagcacagaaaataaggccagcttcgcctgcctgccgacctatccagctttcttttctttagttttaggccacaagtaacaatcaattaatataaacatttaagatatttaaaattgatatgtagcaaatattagtgaccaactatgaaccagacagtttctctattatgctattaagatacgtgtgaaaactttaataacaagtttacagaatggttcattttatccctattttgcagatacaaaaccaagctcagagacataattacctgcctaaggctat

SEQ ID NO: 27626 - DNA, 779 bp, Bovine  19866880841147
  misc_feature (1)..(1): n is a, c, g, or t
nccccccgaccctgtctaatatgtatccatgggattttaatttatggaggtgactgagtgataacacagcagagtcagtgctactgaagagaggaatttattatttacatttcccaagagaaaggagaaggccacgccagggcaggactccagggtgccaacagctggctgtgcccgggaggcgggggcaggagtgagatgcttccatccgggcctccttggggttggagggcaggctggtttggataactagaggctgtgggctctagggctgttcctagctgtgtagcgcctgcaccagggatgatttagaccagagaaatgtggcctgctgtgggagttaagtttcaaatacatgttgacttatttaaaaattttttgttgaaataaaattcgcataaaactcaccatcttaactatttttaagaggttttagcacattcgtcatatttcacatgttggtttttgacttggacttttatttttgaaaggaaggaagaatattaagccataacccggagacccagcaagtagacatagaaattctttcatccttacctggtgagtcttctagaaagatatttgaaagcgtaggctcttcacctccgcactggtttctgaatagcttctatgcgcaggagccgctgtcttccttggccgccctggttatggtgccctctgctgcctccgtcagcgcagagggcctgggggtgggccgtgcggcgcttcggctagtggggtttcgtgtctgctgagagttgttgggtttgttccccaaa

SEQ ID NO: 27627 - DNA, 1147 bp, Bovine  19866880861983
  misc_feature (1)..(1): n is a, c, g, or t
ncaatttcatgtgtgactatcatggtatgtcatagagggttgttacttccagtgggcttcatgatatagaattaagtttagggccatttttaaagaattattttaatggaatattatataggaactcttcagaaagttatgggaagggggctcatttgttctagttttccagagacagtccctggtaagccagtgtcctaggctctgtccagttagcatccactcttactgtcaaaagtgttctgatttttatgacaaattatgttttcatcctagttatgggggagaggtcttccagaaacccagtaggagggaattttttgttattgttggctagcttttgttagacggagaaggcaatggcaccccactccagtactcttgcctggaaaatcccatggacggaggagcctggtaggctgcagtccatggggtcgctaggagtcggacacgactgagcgacttcactttcacttttcactttcctgcactggagaaggaaatggcaacccactccagtgttcttgcctggagaatctcagggacgggagagtctggtgggcttccgtctatggggtcgcacagagtcggacacgactgaagtgacttagcagcagcagcagcttttgttagatagatgccaggcattgatttttccacatttaatgcattttctcaattaaccctaaggatcattagaggtattagaggtaatccaagtcccagagagattaaataatttgtgcacattcaaaaagcaaccaagtggcagagtcaggattagaacccacgtccggcaaatcccaaaacctgtgcgcttagctgatgcatacttgttttcatcctctgtattagcaagtggtctgagatgttggacttcagtcccagctgcctgaaatcctcaacaatgccagcgaagcagatgaaacctcaagtggccagtggggcttccttctgggggaactctgttccctgggtagggaaaataaggtgtgtgtacttatctgagtatttctgataaccccaagggacaccctgtccattcctcattagtagagctgcctgtttacagccaggctgagattttttttttcccaaattaaagtataacgaattcgctaagacttcattccatgttgccctgcca

SEQ ID NO: 27628 - DNA, 1336 bp, Bovine  19866880864557
  misc_feature (1)..(1): n is a, c, g, or t
ntaaatttatttacagatgaagtcatgaaaaattagttgagtctttttcgttttttctttctttttaaagttgctgtttagaacactcaggactgtgttttgctgcagatttgtcatggttaatgcatgttgctgtagcagtcaatcatgtactctaaatactgtcacacttttttttaaagcctcagtcatgagccatgacagaaaaataaacaaacaaatatagagctaaaaaactctttcactgagaagctacactatgcagaaccccttgggaaggctaaaggaggccagaataaatgataatgtaagtgctgtgggtgtagggaagcaatgatgctgtatgaacacagaggttctggagaaaaaaaaaaatacacattcccacacgcaggcgcatactcctgtggaaaaattggcaatattagtagcctcaaggtgcaatttcctgaagcagtgagattgacaagtcagtactaaatgctgttaatttaactaacttcagattaatggtagagtcgctatgactgaagccctcaaacacagtctcattatagccttgctgggaaggtcctaaatataggcattgacagtttaaaacaaattcgtatacatttgtgtatttttagacataggttaggcgtcagagtttgtgtcacagttttcaggttgattaattgacccagtaactgcaccctttacccactccccccaccttcttccactccaaattatggacaaaatgggggaattgtccttgctaagtcattcagtgagctttttattgtgagcctgatgtttgaattgcatgcatgcgtcaacacttgggcgatagacacatgatttataaaaataaatttttctaatactatgaaatcccccctattaatttttatatccacaacagttattactggtgtgaattccaggtggtatttcagatggacagcttctcttgagctgtgcttggctccccctgaaatttttcctgcttttcctagcacaacacattttgtttctagacttttcctttattcctagactgaagacttgatgctgtttgagttgtaggggtaaaaggactctgaatctttaaaataaagcattcacctcttcatagaataacaagaaagatacagagaattttatggccgagtaagttttccaagatgggttagctacatgtgcttctcaaactgagacatctaacttacaacacagtatggtggtggtattgttggagttcagtgggtatctctgaagtctcagaataaatatgtctgtctttcaggaacattgaaatttctaggcagattttgatgaaagcaaattattt

SEQ ID NO: 27629 - DNA, 797 bp, Bovine  19866880928050
  misc_feature (1)..(1): n is a, c, g, or t
nggatggcagagtagaagggcagagaggtatccttgaagaggtcattgaactactcaagcagttcagtcctgaagtctctctgcctagcacttctccttttatgaggaaatctattttccttattgtttacgccagctgaaacctagattttctgctcgctgcagcccaaggcagttctgaccagctcagagctcaagggagatgaggagattagattagaaggggacaagaagcaggattcaaatgggtccaagtctctgacccaatgactcatatcccgaggtgtggaaagaactttccggtgggattgggagccactgtcagtatgttttaagtgattgtagagaatagaaggtggtgccaggatcaggaactgcacagagattattctgattttcataaagaagaaaaaagatagtttctggaaactccagacaaatgattttgaggtagatccttgacaacagaatggactaaggagcagatggtgggtgagcatttaggaaggaatgcaatggtcagtggagaataaaatgacttcactgagcacaagttattccaaactaacctcatttcctcttttgataaggttactatgtttgtgcatcaggtgtatgccctaaacattgcaggtcttgatttcagcttagggttaacagcttctctcatggtttccttgtggctaagatggtgaaatgtgggttggatgaaagtcgtggttttgtgtatttgcagctggctcaacagctgaatccaagtgttgactatttggatggatgtcacagcccatgtgctg

SEQ ID NO: 27630 - DNA, 1916 bp, Bovine  19866880935387
  misc_feature (1)..(1): n is a, c, g, or t
natgtggaggaacatgtgaagaaaacaagcagattcatttgttttaatgaggtcagaaaggaataccaaacatcttggatctccaaggtatctgcttccttccagctgtccacggttttcagctgggtcctgaaatggagttcaggacacccaagacaaataagtaattctaaagagcagtgccaggaaaatattagagttttaaaaaaataaagcagagattcatttattttttaaatatatacatatcttcctataacattcctgacatgaaagaactctagacaattctgcctccacctgatcaggctcaagcacctcagggcctgctgaacccaaccttacaagcatcaccccaacctcttttttttcctcttgacacgattttcttgtgtccactcccctgtggacacaagatgaattgtgggatgaattggttctcttccgaacacagtgggggcgttctgcagtgctgacgctgttgtggtaagtcaggcctccagaactattgggtctgaaatcctctccaaccctggcctttagaaggccagttccccagatggggcagctctggcctgctgtctcctgccttgagaatcagcccggggttcacagaaggagaccccagagagctgtagggttaaccaaccaaccataaacattacctcctccgctgatcttcaaaggctcaggaaaagaaaacaaaccacataaatctttatcagggctccttacgactgccccgggaggtggctcctggaagagctgggtggtgactctgtacagaggataaaaaataatttcagttagcggtgctgagtcagagatggattgcttttatttctcttttctcctcttttctttccctccctgactcctcctattaaaatgacttccttttgtcatttgccggccaggagttctgtagtgacaatcctcgatcttctaccagcttcctggttttccatagctattatgaagggggttacagagtaggaagtatgagatggctaccctgctgaaaatatttcaataacacaccttgccatccgggacaaactctccaaatccactcccagcttctatacatgcatacataacggcggggcttgtatttaaaagcacaggaaccaaatgctactcgtgatgctcagggaagtcattcatcttctgcaggcctcatctcctcactgtaagagtcacaagtttggtggcttatgagccacctagtaactccgacttagcacgtggctgagttcttgtctatcatcttaaacacagaattcccaccgcaactctttgagactttacacatcccactctacagatgaggaaactgagccttggagaggttaaggaactcactcaaggtcacacaaacactgggataagagcgcttacctcatagacggctgaggagcggatgagataatgtctgcaacgtgctgagcatgactcctggcaccttgtgggttctcattcagagagcacactctcatctagaaatcttccctgaccttctccctccctgaccccacatacatctctaccagatctccgctcccaggtccttgctggtctcccagccccgggatttctttggaggtgaaggaagatgtgtctcacctctgcagtgccgaccagtgcttggcacatagtagggacagagtgaaagtcaaaacaatgaatgaatgaatggtatgaacaaacgcccagttagtagacagttttaaaaaaaaaagtagtcaaaataaatactactagtaaaatgactttttctaaagatggttaaagatctgaaatttcctggaggagcttgtggtgctagtggaaaaatgtacaaaagggaacgaggaacgaagtcatcctctttttttaaataccagctctcactgtagtttaagggcttcacagac

SEQ ID NO: 27631 - DNA, 895 bp, Bovine  19866880994353
  misc_feature (1)..(1): n is a, c, g, or t
ncttcactcacaaacatggatcaagcacctaggagagtgtaccagacctccgctccaggtgctaggactaccttaatatttgcttattaaataaaatcagtaaagagaactgtgatgtgagcaagccacacagccagagctttagtttcccaaactgtccgttggggtgactatggctccggtggggaaaatgggctccctccctgggctcctactagggaggagagagcagcgaggtcttcaaagagcacactggtcagagaggctgtgatgttaggtgcatgcaaggcccgtggaagcctcgggtccttgcaaagaaatcaagacggtgcagaaaaggagggtgaggagcctgcagcaagggggctgagagtgtcccctgcgggtgcagaagcaccagtaagggtccagcttcagggcatcagacatcgggggtcagagggcttgaggaggggcgtcaccatcagacagggattgggcttccaggcaggcagctctgaagtggcgaagtctccatccaaagtcttctttatctccagactcaaccctgagacaaaggaatagctaaacactgaagctggagtctgagtgtgggattttttttttttttttctgttcggtgcccagttatttgcctgttcgccagccctgggataagacagaatttatgtctcaccaaagaggcaccaagaagtgaaggagacagagacacacagagagagagagagatgattatgcagagcattttttttttgttttgcttcaaagtgtctcctcactagaatgctgccgcactgtctccggggagcggttcgccctccagaaaatatgacactttatttcctgcccttgtttgttaacacaccccattaccatccatctcagtttcatgtaa

SEQ ID NO: 27632 - DNA, 1439 bp, Bovine  19866881011500
  misc_feature (1)..(1): n is a, c, g, or t
naataaatgctggagagggtgtagagaaaaggggaaccttcttgcactgttggtaggaatgtaaactgatagagccactatggagaacagtatggaggttccttaaaaaattaaaaacagaactaccatatggtccagcaatcccactcctgggcatatactctgagaaaaccataatccaatgtatctttttaaaactatagacttgccatctctgtgctacctctgtattatttgctatttactaaccctgatgtgcaccctccagtctatttcctctacctggggagtcttttgtttctttctctgttgatctaaattgtatttacattttaaggaccgactcccatgtcacttgccctgaaatctttcccgcctgatccaccaggggagaagcaggcacacctgcagcctgttccataaccagctccccagagacaagcacctgttgccgtgtcccaccgcagtgccacaatggaagcactccaccatgtctgttgaaaccactagcaactgcagccccaaaaacataccttgggttttcttaagttgtagtatcctttatttgttacttgaactttccatctaaaaaataaaagtttaaaaaaatcagtaattactaacaaattaattgtcagttaattataattattaccaatcaactctggatgtctggtagataaggttcttctattaaaatagctttcgggaaatgaatacatttaaatgactatgtaaatcttgagaggagtactcagcctaacttgttacctaacctatgatttacataacaacacaatatacagcaacaaaataaaacaccagtgtccacacataagtacaactgacatagtcttttacatttaaactacatttaactttagaactacacaagtcttcatttataattcaaggaatattcccaaagctcaagaaatcacttttgagggtaagtataacttacctatctagtttaactccatctgcctccatcacgtttcttaagacttgtgcaactgggatttctcccgcataacctgtaccccaccccaaggtgttggagagatcattgcctgttcccagaggcaagaccgcaactcgtggaacgtatttctcttgtccctacaatacagaggattagttttagatttttctcttcagactatttggagggtaataatatttggtaaaattcaaagcccaaagcaataaagatacaaataataactactcaatcacaatattcaaggttggcaaggtcttctaatattcacctgcatgataaaaaatataaccacaaatactttgtaactttctttggaagtgccttctgtgagaggcaagggagatcttaaggatggataccttaattttcttttcgtcaagggcatccaggacccagccgacagtcccatcccctccacagacaagcactcgag

SEQ ID NO: 27633 - DNA, 1761 bp, Bovine  19866881120297
  misc_feature (1)..(1): n is a, c, g, or t
ncattgctctttgccttgatccccacccgggtcaatagcatctactttgaggtggaccatgtgagggtggaggtaaagcagctctttctcaccagaatgaatcttggtcagtcaaggaccggcgtagaacctaacagctgggaaggaatctagggcccagccccaccagtgtggctggcataaggcgcggaactggtgggctgtccgcgcccaggctggtgctcagcgtgtacacttggtgctcagacacttgatgggagggttaagcatgtggagaaactcaacctgagtctccattgacaagctgtgtgcccagctccaggctgtatcagatcacaggaaaccacccacaggctggccaagcttggcggttatctctagggagcactttgctgtgaagatgccctagaggctagcacaggccctgtctttgccacagcaagccagcttgttggctgggccatgggatacaaagaaaaggtctaaaacaaacaaatggcaccctcccaagtttgagagcttggcaagaggcctggacgaagcacccaagccacatggacttgagttgcagagtccaaagcccaaagaatgtgttttgcgggggtggggagtcagttgcatctcaggtcgttcttatcatccctacatcacccctagctctgaactgaaatgcctgtggcttgggacaaacctgaccctgaccccacaccacccacttcccctgaagcctctggctaccttctcctttaaaaaaaaaaaccaccacaaaacgcaccccccaggaagcgttccacgtgctgctatcatgggggctccctgaatcactgccggcctccacatttcaaagcggagccggaggagtgcccggtgattcctgggtgccaacacagctcactcccgagctctgatctatggattgttttgatttccccctttgaactcttcccaccctgctccagcggcagacagagatactgaattaagcgacagacacgttggagacaatgagcgccaggggccccccggccctccccctgtgcccctcccctctcctcccccgaaatgtgcagacatctgctagctggagccgggcgctgcagtcataaagaagagctggcaggagagtgatgtacagcccggggccctccccagtgactggcgttaacctccaacggagaggcgctcaccccgtttccgaccgagccctttgtttcacaccagtctgcagaggtgcctcggccctggctgaagatttaaccaaattataatgaatgatgctcagcagctctgtgcccctaattagaacaagtcgcacagacatattgtctccctggtttcctctgtcccatttctcgccctctgttttctctgctcacgacacatgggccccattaaacattcttgtatttaatgtggttcccttaaattacttctcaagttttcgagttccatttagaattggattttgctctttggactgtggttttgatttggggttttgtacatctcgccaccgctccttttctccacctagtggagatggcgggcaccacccagcagagggtacatccagagcccccaccagtcaggagtgtgaaccaggacccttgactcacccgagacttcttttgctcttttcttggaagaaaaagaacttaacccaaacatacactgatgtccattttgtgaccttcgccccaatcgcttcatccccatcacaaggaaaggcggtgaagaccttctaggtataccataatttat

SEQ ID NO: 27634 - DNA, 1495 bp, Bovine  19866881133359
  misc_feature (1)..(1): n is a, c, g, or t
nagggcttggcaccccttagtattcttgctggtagcatctcatggagaggagcctggcgggctacagtccatggggtcacaaagagtcagacacgactgaagtgacttagcacgcgtgcaccggctgactacaaaagtttggatcgaaagtctggatggtggtaacataactggtaagcactcagtcagtatgtggaatggacaaatgagtgataagacctggaaatgagaatgagcacacgctgggcagggccttgacctcttgacttctctgcacctcctcttccttctcttgtatgcagtgtggagaggactggatgcgtgagcccggcgcgagtgatcagcccagcacccggctcctgggaatccctcggtcaatattagctattatgattagtggtggaaactgctttttaaagtgagcccacactcgccgcctggaaggtgattgcatttctccgtctccactgagtggcgggaaactggttggtcaggagctgggaagtcttgctctgatttcaggatccctgtgactttctctcaaggcagaggaatgtgtttcgagaccccttgcagccgctcctggatcccagtccctcctccgcagttgaggatctttccgcccatcctttaccagctcgctgattcagggaagggctgccagatacagggatgaactttcccccggattccttgctgcctcccttcagaagcgaaatgccgcagtgctaacaaagtgtctttcaagcgaccagaggcccagaccgtgggctgctgcctgccagccagagagctgtttcccacccccaccccgttctgggggcaacggcaggcggtcccagccgcccctctctctcccctccgctccgtgttatctatggggattgggaaacgttatcaaaacaggccccatctgttcctgaagtcgtggaagaatactcgtgtgataaatttacagggcgctggaagaccctctaattttctgggaaacgacaaggcctctgtggccaccttgtgtaaaatttcctcttttatccccaagttacatgccctggactatttacttggagtctgagggtatatttaccattcaggcaacatcacaaggtgtcaaagaaatctactcagagtaggatgtgttgggtgtcttgcctttctaaaaatgacagtcagctattttttttttttttaatacatctttttaggtgttatgttcatagtgtaaacagttcaggaaggacgcgggtagggagtcaaagttcaagtcagggcagacgtcctgaacagaaacaagactcaatccagcagctctgccaagacagaagctggttagatattggattccctctgtgagttcttcctaagcctgttattgctctatcgatctgctgcgggagcacctcaaatatttgaagcctgagtgcgtcattcagaaccaaccctggacagccacactgaggagaggatttgccagtagctgaaggaatgctttggg

SEQ ID NO: 27635 - DNA, 2077 bp, Bovine  19866881250757
  misc_feature (1)..(1): n is a, c, g, or t
naagttgcttgaactgcttaataagtagttgagatggagattaattcctggctttaagattcccagcatcccaggctgttcacttgtctatactgcctctgaggacccccaaaattaaagtttatttcctattccctatcagcgcttctatgggaaccaaaacagcatttttactggccacactcacctggtgccttagctaatgaatggaatttggctagactgcccagcccagcaccagagcattatgaaatcttcccttgatccatctagttgtgccgtttctaacctttcaggccaaccatagcacaagaggaagagagagggagagaggaatatgcctagaaacctggagaaagatcaaatatagtcatttctagagatgagaagatctgtcttgctaaagcatgaacccactccacacttgtgagttttaaattgggaactgacgtgaaaactctgaatctgggaattctgtttaggtctggcaacatacgagattggagccgcttgcattttttattttaaattccctgggtagttcgaggagcaggggcatgcattactttcaaacaagaatctttattgtttgcatagcacacagtcttccagttaattagaaaaacatttttttcccaaattaaatttccctagaaaaacaatgatttaaattaagggcaaaaggcttttttttgggggggttgggggagacactagtaaatccttcctgcacctattgcttctagaagactaaaagtacagttggaattggaaggctatattcaattctttattgtgagattctgccatccataaaaataatatgcctctacttgtatagcttatgtactgtcttagtttcgcctgccatatgacagactacctatagatacagacatgatgagattctaaatgttcagggttttgacaagtgcgtaacactgcaaaagagtacatgtgtcagcaacaaaactcagctctacaatctgatctatttgcttctgtatctcctaacggctttcctcttatggctctcatctgaattcgtactttctctcaatcctctttgctttctaaataaaatatataatttttgtgagtcttactactactaagagttctttctctttttccaagcgtggcatgaagtgtttgttgaaggaacaccagtctttcagaggcccagctgccatcagtttaatgtcttcagtgagattcaaacagcttcacctcttgtacttttttggtctcttaaccagaggtgcctttaagcacctcttaaaatttcttcagtaatttctgcagtttggggatgagaaagtctaaatgatctctactactggagttactagaagtataagtaagccgccagtcccagatcatatagaaatcactttttttttcttttcatttataggatctctttccttagtagagtcatctactggattttcctaaaacattaaattaagagttaggaaggtctcagatttatcacaaactacaaagtacaaaatctccttatgtcatatctaagattaggtgatacgatagggtgttttagatagatagggtgttttaggtgttttaaattaaagttaaattttagatagagaggcagaaggagaaagtcagagcttggttccaaccatatttagatcagataattccagtgagtgctggagttgacccatatagcttccaagagctgattgttaaaatttcaggaatttttccagctagaagttaaacatagccatcattaaaaattaaattgtataaacttatagttaaataaattgtgttaaaaagacagtaaataatcaaaactcatggcttcctaatttactgcgttttattattagttatgctcttaagattattgatacatgttttatcagtatggtagaaataggatataatgatgtactactacacttatctccccagtctgtttactgacatcacattggtagcttcaaattggggtgtggtgggaatatgtgccagtatagaagtcagcaaatgctatgaaaccaaagcttgattttttattttgtggaatgtctaaaccagg

SEQ ID NO: 27636 - DNA, 1813 bp, Bovine  19866881354172
  misc_feature (1)..(1): n is a, c, g, or t
natagaatcctctgctaaaatgtttgtatcatatttattttaaaatgagagatatattttttttacttatttattttcttcactgtggtatacctgtgtttagtgtttacaatgtgttgctttatttaataagttaaattgatcataaattctgctactcacagatagaaatgtaacctaagtaataattaaaacccataattcttctgatagatatattatctggatattcttattcttcagaaatattccgagggtgctcttctgctgctccccagtctgctccctcaggttccacagcgaggctgccccagggggcccccagcctggtatttttaggacagatggcccatttgtggatttggtggtcttttatgccattaatctctgaagaactagaatgtatcttccaccaaacaccattagctccccttaaagatctgtggatgaatctgttgtctattatgagttgccagaagcttaaatttcagtcaccttcaggcccaggccatgttttgaaggaacaactaagaaatgtatacagtagtagtcagttacattagaatgcttttattttgcttaaattaatctcttcccagatctcaatgtgagcagctaaattctagtattgtaagattttgtgagaagatctgttttcaccttactcacacaccattcacagtagctacctgtggtggtggttgggagagtctgcagattttctttcatgggctgatcatgttttgagtataatgagcttcattgtttaatttgtgatcagaattgttaccgataccacattttacaaatatactgttagattcactttgctttaggctatattttatctataattcatagtagtaattatagaataatcaaagtaaatagttaatagggggtatcagaattaaaataatcaaaataactatatagtttttttttttacttttaaaactgtattctagctataatgttacattggatttagaacagagtcatataaaacaccctcatttacttaaaaacaaactggtctttcattttcataatccactgaagtttgaccttcacgaagtttatctgttaaccttattcactcattcagacttaatttttttaggaaagttacttcagaatatcatatcatataacatattttagaaaaattctctttttaggcacatttacccagcatttcaaataaatggataggcatgtaccttgttttaaataaatacaatttataagactcatgtttgcaagttatatattagggtagcaattgttgacattaccagagagtccatactttataaaaaatgatttgccatagaatttttctgttccatttcaaactattctgatttaaaaatagtaacttctaaattctcaggaagaaatatgtgaagtaaagcttgtattcatgtctgttttcagatttctccttttattctaatacaattcctagctccttgcaatcttagtaggttaaatactgaatccctggcagcttcttagggatcccataagtagatgatgagaattttcagtgcttttttttgtttaatggaaatcaaactgacttgtgttgtaacatacaagttgccaaatgataagattacatgatcttaaaggtgttctaggttttctgcaactattagctgtgaaccctattgtagctaacgtttatgaaattttatagtcaaaattatttatttttatttttttaggatgtgtcaaaaacgtgtagtatttgctttttgaaatgtttgcctacctagagctggaaaatatactgtgactcagaaat

SEQ ID NO: 27637 - DNA, 1080 bp, Bovine  19866881354338
  misc_feature (1)..(1): n is a, c, g, or t
nattcttttccaggaagggagggagtggcagtggcctaaaatccctgggaaactctccctcggtgccctggctggcatcctggagattttcccagcttgttctgggaggggtatcccactctaagcaataggttccactaagtcctataataaataagacaaccccccaagaagtcaaatatttagattcccactagagcagggtttccaaaggtccatgaacttacaaaataatatttaccactttcatacttaagccctttttcatctctttcctgggttagcacagttataacttgctctttctcttgatttatctcctatctcccttgctcttgggagttatagtaaaaatttacataatttacaaattctttgctaaatctagcatgagaaatacagtactggactaatacaagacaccattcaagacattattgttctttattatcaatgcaattctcacagcaaaatcttgaagtttctttattactggtttgtattattaatgagtcacctcttaatacgttttctagctattctctatttaaaagtgaaaaagatttcaatattaacaccttctgtttgtaaggcacttaaactatgtttaacaaactaatttaatccttatagcacctatagaaaataggtaacatgattacctatatgctacagataaaggggctaagttgggaggggctaagtgatttgttcaacatcatatacacagtaaggagcaaggcaggacttcagcctaattttcagataattgttctttctactacaactgtgctgactcaagttaagagtcaccaaatatgaagcaaaatgaaaaacacaaaatgaagttaaatgatgtagatgattgttttcagactatttctgtggcagattaaattagatcttttcagactgctttcagtattgtttttaggaagcaatcaaatctcactctttaagctttcagatttcaatatttgtttcagtttcaattccatgcagcattctctactgagactcttgtacgtatcagatatagcacaagaggctaataatacaatatagaattcacactctact

SEQ ID NO: 27638 - DNA, 1512 bp, Bovine  19866881484628
  misc_feature (1)..(1): n is a, c, g, or t
nccacttatactccagtggttttcaatttcaggtttcccattcattcattcagaaagtacttattgttaaacccctacttatggagcaagcactgtcttggtgctaaatgtatgagacataattcataatatgaaaaatgtatagtctagttagtaattcatgctctagtctctcatctagtcatgcatccgtttactcattcctctgacacatatttgctggagactgtgtgcaaggcaccatatcaggcatggtgacaaacacgttcatcctctccttctctaccttctttttaactccttttatcacacatatgccatcatcaccactgctaagcacagaaggaaaaacaagcccagcaattttggggacttacatgcgcgtgtttgtgtgtgtgtggttattttagggggagaggtgagagggtttcaggtgggtgggcagtggtatctagttccatggggctccttcaaggagacacaggtcccattcagggtgggatctaagaaggcagataacggtttccgtaagcacaaagtaaacctttgagccatgactgctggggagcaatgggataagctgcctcatgacttggcgagcttctcaccccagtatgtggtcagaggtcaggcgatgagctgccaaggacagcacggaagagatgctgctgcccaggagacttctgatccctggtctagggtctctttctattctgagttctcattaccaaaacaatctccctggcaccttctaagtattcagaaaatacttgtgaaatgaatgattaaataatccttcaaccatgtattgaaccttgaggttcttgaaagtacaagctgggccttattcatgccttgtattcccagggctccagccctctccagggcaccagggaaagtctgaaagcctttgtattagaggatacccaagctcccttctaaaaattctagacagaaacatcttcttgtggtttagttacctggcagactctctcagcaagcctagcatcctttataggcatactcagtcatcttttccttaaactccaagctttgttttcttcccagttagcaaattgctgatccatctccccccactatgaagccttatgttcccagggaatttgttttgctatcagctagaaaggcaaaataagctatatagagaagctgaataacgccttcccaaagcaaacagtaagattggcttctgtgttagctctctttggagtcatctgtgctgtgcccctctctctggtggcacccgtcctcataaagaggatacatgattgccgctggagacctagtgagtgatctgtggcactgtgggccagacaccactgcctgaagagagcaggaggcaggagaagccagagtcgacttcaggattcttgggccccaggccacaccgtaattcaggtcatcgcactttgccaagggaagcttatcaaagaagagaacagactgacattttccggccctttttggtttgctctcggaatttgagcttgg

SEQ ID NO: 27639 - DNA, 1244 bp, Bovine  19866881494642
  misc_feature (1)..(1): n is a, c, g, or t
nttctttctttcaaagacctgctctactgctattcccatggctttctgtggaagcttcctgcgggctgggacctagttcatgtgatccacttggtgtgatgcccacacagttatgttaagcttttagtgagagaaatatgttaggtttgtatcagtttcctgtggctgctgtgacaaatgaccacacaccgtgtggctgaaaacaacagaaatgtattctctcatggctttggaagctgtgagggtctgaagccatggtagtcagctgggtggcactccctctggaggctctaggggaaaatataatgtcttgcctcttactggtaatggcaccccactccagtactcttgcctggaaaatcccatggatggaggagcctggaaggctgcagtccatgggatcgctaagagtcggacacgactaagcgacttcactttgacttttcactttcatgcattggagaaggaaatggcaacccactccagagttctcgcctggagaatcccagggacgggggagcctggtgggctgccatctatggggtcgcacagagtcagacatgactgaagcgacttagcagcagcagcagctgctggtggctgtgcataccttgggctgcatcactccagtctctgcctctgccttcacatggaccctcttctgtgttttttaaggacattcgtaattggatttagggcccacctggataattcaggatgatctcatctcaaggttctgaaatacctctgtgaagactctttttccaaataaggtcacaggttctgagagttaggacacaaacatgtcttttggttggccaccgtttaacccgctaggtgtctgatagtaaaaatgtctagaagcaagtgctaagggggttgtaccgctaaactctttccagcctgtagtcaggtcaaatgctctacaagaacagtttgcactttgacaccacagcatacagatagtgactagtgagtatatgaaggtatgctttaagggctgacattctgatattttgattgagaatcacattttaagactcagtcttaggaagagctggtgctgatgtccccaggttgagttagttgctcagttctcttggctcataaaacattttatttatatctctgttactgcatttatcaagatttattataaattattcttttatatttttatctctctcattaagtataaactccagagggcatgcaccgtgtcttattcagctcgcttagtaaat

SEQ ID NO: 27640 - DNA, 1326 bp, Bovine  19866881531022
  misc_feature (1)..(1): n is a, c, g, or t
ncacaaaggaatgtatgtgtctatcacctaaggaactacagctagaagtataatggagtggttttgaataccaaaatcaaagtgacactttatgttcttcccatgtagtatgtgtgtaggcatataaacatatattgtgacacatatacataaatacgtgtgtcatatacatacatacatatgtacaagtatgtgtgacatgaagtgaaagtgctagtcgctccgtcgtgtctgaccctttgcatccccattgattgtagtccaccaggctcctctgtccgtgggcttctccaggcaagaatactagtgtgggttgcccttcccttcaccaagggatctttcccaactcagggatcgaacctgggtctcctgcattgcaagtagactctttgctgtctgaaccatcatgtaatcctgcatatgtggcatgcccgtatatacttgttggtcgattctgagaaagcaagccatgggaaaggggcaagcagtactggtctgagcactgtgggtttccggtgaccaggctgcagctttaagcggtgcctacaaattcgttcttggaagccagattgcctgggctacgatctactactgtgtcatgctgggcaagtcatttccctccctctccaagccttcctttcatcatctgaggaactgagatataataaaggtggcctcgtcaggttgttgcagacatgaaatatatacatgacaagttaaaaaaaaaaagtgctttctaaaagggtctggcacctaataggtgctcaataactcacatccattactattattctggaaattgctttctttttaaacttttggaaaaatcctcccatttccgagaccaggatgcaaaaacaatactaaatactgaaaagatgtaggaatggattctaaaactttccagataaaagagcatttgtgtaaaagggataaaaattctttgttatgttttgctttagacatgttatcaaccttttacagaatagcattatttttataataataacagaaagcatcactcattctctagactcaaatagccaaccagactctgggtaaaggcatatattatgtgagcaaagtggaatagcaactcttttgaaagctgctctttattgcgggcatttatatataacataggacaacctgttttgtagttaatgaacctggaagctaaagccagtggtatggctgaaaagagcagagttccttcttcgatgctacaaggtgaattagcatcaagtcctctgtcaagaaccttccaataaagaaccgattatataaggcattgagcctttctctaattacagctataaatataga

SEQ ID NO: 27641 - DNA, 860 bp, Bovine  19866881543496
  misc_feature (1)..(1): n is a, c, g, or t
ntagggtttttactacaagtttttaagcactcgctgattttcaaaaacatattaaactggccatggccaatctcatcgattggttgcaagtccacatttcccgaacgacttaatagtctgcaacttgtgccggacggagaatgatttcaccattctctgtcctacaacctggaggttggacattggtttttaactctgtggcgggaggaagcagtttgttttgccatattgatctcctccctagaaccacctcctatgggttttataggttctactgtcctggagagcacattaagtccccagagaacctctttgtaggccgtttctagggtcaccagccttgccacggcctgttcttggaagatggagctcctaggaattttccccaaatttgatctttagggcagggggattggaagagctatggagagcctatcatggcaaaataactaaaattgacacttatgcttctgaatcttatcccttttctctttctccatatctttttcacagtttttttttaaacaatatttttatttattttcaagatattttaaaaatttatttttaactggaggatgactgcattacaatgttgtgtttctgccatacagaaaggagaattactgccccccgcccccacccctgcctccatcctacccttctaggtcttcacagagcactagctaagctccctgctctatatagcaacttcccactagttatctgttttacatatgatgatgcatatgtatcaagtgctacgctctcaccttccccttcccccactgtgtctccatctttttcaattgccaatgacaaatccagcaaacgtttacatacagcaaataaataaatgg

SEQ ID NO: 27642 - DNA, 707 bp, Bovine  19866881652953
  misc_feature (1)..(1): n is a, c, g, or t
nctcggctggggaaggggagcgcctctggagcccggtggttcattcatctcctgataaactgtttatctgagttttaacgagggcgcctctctcccagccctggagacagcagcctcctcgtgtttagcctgcactggcgtggggggcctggggcgggcgggggagacgccgcggcctcgtcccggctcgcgctgggtctgcctcggcctttggctttgcagggctggggtctgggcctctctggactcgaggcttttatctggacaggaaatcttgttttatcgtttctctcggttcactgtgttgtgtgctcacacacgcacacacgcacgcacacacacattccctctctaaatacacacacacatacacaaatacctttaaaaatcaaacaccacttggttctgaggtgtggacttctaccataggcgacccaaaatgtcaaaagggaaatgaatggaatgccacccctacagcaggggcagcacaggaaaggattctccaaagtgaaggagggaaatgctgttctgtgaaaaggcaactgtcacccataacagaaactaaaaccccagttgttctcgaacttgcttccctcttgccattattctcccttaagaatccacacgagtgcacactttagagacactgatacatctgctgaggcgtgcacctcccccatcacaacacacacagacagtgcacgcag

SEQ ID NO: 27643 - DNA, 1545 bp, Bovine  19866881654904
  misc_feature (1)..(1): n is a, c, g, or t
ngcacagaaaaggtacaggaaagctaactgattgccagtgccacacagtaggggacctagtacccttgagtctccgtctgcaagtccgattcaggcttctcttaacaactttccctcctctggaaagtaacaattgctgttcatcagcttttgagcatgtaaactccttggagcaagggaaactgggtgacttcatccctttatcctggagataaattcaaatccagatgcccaggtctcaaaatgaaacatcaggcagttgccttgtctctttctaaatctggtagctggggagcaatccaaagagagactgccttcctttcacccacccattcactcccactcccacaaatcctacagtccatttgaactgacggaactcttgttaattgcctcttattggcctgttacaagatgaagcatggggaggagacaaagcctccctattcacattttcagtgggcagcaggggtctctgtaaaaatagagaacccggggcccaggctacccatttttgaaagtcaggatgagatcttctaccattgagaatcccacattataatcacaatattgcatcctgggagaccctgtcaatttctccaatggtctgttagaaatttagagtctatttaataagttagcactacttaaagttacagacctttttctgctttaaattgacacacgctttacattttaatttcaggtttttttttttcccagttggaggaaagagggggcaggaagagggggagagaggaaaaaaaaagaaagaaggggcagtgcttttcatgaaaacatcagttcttatatttatgctttaggaaagcaagggggaggcaagaactgcagcctgataactgaactttctgtttagaagtccctcctctccattgggccttagctaagtttcagtaattattgctcaggcacatagtcttggagctttgctttctctcagacttgtacacagttctaggaagggttgttgccaaagccatcatgtgatttattgaccctccactgggacaagggggaacagatataactttgtgattttattataaggaggctgggttaatatttctaggtgaaacaagctactataccaagttcaaacatctgaagagggaggttaagaaaccctgagtgtggggtgtaaggattattctgtcctggggctgtacagacgtcgtctgaggcagggagcaggagaagaaaggagacattgtgacccatttccaacacctcctgtgtgtagaggcggaagttccttgcctgcagagggacacgcgcggaggaaaaaataggagagttacaacatggcacttacataaacaacaccaaactggcataaaacatctaacaaaattacatgactttaagcttggaatttttatacaacataaatattagggttcagtccatttaataatgctatataaaatcaagatttaaggcagtaatgttccacataaactctgaaaacaacatttatgcttcttataaaagcagaaaatgattgcgttctggggcttttcaaaa

SEQ ID NO: 27644 - DNA, 1091 bp, Bovine  19866881668494
  misc_feature (1)..(1): n is a, c, g, or t
nattttttttattaacatctattaagtgcccagctgaatgttccaaggaacacatttggaaaaaagtacttctctaggaacatctgaagccaggctttttttttttttttttttttcttcttcagtgtgccttccttagcttcactgagcagagcgctcactttttgtctggtgtttagtataggtctctcacacccctgcacaaagaaaaagcttcttgaaggcaaggactctacacagtcatctttccatcctcaaggcctggcacattataggtgcttagtaagtgttggttaaaggaaaagaatgtcatcataactgtctgggccaagtttgtggacaaggtgatctctaagtagccttccatcttcagtatcctggagctcagcagccacaccctccatcagtaagtcgtccatggggactgggagccagggtcacactccttgccatcctccctgcgtctactctcaatttctggcctcatttcctctatcaactcagctcccatttgctgtgctgttattcagtgttggctatggggatgttacaaagatgggcagatcacacactctcccctggagaagctcagagatgctgccagtcccactgatgctgaaatttgaggctcaaagttcaaaagacagagacacacagggagagtcagtcacccacgagttctaagcaggagatggcagggtcagcctcatacctgaggcctctgagagcactgtactgctctctcacccagagtccagatcatcaaccatcccaccttcaatgcaaatctaagaaagtccattcatgatagcactgagcttctgactaattaagcaagccccctgcctcccttccaggtaactctgaaggctcctcaaggaaatttggggatttcctagagggggccaggctcctgtcacttaagcaatatcctttcacaccctctagtggttagagggcattctgacatcccggaggagcgcggtaactcccctgcatgcgtgcctgtgtgctcagtcctgtccactctttgcgaactccccagggcctacctacaaagtagcctgtcctcgggaaatcgattggcaata

SEQ ID NO: 27645 - DNA, 2622 bp, Bovine  19866881692835
  misc_feature (1)..(1): n is a, c, g, or t
natgtcgggaggttaaatgagagagagatctcccccaaaaggtgacgctcatgcttcaggccaggatgcgtggacgatctgaactcagaaatatcctgtaaagtagggtgtgttttcacccatgactccccacctgttctttcctcgttaggtgctcaaggattaagagtagaaatgctgtgacgtcgcatggaaagagaaaaggcgattctttgctgagatgacaaaatgtgtttgccttgtgattgtccctgagaacaggaactgggtaaatggcttgcaactaaaggatgtttcgattatcaagaggatagccccttagccaaactaagaaagccctcagccccacttaggattagacgtgctctgcagactgcagtgagctctgtcctggagcgactggaggctgtgtctcagcttgggctcccctggtgactcagacagtaaagaatctgctgcctgcaatgcaagagacccaggcttgactcctgggtcaggaagagcccctggagaaacgaatggctacccgctccagtattcttacctggagaattccatggacaggggagcctggcagcccacagtccatggggtcacaaagagtcagacacaattgagtcactaatgcgtttacttcccttcaagcctcagcctacagggtccttcaaggagatcttcagaatccacatctctttccatctctctgcatcattgggatttttttttttttaataaagctagattctcttttcagtgagaactagctatgtatatctaatgattacattgggccagtatttcccaaggtggtagaaaaggctctgagaagtcctgtagtaaagaaacctatgtcactttacttaatccagagattctcatatgtatctgaccacagaactcttttagcatagcgcctattaatatcccatggaaacagtttggctataaacatataaactcttgaaactgcttagaaaggataacctcaacctattgggtttgggtagactattaaagcagaactatgggtcacatatttgggataaaatctgaagctgccttagtggtctgtctggattatttttagatctgtgtgtgtgtgtgtgtgtgtacacgtgtttatatatactatgtataaatatgcattttaacttcgaggttagaagaaaaaaagaagcaaggaatatttcttcttatacaaaagcaatcagtgtcctaagagcggggaaggggaaagtttgtaaattttaaggcattatcgccatctcctattgccggcaaccactgatcacagcttcctacaatggtggaaacatctggccagctctcagtgaatgacagacaatcaaagatgacaccccttctcattaacctgccagagcctgcccctctgcttctaatccagcacccaaaacacttctttccaagtcattgatgcctaccagctgtattcctgagtattcttttggatgatgaattaattcaaaaagacagtattttttttaatgttggagtttgattttgattttcagaacatgtctgaaggcttctaaagaaaattcttagaaactcgctctaaaaaaaatgtgcagttaaacgtattttttaattgttgtaaaggtatgggagttgtttcaaaattatttttaatgaaatataaagttgttttctgaaatagaacgttatgcatgtttttttttaattgtcatatatagggtgattttaaagtaaataagagcacaaggttcatattattttaaatgtatattgtatttgtcttctcagcgctgtggtttttagtctgaatagcatcatagtatggagccagcctattaagcagcctgcttgggtaaggaaactctgaggccggcacaatgttgcattgctcactctgtccttccaatatggttagaattccacaacctaaatgatcatttgttgaacaaattcatgcttttattagtcaaaatacagagaaaacagagcctccctgtttcgagatatttgctaatgcatggttaattatcacatatagctgactataattcattttacaggggcgacctcctgcaggtaacatactagcagtttatgaaccaaaataacctcactataggttagagctgttccagggcccgtcagacactcggtgcttccaggccttctcacttcacgttgctaattcgaacaaggctttatttttatatttgtcagcagcaagactgtaggatggttgttaaacttctcccaggcctaattagagctgcaatgcgcgcattcataatgaaactcgtgtcttgctcggagttagtgagcagggctgttacagtagcttcctggcaggccggggctggcagttttaaggtagctcatggctgcagtattaagtgactgttgaaattcattgactccaccacggctaatgtgtctagatgacaacaagtttacacggttcttttatagttacggcaaatgggtccatttaaatatttattaggtgattatggtgatgtgaaatggaaaaaaaaaaaaatgcaaagtgcaatctcccaagtatgactgtttttaaccgttgatgagaggcccagaatcaggtatcgctcaaaatcaccgcatctttcc

SEQ ID NO: 27646 - DNA, 1426 bp, Bovine  19866881816663
  misc_feature (1)..(1): n is a, c, g, or t
ngggccggggctttgcataaatagaaaagcaaatgtatatttgtcggcattgctctcttctcctttgttttatcctctttccaaaataaagtgcattgttcccggggagtggaatttgaagtggcagctgtctgcctggctgactccttcccaaagagcagaacccaaggaggtaactagggttaacttgagtttgttctgtcctcgaccgacgacaccgggattcaagctgccaaaatagctgcatttgtggggtgtgtcagactgagcctcaaatgcccactgctcacacgcttgcaagtgacacacaagccttgagggtgccaatggccttgggtaccgcacacgtgttgctcattggagagcttgctcccaaatagtgccatttctacggccactgctcttatccttctctcacacgacagacaaatatgggctgaaaatcatctcactcagtccagatcaacaacaattcaaacgaggtttgcttttgactgcattgtctgtgagcctgttaatctgagggactagtcacattttggaaggtgaacatgtactgcctggctttaagaaaaacttataattcactagatgacagctctaaggtagtgtgcccaggagagggaacgttttgttcagaaaattcaggtacattatcaaagtttcctggaactgaattacattgatatgactcaatacaataaacatggattaaatcctttcgtgtagttattacaccaagatttctgtgtcaaataatttatcttctctgcaaatggctgttccagtattttatgttagtagggaaatgatggagggatagtacgtgtgtgatcccgggagcatcagtctttggtgtggggaaaaaagttcccaagaggtggtattagcacttgggagaaactttcccagccaccttttgccagcaggtgttaactcaatgtcctagatgtggttagtgtcagaataaccacccattccatttaaaaaattgaccttatagtagatgttatggttaggtgtttctctagtggctcagatggtaaagaatctgcccacaatgctggagacccaggtttgatccctggatcgggaagatcccctggagaagggaatggctacccactctggtattcttgcctggagaatcccatggagagagcagcctggtgggctacagtccatgggatcacaaagagtcaggtatgactgagtgattgaacacacgagttaggtgttagggtagatagcaataaatatgtttctaccttcaaaaagtattctttatggcaggaagctaagaggaactaaagaacctcttgatgaaagtgaaagaggtgagggaaaaagctggcttaaaactcaacatacaaaaaactaagatcatggcatcccgtcctgtcacttcatggcaaatagatggaga

SEQ ID NO: 27647 - DNA, 793 bp, Bovine  19866882093612
  misc_feature (1)..(1): n is a, c, g, or t
nataaagttgcaggcactagtggtaaagaacccgcatgccaatgcaggagacataagagacatgggttcgatccttgggtcagcatggcaacccactcaagtattcttgcctggagaatcccatgaacagaggagacttgcgggatacagtccacagggtcacgaagagtcagcaacaacagaagtgacttagcacacgtgcctgcaaagatccagggccatttgcaaggagacgggtgtagaatttcccttgaaagaagatttcccaattaaatgttagggtttgcaatttcccatctctgaattatttacagtggaaagaaccctggtttggggtgtggactctgagcttgagccatggagctctcctcatcagctgtgtgaccttgggcaagttactttctattgtgaggtctcatttttcccacttgtaaaatgagggagctgggccagttaaattcaaaggttccttttagtactatactggtctctgatttgtgaagtaccacgtttagaatttcagaacacttgtgaaattagtccaaaacccaccaacatcagaggcgactgatgtccagtctctcctgcaaaagcatgcccatattttgagaatgtccattgccaatacacatctgccctgcagttaattccatgtggtttgtttgtaagacataaatttaaattgatcactttttgatgatcattttctaacaatttttcactcttttttttttttccccagcaaagaattttttaagggggtaccttttcaccagagtctcaaaattaaatt

SEQ ID NO: 27648 - DNA, 1132 bp, Bovine  19866880369037
  misc_feature (1)..(1): n is a, c, g, or t
ncaggccacgccaagttcacgtttatcctgattcagcctccctttcttcaactcacactacaaatgacaacagtcacgggaattttaaggacattagaagagaagtataaggttctgcctgtttaggagcttttgaatctaataacaaccactaaacatgtttatgtaggttaaaaggtgcaggcaacagctaaaatgctaaagaagatatgccctggcagctgtgatgagtgaaaccaccaaaaccaatacagctcttaaaaattaatgggaatgaggaatactggcagctgataaaccaacaaatttagttatcagacacttccatttccactcaaaactctaaaatggaattcattcctttaacaaatcagctcaatgctgctgtgcatcagaaatcattctgggtacaatggatctagtggtggtgatggggggagccgataccagaatccgaacctctatggtctttaaattctggtggaatcatcatacgcacacatacacacacacatatacacactcactccttcattaacgtgggctgttctctatcaagaacaacactggatgtgtagaaaaggacagcaaaaccattgagaccaggagtgtatcagacttccagatcctaacagaattttattttctattgggattaaaaatcagtaaaagcaacataattctagataatacagccttaaactaatcacaggtgatacactttcactgtttactttcgtgctttttgtgactgaaactttatccatgaaaatcattgccaactagtgagagggaaaacaaaagcgacagattttctcacacattcaagaaaaaaaaaattttttttctgaggtaaacaggtttaacaagctacacccagagttacacctctgtaaaccacttggcttgccttccccaaacaaaatgtttccaacctcaaattccagcccgatgagaacaacagaactcaagtcctacccgacgttctgtgggttcacagaagcaccgttccacctcatctttacaaccaaagtgcctgctctgaggagcccaaggggaaaacaacgatcagcagggggagaggctcatcattagagacagcaagacagcgactgcagcactcaaaaaggaa

SEQ ID NO: 27649 - DNA, 2868 bp, Bovine  19866880482295
  misc_feature (1)..(1): n is a, c, g, or t
ncggattgtactgtaatagactacataaacttccctcatgtgggctcacatgccacattgtaactaacctttaagaatctactgcttcagttttgaagtagtatcaaagaaaaccctgctgctgctgctgctaagtcgcttcagttgtgtctgactctgtgcagccccatagacggcagcccaccaggctcccccgtccctgggattctccaggcaagaacactggagtgggttgccatttccatctccagtgcatgaaagtgaaaagtcaaagtgaagttgctcagtcgtgtccgactcttagcgacctcatggactgcagcctaccaggttcctccatccatgggattttccaggcaagagtactggagtggggtgccattgccttctccaaagaaaaccctagtttcctagaaaaactatgaagtcctcctcccttttctagtcgcagcccagaagtctgtcacagacgcaaaatgtgaacagcaccacttgcctgaggttgtttatttggaatatatccttagttttcctaaaagtatgtcatttgttaacatgtcatgggttcagtgtttttaaataaaatgataagtatttaaataatggaaagtaaaagtgttagtcgatcagttgtgctgactttttgcaaccccatggactgtagcccggccagctactctgtccaggggattttccaagcaagaatactggagtgggttgccatgccctctaccagaggatcttcccgacccagggattgaacctgggtctccctcattgcaggcagattctttactgtctgagccaccagggaagctaagttttaacaagataaatactggtaaatacgacccacattaacagaagctctgtgggaatcctcagtactttttaagggtatcaggactccggaaacaggaactgctgacctagaaaatggacattggctgcaaaagtgggagaattgtggcttcttttcatgtttttgcagtaaaatgacggcagtgctgtggaggattataaggagacattgagggcatcagtggaagagagggtctttctttgagctcaaggttgtttctcattgtcaccacatttgcagaatgaagcgctgtccttagaagaaacacgggttcgagtagtgcaagtacttggccgtctcgggggacagatcaacaaaaacctgctaacaggtgacgtttcctgaaagtaactcaacccctgagacatgcgggcccctcagctgaatgcacaccggtcacggtgtcttctgagagtgaatgcttctgccatgccctgaagcctgtgggttcctatcttcagggtctggcatttgttcattttttaagcagagtctagctggataggcctttatgttaaacatcgtgtcaggaattcagagttacctttttgaatactaatattgttaatgtttggatatttttaggttgtttttgatcagaattagtgttttttgatgagtaaaaatttgtatttttagttttaaaatttcatcctaaatgtactggtgattttggcatttcagcggttagaatgtgtattagaaaaatatgtgttttaaagaggaactatttaatgaaagtattgttcatttatcattttttcacagaagaataacttaactaaaattgaaaattaaacgttccagactattagacttgtttaaaaataatctgactttcagtcagattagaaacagcgtgtggtggtttctgatgttgctgctgtgtgtgtgtgataaacagagcaggagagggtgggccagggccatccccggtgaggggaggaagggctgaccggcatctcccctacagcggcgtcccctgaggagcgggccaggggctgtgtggcttgggaccgagaaaggaggctcagctttcgcagtgccctttgtggacatgaagcccgtcattcacctggacctgttcctgccgcgtgtcacagagctggcactctctgcgggtgacagacacaccaaggtactcactcgtcactcgccgcggtcagctgcgtgctccttaggagacatgtgttgtgtttcatgggctttgtgttttctctagcttagtgatggggaaactgctcagttatcagaaatcggtacccttggaaaatggaaattaaccctaaagagtctgaatagatgataaaacattaacacactagaattcttcatcgtagagaacacagggcacagggtgttgggaagggattttttagtctgtgctcgattctgtattcaggttgggagattcaaaacagatgatctcaaggttttctatttgtacctttccacattttgttcattaaaaatagattttcaggaagtaacagttaaagcgtgctcacaactggagctgtgttctgtgatacggcaccgtgggactgtgtctcttatgaatgtgttcgtcccagtgcctggatcttttacgtctcagttctcagctcttggctccagagcagagtgaacagaagcattaatcttatacgacaggaagtgttgcttaatgttagttcgtatatgggtggggtggttacctgctgcacaggtttaccttttcaaagggctgcgttctgtagcgtttcaagctgctcttgacctttgttggacccctggtctgtttcaggttgcggcctgtgaacttctgcacagcgtggttatgtttatgctgggaaaagccactcagatgcctgacggtggccagggccccccacccctgtaccagctctataagcgcacgtttcctgtgctgcttcgactggcgtgtgacgtagaccaggtcagtgcgtgatcgtgaatctgaaacagttatagaattggaaaaatgtcgcatcgggtccaggatc

SEQ ID NO: 27650 - DNA, 1463 bp, Bovine  19866880553410
  misc_feature (1)..(1): n is a, c, g, or t
ngggagcgaagtcatagaactcatttgaaactaatgagtagttgtagccaagtcctcattttagcttaagaaactgcgtacaaggtatcagaaatgtggcagcgttatcatggtgggagagctgtgctctctgtattccttaagggtgatgtgataggatggagacggtgcacagttctgtcaccatttgaaccacccctcctgcttcctgtgttgctggcaggtgtttctgcagtatctgctccaagccaggttggtcaccatttcacatagtctccgacagagcatgggtatcctaggaaaagcagtttttgtcagtagatggttcctgtcctgtggacaacctcaggagtttttcttatcaagatattagtaaagtagtacaggagtattactaaaatgtttttttttaatatgtgatattaggtatattttgaggttaagttccatagactgttttgagtgaagacagcataactggtctatgttttgggatggtagaatatttcactttgaaagaaataatagattatagtgcttttcagtcccttctgagtatgcatgtgtatgtgagtacatgtgtgtttacaagtgcacatgtatatacgtacatgcatgtgcatttgcatatagacatacagaacgtgtgtatatagcatatagatgtgtgtatacacacactgcttgtgtatattctcagtccctcagtcgtgtccagctctttgcaactcagtggactgtaacctaccaggctcctctgtccatgggattctctaggcaagaacactggagtgggttgccatgccctcctccaggggatcttcccaacccagggactgaaaccacatctctgacatcccccgcattggtaggtggattctttaccactgagccaccaaggaagcgtctctctctctctctctctctcacacatacactctcacacacacacacacacacacacacacacactcaataatggagtaaatacttagacgaggttggcctaaaccttctcactactgtttatgtgtattgcgtgactgtgtaagtcatgtcagactcaaatggtgtcgtcttaataattcgaaaggtgtctgtattttacggcttgaaaacttagaggtaagtctgctctagtttacacaagtgtttccataaaacctaattacacgtgtatgtcatgctgatttaatactcgtactgacactgttttgtgcagcattttaaaatttattttctttactttcaggattctctcttagcagatgaagcatttgtctttgtgaattcctcccttcaaagtctgaatcgtttgctatatgatgaatttgtaaaatcagttttgaagatcgttgaaaaactggatcttacactggaaaagcagagtgttggggaacaagaggttagaagatgttgtcagtagcaattttgcatcattttgtaccagctctatctgcatg

SEQ ID NO: 27651 - DNA, 2197 bp, Bovine  19866880573646
  misc_feature (1)..(1): n is a, c, g, or t
naaatgagcaaaatttcagtaagtgtagaatttctgtctaaaggctatccagtagcttcctgtatgtcatagattcctttcacaagtccggcattaactcttacttttctttgtttcatgtagatgtttctttctcagcaaaatagaggagaagctctgtctccttccagacagcgaaaggtgcgagtgaggacggggccgagatggactcacaggctcaggaagaagacgcacgggccctgatcacgagctgcagcttctccatgaggatgcagatggccgagagcgcgaggaagcaggtgggcaccagggccacagactcgagctggcggtctctaagcccagctcctcttaaaaagctgatgcttagaggtgatggagttgttcgtatttcttaagaaagtaagcttgaagaaaaattaaagttttccagaaagcctctaaagtttattattcacttgtcagtcatttcaaaatgattattttctgtaacttacaaagaaaataggcctaacatcaggttttctcttctttaacaaagtgagtgcttgccagtttgttacaaattgtattgtattgtatttaagtttcaaattgtattttgtgaaaaatatgtcctttgataataagatccttaatttatacaagtgtgctttgtttaaaagtggcatattaacattttaagtattaaaattttcatgtaatcatatttaaatgtactaggggaactttctgttttaatgaccctatgttgattgctgttataaagcaaagaatattatgccaataataattagtatttctgttttgtgggttttaatgctcttgtataatgtttttctttgaggtaagtattatatgaggaatttttatattttcaataagaaaaagcccagcctggaacagcctgagtgaacaaaggagctgtatcaacccctaaattgtgttttagaggagcacgatttcagatgctctcaaattcgccaccgaggaggatctgtctcctgtcccagtctcccctgccacacacagacgaatcttgttctttgtgactctggtagctccaggcttcccttggagttggaaatgctcttgatgttttgtgtattgctttcccactgcgtctttctgggattaggtagtctctccatgactatttcctgcagaaaagaaagaagattctctttttccagaaggtcctggccatttctccttctgtctccttagctctgggtgcagcagtagtggctgtggtccagggcatgcagctgaggtgatgcacgtggcttctcagcaggaagcggggcacagcgggtgctttccactgctgggggggcacagggttgtgggggagaaaggctccagggagaggaggcacctgggaatggtaggaaagaaaggtgctgagatacatttttagataatatcccaaagatgagaaactgggaactgaagagcctgctgtgaggggaaggctatcccgtgatgctggtttgaagtggaccgtgaggcttgtggccccaaattaggtactggagactccaggaggtcctggaaggtcttgaacatgctggtgggaacaaaaactgtgttcaagaagaccagagatgacaggagtgatgagggcgacctggacttctggtctgagtggttggaagggtcgtaacacactctaatgtcagtgtccttgaagctttggcagagaattagatttaagagatgtccataaaacaaccagataaaaagtagagaaattgtacattaaaagcttctgtacctcaagcaacacactaaagaaagtgaagagacaacccacacaatgggagacaatatttggaaactgtttatctgataagcgtcctcttatccagaatacataaataactctttacgactgaacaacagaaagtcaaacaatctagtgataaaacgggcaaaggatctgaatggatgcttctcccaggaagacactcaagtggctagtacacacatgaagaacacagcaccacgcgtcgtgggaggaggcgggtcagaccacagcaagggcccacccaccaccaccctcgggacggctggagtagaggtgcaccctgcggtcaccggtctggcagctcctgcaaatgccatgtgactgtagttccctcctcggaatatacccacaggaaagcagagcttaggtccacacggaaatttgtat

SEQ ID NO: 27652 - DNA, 630 bp, Bovine  19866880765812
  misc_feature (1)..(1): n is a, c, g, or t
nttgctatgctactcttgagcagcaggattactttgaggtctggtgacagcgtgggtcactgggccctgccctggaattggcctttgtaggtttacagggggctgagaatttgcctttctgccgagtttacagatgacactgatgaagctggtccagggagcacaacttgagaagctctgcttcggatccttgaccccttttgttttaaactgcacttaacagaaaacatgaaaatatgtggtgctgttcttttagaaatgctttttaatttttccctcaattaaaaaaaaaggcaatgagcatttaggatctatttcacctgtgacattttgattgtattccaatgataatacattaaaaataaatcaaataccttttaatgagttttccacatgtattaaggaagcaaaattaaatttatggtttatggttggctaaatgctgaatgttggggcaaatactgaatgcagtgtgttctccatacagaggcttcccacctatggcgtccttgtgcctgtcggacgtggtccagtggcttttcaccaactgcgggaggccccagacggaatgtcgacacaagtccatagaactcttctataagcttgttcctttgctgccaggtatggcga

SEQ ID NO: 27653 - DNA, 1183 bp, Bovine  19866881074949
  misc_feature (1)..(1): n is a, c, g, or t
ntctccaggcactcacgataggtgtcaagttaggttatggggaatgaggggctgaggtgggtggtggagaaacaggggagaccaagtggaaagggatgtagacttaatttcaccttcccaagaaaattattctatgactagacccattctctcagaggcacttaagaaccaacaagacccaaagaaattctacaacagagatgcaaaaaaaagatttgcatctgagcagagatccaggtgagagcgagcccaacgaccacacacacacaacacacagacccttcgcggtgtgagtgtaaggtttcaagaaaacattcaaggacacaatgaggtgcatctgggcaagtctcagcagcattaggttttcagagtaagggcttcccttaaagctcagttggtaaagaatccgcctgtaatatgggagacctgggtttgatccctgggttgggaagatcacctggatgaagggaaagactacccactccagtattctggcctggagaattccacggactatagtctatcgggtcgcagagtccgccacgactgatcgactttcactttgcacttcttgcccctcatagcccagattcttcctctgctccccagagtggtgtgagggcagaacaccaaggtgctgctggtgatggctggaaacgggcaccttctcacaccaacgggagtcctcagcgtctcacccacaactctcattttcagttcaagttatatgtgcgccacaaactacatgcacttagacatatttttttaaattaccttaataagaagttctagggctggaattctacatttagcagctttatcttttgtgtaaacactggtacaaatattctaggatttaaaaagagatatcaaaatcatcaataagatcttacttcttataactaagacttaatagctaaatctacacctgggagaagaaataccaatacttgacatactacactttaatagttttctacaagggcctcagctcattaaattttttaaaaattagccacttaatttctaatacaatcaagcaaaaataagtaaactccccaacaagaaagagaaataaaattaagcttaaccatgttatgacgtaagttaccatgtaactttccatgtaagttaagagatgctgatatacaaagagggaagttttttcttcttaccttaatat

SEQ ID NO: 27654 - DNA, 1753 bp, Bovine  19866881148129
  misc_feature (1)..(1): n is a, c, g, or t
nctaggggtttacatcagtgaacagaatcccaagttgtcggtgggatgtcagccttgccgttcttttatactaattgataggatccctgagaacagggaatgttttcatgagttaagggtagagtgagtagtatcagttgagcttgcattgttttactttaaacaaaggtgttatttatagtgtctcttcatgggtgaatgcacactgaggagtatgagtaaaacatttctttaactagatgtgtgaactttgtgttcttaggactgcctctgaggggcctgggctgggtggagaacaggaactacaggcgttcaggtgttcgtaattacagccttcaatccacagtagaattgactttttaattataacaaaatctgaagcctaggcctacttctaggtgcagttttggtccatgtaaccttagttgtcagttgatgtcaagatatttagattagttttaacattcatctgagtaaatcatatttgattgaaaacagaagcttttatcagaaggtaaaccatatatatttccagttttttttcctttgacttcctatgctagtattatttataacttactttaaacataatttgaaataattatgaataaataattatgtcatagttttgaaagagtaaggtttaaagtatatgataattttaaaagaataaatgttcaagattttttaaccttttactatgttgaggaaaatcatttgactacgtgattctgtcagagttaaagatgtgataggcctgtttgctttgatcttaagacatagtttgtgttgttgtaagacgagagacctatgaaactatttagtaaaaattaaggctgaaaactaaagggtgaacaaacatctgtgatttcatcgtggccttctaccagcgtagactgccgagtgtttgtggtttgagtcttgtgtctgtgagtactgtaggactcctgtgggtttccctggatcaggagctggttgtgaactgctacagttcatgaggatgaactgtcgtaatgttacaccaaggatggcgtttttggagtaggagaaaaagcagatgacagaaactagaggaaaagagatgcatttttttctgaaagtatgtagactgcctgcagattgtgtgttccttgcctcctcatttgcatctcacccttgtggacgagttaacgtaacctgtgtgggaatgacataactttcctatctctcacttaattctgactgcatcgtgtgaggggactgcacggtggcccacatttttctccagggctttctgcggaagtgagtcaatacgttgtttctggctttacttgctggccctccctcccatgccagcgctgggtgcattggaattttccaggtatatcattagaggaggcagcacagaagggccggagcaagattcacagtgcctggggaagtcccagggattgttccaggaagtactgaaagtgagccagatggagtaggggtaaaaaaatgacctgaattaaaaatggacagaacacggaacagccttcatcatatttaacttttattatcatatttaaaaactgatttaaagtgtaagctgagatttctttttagcgtggatttcaacacctttttttctgcttgtgccaagaacacagtgttctggttaagtcattcagtgacgaagactgctggcttgctgccaaccagggtcaagttcattcagataagcttcagtgtagatagtaaactgagtgaggaacattcctctgtcttggca

SEQ ID NO: 27655 - DNA, 783 bp, Bovine  19866881272108
  misc_feature (1)..(1): n is a, c, g, or t
nctattacttggttagttgttgcttgtttttttatgttattaagatccctggttgctttatattattccagtatttatttggatttatataattagcagttttgtttttccatgtttgttaaatttttagcattagagatttagtaatttttcaaagtttacttttatgtaagtgaagtaccatatcactttagaagttttgagaattaaatgaattaataattaggcaataggagagtatctgactctagtatatagttcttgaatagtagttccttttacttactattctcttctttactcttttgttaggtaacagaaaggcttggcttttaatttaaaatccagtgatgatgaaattaatccagggtatcaaaagttaggatatttaattttaagcattgtaggctagtttagagtttgtttgtttgtttttaactgaaaaacttttataatttgcataggtcttaccatgactttcaaaaggtgtatcttgttacctgcacctgtgtcgagatacagaccgtttctatcaccctagagagtcccttgcccctcctccaccccagagctgacccggtcactacttctgacgccctagagtattttgcccgtcggagaacttggtgtaagtggaatcgtgtaacgtatgtaccgagaggtctgctccttttgactgggtgtgcctcaggttcacctacgttgtttcatccgtgcgctgcggtagtgggttgtttctttttattatgggggggatatgccacagtgtgcttgtcacttccc

SEQ ID NO: 27656 - DNA, 877 bp, Bovine  19866881490050
  misc_feature (1)..(1): n is a, c, g, or t
ntatgtgcccacacggcccgcgtggaaatagaccgtggccgcattgccgagccctgcgtgtgcgagcgctgccataccagccacagcatggccctcatccacaaccgctctgtgttttccgacaagcagatggtacgtgccccctccacgtgccctgtccttgttctgcccttgccgggccctctgaagcccagtgtaacctgcccactcatgtaaccctaaaaccgcgcttcctgactgggttgacctggaagggagtaccgtccagaatgaattggaaaagcaggcagagggtgatgcaggctcacccaccgccaccctgatgtggccaccccacataggggagcattactcaacaatgctctcgtaatggaggtgagactgagttgctggagactagtgtgttgtggtgagcatagccatcttccagaacaacgtccctggggcagtggaggtgccaggtatctggatgtcctgagatgtccattccccatccttccagatcaagctccaggagtcccctgaagacatgcccgcggggcagacgccgcacacggtcgtcctctttgctcacaatgacctcgtggacaaggtccagcctggggacagagtgcacgtcacaggtgaggggctccaccttaaggcctctgacctggtcgggggcgcatgacctggggctgctgttttcagtgcctgcctctgacctccaatgtggtgccttcccagacagcagttgtcttcctgctgttgtccgaaataactagtgagcgactttaaatatattagccttttggatttcctttctttttaggcttttggaacacgattttagaatttttagtcaaattattaataagtgtacattcacttaaagaga

SEQ ID NO: 27657 - DNA, 2554 bp, Bovine  19866880423740
  misc_feature (1)..(1): n is a, c, g, or t
nggatcttcccacccggggatggagtctcctgcattgcgggcggattctttcccagctgagcccaagagaagccgaagaatgctagagtgggtggcctatcccttctccaggagatcttcccaacccagggatcgaaccggggtctcctgcattgcaggcggattccttaccagctgagctatcagggaagcccctggactccagtaccaaagccagagtcttctgactcccactgctgctctaattcttcccctcactctactgctaacacaaccaacaaacagatgtagatgtgacctcgggaaatcaaaaggttctagcgtgcaggtcattcaaaatcttattggatgaacttctgtccagtttatgtgaaggagtgcgggaaagagtgggttctgctttatttctatagctcattagtgaatcctaaccatactctcccttaggtcccttttccatctcagtctggttctcatctccttagaaagaaaaatgggatctttaaattcactcagttcatgttgggaagaggccaaaatcagggtcccattagtactccgctggaggagtctttcagcagcacagtctaggagaggcatttatgtctcctccttctcctcgtctttccctagcttggcatattctagctcgtgttttgctcttcctattaatatgagagaaaaataaaagacactattcatcttcctttgaaaagtttggcatttcagtggttttcttgaagtgtggggggggggggggggcctcatttgtaaccagctttgccatgaacggaaatcaatctgaatgtcctattgtgcatttttttttttcttttctcacagcctgaaatggcctttgccaagttttcaagctgaatctgaaagaccctctcattttccgctccctgcctccagcctcattgaacctttgcagagatttctcaggctgaagaagggctgcgctgcgaggactgagaggaacgcgacctactccgctaacccagtggcctgagccaatcacaaagaggattggaacctcccgagcctcccgcccctctcccttcccatcccctgccccttcaacaacctccgggaaagagggacgccggagggatgtgtttgggatgtgtttgcaattcaaatccttggctttctgccagcctcttttctaaataaaaggcaggagctgcggtgaggtgcaaaggggtctttggaattgcagtggccctgatatccggagatacccttatccgccgcttttatctgcttccgaagcaaacggggaaagagcaaggatggtggaggctttctgtgctacctggaagctgacggagagtcagaactttgatgagtacatgaaggcgcttggtaggtaaaactaagatgtgctgatctcttcttaaacttgcagcttcagatactcgcagattccttttttcacccatccgattagcaagagacaaaagcagatcccattgtcataatcacgtgctgtgctgattttaaaaaaccattttccacggaagggctttttaaatctggcatttgtccgctttcttgcctagggccaagtattctgtgaagaatgtgaagtttctgtgccttttcagcttttttttttccagcatcctattatttatgcttccaaattggcaatccacatatgacaaaggctcagtagtcgtctagcataactgatgggctaaacgtactttaatgagacttacactttacgacctggattccagaataggaaagtggattcctacttcatgagctattttggaagttgccaccaactgtattgcttctttttgctattttaggtgtgggctttgccactaggcaggtgggcaatgtgactaagccaacagtgatcatcagtcaggagggggacagagtggtgatcaggactcaaagcacattcaagaacacagagattagtttccatctgggagaagagtttgatgaaaccactgcagacgacagaaactgtaaggtaaggagccgctccttcctctggggtggggaggagaggagagaataactgttttttttttttccctagatgatgggaagtggaaaatgttctcagtatttcacttcagagagaaagacccagggttaattttgcattctagtgtcccatagcttatgttctgaataatgggcaactaccatagctcaaagctccaatctgtttctttaccacgtctttctctcattttgcatcaaatctgtatttcagaaagtatttcatcgtgttcatttaaaagaaagattgtactttgtttaatctctcttttgcctcaagttggcttcatcaatagtttacttcattctaagaccctgtttaaaggagtaggatgattcttcagaaagcactagtttaggatttttatttctgataatttatgtgcctgataatttttgcatctaaacgaacacatttcaatcgaattatgatttcttagagttttctcagagttttaacccggaagcaacagaggaaatggtactattgtataatgatcactattcattcaactatact

SEQ ID NO: 27658 - DNA, 2904 bp, Bovine  19866880483431
  misc_feature (1)..(1): n is a, c, g, or t
ntatcagaaagcatttatatttctacataaacgactggaatctctatactaagataaaccagcaaatacatttatatacattcattttgtatttaaggaaaattgaaactaacgtaaaataattgagtcttcattgtgggtcgagtgggtagaggcttataaacataatctcatgtaatccttggagaaggcaatggcaccccactccagtactcttgcctggaaaatcccacggacagaggagcctggtggggtgcagtccacaggattgctaagagtcggacacgactaagcaacttcactttgacttttcactttcatgcagtggagaaggaaatggcaactcacttttcactttcatgcaatgtagaaggaaatggcaaccactccagtgttcttgcctggagaatcccagggacggcagattctggtgggctgctgtctatggggtcgcacagagttggacacgactgaagcgacttcgcagcagcagcatgtaatcctcacaatgactgtggggaaagtaaggaaggcatagtcattccttgtgaaaaagtgcactttgccaagcgtacacatttggctagtgggtggtgaagttaggatttgagcctgatttttgtctgatgcttatgcctgtgtccttgaccaccttggatagggagatttggcatgagctaaaaagtatcttgtgtccatcaggtatttatagttgatggttgaaaatatacatttttaaggaacactttatcccttattctatgaactctaaaaaagagatgaaacatttttctgattcatttagtgaggagcatttaacaaaaaaaatttttgaaaaataataaaagtgttacaaaaaagaatataacaaaaattcactgaaatactaaatatagtaatgtagaaatcaataaaatagaataatacaacaaaatgatgtttcttctagaaatgtacaagtgattaaatattgagaaatttattgtaatttcatagtcatagactaaaggataaaactacgattttttcacttcctgattccaaatgacacttgataaaatgtaactatatttcttttaagaacacacatttataaaatttagtaacataggaatagagagctgtttttaaattgtgaaaagcaggaaaaaacaaaaacattagatgcttacaacatgtcctgtttcatcacttatatttaattagcgtctatagattttaataaatacaataatttttttaaatagctaacattttaaaaattcttattgtatatgctagaagctgttctaaatgatttacaagtattaactcatttaattttcataacagttctagggaatattgactactgtaattctcattttacaaattaggaagctgagacccagagatgctaagtaacttggccaagatcacacagctaataagttgtgtagctaaataagcactcaagtggcttaactcatgagtctttaattttaaatcatatgatatactgcctctcaaaggtcatagttattagcagagagatgacatctttttttcttaaaagagtgtatatatactttttttttactaaaaatcccaagaaaattaattgaaaagctgttagaataagaaacttcaggtaagtggacatacagaggataaatatgtacaaatcaattgacttttctataatagctacaaatataaaatatgaaaaatgccattataataataataatgaaatatcatatatctatgagtaagctataatagaaatgtataagatttaaatgaagaaaatagcatttgattgagaaatgcaaaataagattagcagtaatgaagattgatattatattcctggatgagaataataaatattgtaatgaggctagtttccccaaaataatttataaaattaatgctattccatataggaccataaaaagagttttagggccaagttggcaaaatgattattaaaattcatctggaagaatgaatagactaggaaaagcaaatttttgaaacagaataataatgaaaaagaacttctaattccaagtattaaaacataaaaaattactgttactaagacagtatttcagtatgttactttttactaaaataaagacttaggagaagctaaatcatcttgaaaattctccagatttaagcatacaagggtaacatacaatgaagactgcatttcatgttggtagagaaagtattgattattacaagaacagaatcctaatagtgaattgttagcaaaaattgtaaccatgaatcttttgtttgtatgaaatgcaaataaatattagtttaactgaaaaagaagcataatgagatgtaactgaaaaatcggcaaacataatctggtctaatatgacatcaaaggcaaaaaccgtaattggagattgatagacttgactgtgggacatattaaaactttttacatacaaacagaaaggggactcaaacagcatgcctagcactggatctgaaaattcttttcaggatagaatgaataaatcagcaagtgctgaccaatatcccaagtgcactactcttttgaggcttcataaagcaaagcccatcctggaatagtgctcatttgttattgtgctgtaggcacggagcaaattccaaagatgaaattctagaaatcaaatcatgacatggaagttagggattgttccacctaaaaaggtcagctaaattagaattgtagcatacaagagaataaggaattgcagctagacagttctataattcatacatatgccagggcatttcatttcaatagaagtgatttacaacatcattgagtaatgtctggagttttacaatgtattaaaacactttatctctaataaaagtgaaacaattctagtttttctgtcttgaatt

SEQ ID NO: 27659 - DNA, 1022 bp, Bovine  19866880517811
  misc_feature (1)..(1): n is a, c, g, or t
naggttgcccatattagttcattagtaataatagcacttaatagctgctatttttttttaactgcctcttaagtgtacgatgttcatactgggtcttttgcctacatcctttgatttcatcctagctctaatgaggcagatcttattagcctcattttacagatgagctgaatcatagtgacgttaagaatagaaaagcttcacggctgtgccaatagctggcatgattcagactcaaagggagggaatgaactagattatcttcttggcttacttcagatactgtgaatccacagtgtatttctttctgtaggctacagtcagtagagttggaaagtcgtggctgtatattaccagaactccacaatattgaaatggacctgcattctagaacctggagaggtctttgcaacagaagaggtctttgtcctgcaaaacattcctgtaaaagtttgatattaactctttatctatacagctatatatatatagctatcaaagaaagtagctcttctttctttttgagtaaacatcttaaaatttccatatgaataaattcaaagcaaaataaaaatatggttaattgttcttttcttttgtaattccccaaatgcttttattgttcattgtacttttaatatattcagaataatttaatttaaactctggttacttaactctatttgcctgccaatttaatcattgtgcacctgccatatttgtctctctatagcctaaaataaagaataaaactgattataaaataaaatgcttaactctatcttgtattcattctgtcaccctattattgaaatactgaatagcgtctacatgtgacctgtataactatcagaatactgtattctaaattaaaattaaatgacagatactatcaatggttgatgtcctttcatcctattatgctctgtgtgtggctttccatgttgatgtcagatgaccattctgaaaagagtaggatgagatttcatatttgctagatttcttttctagcaaattgaaaa

SEQ ID NO: 27660 - DNA, 1352 bp, Bovine  19866880538473
  misc_feature (1)..(1): n is a, c, g, or t
nacaaagactgctggggaggaggcctcttgacatcactcatacgctgatcttgcctctaaaataaattcaaaggaacttttatgtttcctacaactagagaatttctttgatgctaatcacactttagctgtttggaattgttctatctttcaggagtcttcatgttcttcataatttatctcagtcataatgagcataattagaagtttgtctttttgtgatcttttagcaatttaaaatatatcattaaatattgcaataaatatgaagggtgagctttctgcattaatagtgctcaataatatattttaattgcattatgaaaatgcatttcataatgcattttcagcattatgaaaatattttccaatgtcactttggggaatcaggagagttaggccctttgtcaatgaagtttgtagaactttgtttatatcagtgtggtaatacagtggagaggtaaaatgtcatttctcaagctgtaatacagaaacttgataggcatgaaactttatcattctgaaacatgtttttggttaatcagactgtaacttaagtgctgcactaatagaattttaaatcagtaagttattatcactcacaatagatatattgattagggaaaacataaagattttactcactagattcttatttcaaatcctttctgtcattgaattgtgagtttaagtgcattttgttttgtgtctttgtattccgtacagctctgtttcctttgaacacatagatattctagataagactgtcagactaaaagatagagtgactcttgggaggtattgggggaaaacctgcactgagaatctgaacagatgttagaaatatgctttaatccctcaaggctcttcagatgtcagttggcttatgtttctggacattatctgctggatcacattgagctatctcaattttatattcccagggattgatttcattaatgaagaacatgccaggacttgggattatctacaatgaaagatgatttcttcaggcctggtgagctgaaagatgactagatgaccactttgcgaatagaagaaattaaagctcagggctggtgtgaagacttttaacagcaagctgaaaaaacaactggacacacgtcagaactttctggcaagtgtttacaatcaactggaacaatttcagggcacattaggaagaggaggaggaagaggcctgaactgctgctgtgagaaactggtgcacggagttctcatcttacagcaattaaatgccaaacattcccccatctacagagagaatgatgttgggttgagtgaatgcttagagtaaaaaaatatgtgttacagaaacaaacaggaaatat

SEQ ID NO: 27661 - DNA, 1739 bp, Bovine  19866880573926
  misc_feature (1)..(1): n is a, c, g, or t
nggttgcaaagagtcggacaggactgagcagctaaccacagcgcagcacatgaactacacactgttggaagttgtagcagatgagaggacttgtacttaggggaaaatctggaccaaaaaagcaaataaatgatacatatttatcttttgtactctttctcctatcattttttttggaaagcacacattttgtgggctagatacatttatttgaatgatacctatctgtttacacattgtcttgtttcctgatattgtttcttgccaagtccttacagaaacgttgtagattcttatatatgccttgtttatgcttactgaatgaatgaataaatgaagaccagaaaaatgccatgtaggtctggaacattcctaagaaataaatcatctagccctatcccattgtaacactgtagttgaggaaattgaagtctggaaaggctgtataattataattagatgcagaggggagtcagtatccatttcctttgattctcaatatgttttccattgtaataatacaactgctgttaaattgatagactctttacaacttttgaccccaggattgaggaggttcttacttctatacctgaacctagactgaccataatataacttcctactatggaaatatctcttacagtaagacatatgccataacccagaaattctacttctcagtatgtatataagatacatatatatatgcatatatatactcagtacttatataagatacacgtatataagatatacaaaagcaaatgtttatttcatttatcttaataataataaaatcctgaaaagaagtcaaatgttttctatatggtgagtggttaaatgactcttgatatttttattttattaaatattatgcgacagttaaaaagaacaagccatacctatgtctggggccttccaggtgtttcaggggtaaagaatctacctgccaatgcaggagatgtgggttcgatccctgatctgagaagatcccctagagaaggaaatggtaatagactctagtattcttgcctgaaaaccctatggacagaggagcttggcaggctacagtcagtggggtcttaaagagtcagataagacttagagactgaatgacaacatattgatatctatgtttggttatagcaacagaattctaagacgttgtacaagaaaaaatgaaagctgaagaatatctacagtatataaaacacatagacacatgaaaaataatatgtatagctatactggatccatttgacatacagcattaacaaagggtgggaaataaatgttaaatttttgatagacacagttatctatggagaagatgagactaaaagtagaaggcagcttaatagttatcttgatttcatctccaagtttaaaatttgtgtgctaggttgcttcagtcatgtctgactctttgcaaccctatggaatatagcccactaggctcctctgtccataagattctctaggcaataatactgcagtaggttgccataccctcctccagggattgaaccctcgtctcttactttcgctgcattggcaaacaggttctataccactagtgccaccttggaagtccttaaaatctgtaaaacacaggatatattcatgagtttttttcatgtaatgtgaaaaaagatttttaatagcagtattatccaataaaaccttaatgtgcctctgttctgacattcctttacactaggggctaggaaagaata

SEQ ID NO: 27662 - DNA, 1337 bp, Bovine  19866880646053
  misc_feature (1)..(1): n is a, c, g, or t
ncattgagttggtgatgccatccaaccattttcatcctctgtcgtcctcttctcctcctgcccccaatgcctcccagcatccagggtcttttcaaatgagtcagatctttgtatcatgtggcccaagtattggagtttcagcttcaacataagtccttccaatgaacattcaggactgatctcctttagaatggactggttggatctccttgcagtccaagggactctcaagagtcttctccaacaccacagttcaaaagcatcaattcttcggcattcagctttcttcacagtccaactctctcacatccatacatgaccactggaaaaaccatagccctgactagatggacctttgttggcaaaagtaatgtcactggagaagggaatggcaaaccgcttcagtattcctgccttgagaaccccatgaacagtatgaaaataatggattagagggcaacagaatggaggcaggataatgagtgaagagatccatcgaatctagacaggctggcacccttaactggggtagtgaacgaggcagagcagagccgttggcccatcagttcaagagctatttaggggatagactttgtatggcttgatgatcatggaaggtgagggacaagagtgtctgctgggtttctgacttgtacaactgggtgggttatggtgctgttcactgaaagagaaaactcaggaggaggaagaagcttcaaaaggaagatgaatatctctaacaggaggggatgagacccgctgatgtgtcctgggcttttcaacattaactggccttccatgctgacagtatcacacacagtgtcccacttaatcttctcaactgtgggaggtattattatgtgtactcaaaagatgtgggagccaaggctcagagagcttaacgcctcacataacgtccctgttaataaggaacagaggcaaaagttcagcccaggatgctcagctgggtgtgtttcatcctaaagcacacataccctctgttctgtcactctgttttccttttagctctgacacatttaattctgtgaaaataggtcactcgtgaaacccaaataacttcagactttctgggttgttaaattgaaggcataaactttactttctgatttattatttctcacttggaaacctgcacctgcctccaaactcacctctagaatccactcttcttttccaatctattccattttctgtaaccaaagtggtcttttttaaagttcatctttgattgccacactgttgcttaaaagacttcagtggctgcccagcacttctgaaagagtagaccgaatccttaacatgccgcaatgatgtag

SEQ ID NO: 27663 - DNA, 2459 bp, Bovine  19866880775697
  misc_feature (1)..(1): n is a, c, g, or t
ngagaggctagtgaaggctttaactgtatattaaacaaaatgaagcaactgatggtttgagttgcattgcttttgaaggctttattagagttgtcaaggaaaaaaaaatctactgtgctctcattgcccttcaagcaaatctacttaaatatcttctgctcagtcactcagttgtgtccgactccccatggattgcagccctccaggctcctctgtccatgggattttccaggcaagaatactgaagtggggtgccatttccttctccaacttaaatatcttgaatgacccttatttttgttttaaattatgtaggaatattaagattgctttaactgaggtaactgcttatgatcaatacctctctttgctgtgattaactggtattgatgagaaaggatagtcctgttaatactttttaataaaattagaacattaagctcttcagaccccaaaatacttggaattattccagcacaattggagcttaaagaaacagataaatgttttgtggatctgagcctccatgggctgccttctgacagtcagataagttttggcatagctgtattatctaggttggtttctgacatcttttcttttttttgtcagtgggccagaatccaaataaatatttttggaagcaggacaccttgttcaaaagttgacaagcccaagtaaatattcatgtttaccaagacaaaaagagagatgagatgagccaaaaacacttacttataggcacttattttctttatgtaattgatcctaaagggaagatgaaagctaatgagccccagggacttgccccgtaattagttttacactgttatggatacaatgaacataaagcgatgcaaaatttatataaatgaatgcctttgcaattttgacctgtaagggcaagagaagcatctgctttctgttgatttagtgaagaagtttctttatataaccatctcttgggatatgattagtaccacagaatcattttatagtgagatgcttaatggaacaactttactctgtgacagaattgtcaccaaactattttttacattgtttaaaatcaaagagactatcatggtagtcagtttgtatcatttatagaaatgtttaatgaaccagaaaaagtatctatttctctatctttgtcagcattatgttccaataacacagctgaaataggattatgggtttcaaatgaattttttttaaagccatgaatcacgttttctaaaagccgtttctttttctttcttttgaaaaatttactgatgtatagttgacttacagtactgtattaatttcagatgtataatatactaattcaatacttttcaggttaatgtataaagttattataaaatattgactactttctctgtgctgtagactagatccttatgacttacttattttgtaattggcaacttttaccttttaacccccttcacctatttcacccttccctcaattccactctcttgaggtaatcactcctttgttctctgtacctgttagtctgtttctgttctgttctatttgcttgctttgtcttttagattccacataaaagggaaaacatacagtatttatctttctttgtatgatatttcactaggcataataatctcaaagtccatccatgttgtcacaactggcaaaatatcattcttttgatggctgaataatattccactgaatatatatatatatatatatatatatatatatatatatatataaactttctaacagaaaaatctcaagttaaatatattgggaagtccagtatctctaggatctttggttaggagattttcatgagtttgtactagtttgatggagctgaaggaacagctcttgggacttgggatagagatccttaagcctccagtttatatcttgctattcgggtaggtcagtgaccagttcaattccagagtgggtcctctcctttttactgtcaggttcctgcagttcattctacctagatactttaccaatttacggtccactggagattcgctctttcaggagaaagtgacttgaatactttgcaatgaaatgcaagtgaaaatgcagatgaaagctgacaaatgtatttttacataaagaataaacactgtccgcagaaccttttccccatcgacctccaggttatccttgtttctggggcatgtaaggatgtgaccatgttaaaatagagcaggtggaagagcagagatggaggaacactttgttctcatatatggaggaagccacgaggaaatgtaactcgacttttgttctgataattagggaagaactttcttatgaggaagagataggatctttagagaaggggaccctacttgccattttagactttattctaaccatccagaaattcataaagggatcctgtgttgagtgagggtagaccagatagccaaggccacaagccctgtcctcac

SEQ ID NO: 27664 - DNA, 3142 bp, Bovine  19866880801443
  misc_feature (1)..(1): n is a, c, g, or t
nttttgaccatatggaccttgttggcaaagtgatgtctcagctttttaatatgctgtctacgtttgtcatagcttttcttccaaggagcgagtgtcttttaattttgtggctgcagtcaccatcctcagtgattttggaatgccatttttataattaaattcagttacctgtgtaattttcaggctgatttttatttgttgactttgctcttaactataagctgtattttccatactggtatgcctgccactttcttactagctgttagatattgtaagttttaccttgatgggagctggatatgttgtatttgttaaaaaaacattcttgctgttcttagacatatgtgagttatttgaagagaaccttttcaaagtttgcttttaagctttgttgagattggaatggctttttttagccttatggccagcttccgcccactcccaccccccatgctgctgctgctaagtctcgtcagtcgtgtccgactctgtgcaacccaatagacagaagcccaccaggctgccccgtccctgggattctccaagcaagaacactggagtgggttgccatttccttctccaatgcatgaaagtgaaaagtgaaagtgaagtcgctcagtcgtgtctgactcttcgcgaccccacggactgcaggcctaccaggctgctctgtccatgggattttccaggcaagagctgtgtagtaaaaatcttataattttactcaaggatttttaacgttttttccattctgattggtaatacccacccccaccctgccccctagaggaatttaatcaaatacatatgctgatcagtgctctgctgaagacagaaatggaagcctctgcagatctccagagctcaatctcagtatagctttctccgttaattttttatgtcctgtgaactcttatgtgccttcacttccctaaactctcaactctgtcccaactgtgtctccagttcagtagactgctggcctgtgctggcctacattggagactcttcccagggagaaaaactaggccagtcatagacttcacattgtttcatctctcttagaaattaagtatcctaaattgcctattgttaactgtctgaaaaaccattgtttcactttatttttccccacggattaaggcagtagggtaggtctggtcactgttactgtgtcttggcctgagtttatggtacttaatccaaaatttatctatcagtatttttattttcagcagagacattactttgccaacaaagctctgtctggtcaaggctatggtttttccagtggtcatgtatgggtgtgagagttggactgcaaagaaagctgagcaccgaagaattgatgcttttgaactgtggtgttggagaagacttgttgcaagtcccttggactgcaaggagatccaaccagtccattctgaaggagatcagccctgggtgttcattggaaggactgatgttgaagctgaaactccaatactttggccacctgatgcaaagagctgactcattggaaaagaaccctgatgctgggaaagattgaaggcaggaggagaaggggacgatagaggatgagatggctggatggcaccaccgacccaatggacatgggtttgggtggactctggagttggtgatggacagggaggcctggcgtgctgcggttcgtcggacacggccgagcaactgaactgaactgatttttattttcagcatttttgttttgttccatttttgttttgttagttttttaagcaggcttttccccttctcatttctcctcagccctgcagtccttttcagcttgttctgttctcttctgtttgatctctcctttttgcttcaggtgaaccaattttagggaatttccttttcttactgagttatgttttatttcagattggatttttcaaatgcttttttttttttggtcggggcatgtttgtttattttttgctaagatgtgtttgtgttgttgccatgctatttatttccgaagttctgtataagtacttctgatcctaccttatattggttactgtagtgtgtctgacttctgcaatactcccttcctgtggtatctggtggatggtggtgctcaccctagagtaaggtcaattgttactagaatactttcgttttgccttcctgagatattgttaaattccactaccggcgtttgcctcacgtgctcagggagatagccttttcccctgggatctactactagtttagtgtggaattctgttagagaatgctagctcaccccactcgttcatttaatcctattttgcctaattctaataggaacttttacttggtggttatcaccaccactaagtcagaagagggaaaagatgagaataccagtttacttcttttccttctctgaagtatctgagaaacctcagacttttgtgaattcagcctgatttctgggggttaaaaggtaggagttggagatccacttacaattaatgaatatcccatttcttttctcagctaaactttgggtcttgttgctgttttttttcttcatttttaactgaacttactcattttgcttgatataaagggcactttttttttttttttgctttattttgcttcatttttacccagaagttaccaagttttatagtctatagataacttgtgaaccagatcactttttaatcaacttaacttcatccttttttgagtagatagaatgtagattttcactgtatcattttagactgtactgatttttaccgttctttttccagatcccgtgtttgtgtggcagtgccccgtgtttgctgtgccgatgctgtcctagtggaaataactccactgtaactaggttgatctatgcactttttttgcttgttggagtgtgtgtagcttgtgtaatgttgatacctggaatggaagaacagctgaataaggtaagtctttttttttttttttaattaactgaacctttagtgtgtgtgcctactaagtcacttcagttgtgtctgactctgtgaccctatggactgtaatctgtcaggccttctgcccctgggcttctccaggcaagaatactggagtgggtagcctgccctcctccaggggatcttgccgacctgcctctcttaggtctcct

SEQ ID NO: 27665 - DNA, 1116 bp, Bovine  19866880909421
  misc_feature (1)..(1): n is a, c, g, or t
naatcaaaagcaccttttgcttttctctctaaccacccactcccgcaaagctttcaggtgttactcaattacataggtacataaagatttgatgtgttaaatcacattattggcatatctttaagttggattcaaatggccgttttctccagttacactaaattggatttcttttttacatatatgttcattaaccccagttaaacttttcgtttgtttgttttacttgtttgatgctgtcttgtttgccttgagtgtaagtcactataactaatggtagaactcctaaagctttctctgttccagttgcttttattgagtattttcacatgacttctttataaaactgggaacataaagtgcctgtatcttgtaaaacttcatttgtctctcttggttcagagaagttcattcatgttcaaaaggaaggcaacatatacttgagtgcttgctgtctgatacagtttcagctgcatatattatagacagaaggggatgggatggtgtcaacccatccagctcactggactagttttaagtaaaagttttctggcttgttttgtgtttttttgaagcatactatttagtaaaataaatataatgaatgttgcgtatctagtgtctgttatgtgtcttctttggagtgacatccacatgtgacagtctttccttttcatatgaagtaggtagatgtaaactgtgaactttgtctgttgtccattattctaaacatgaatcataccaagctctttgtgcctcatctcagaggataggttgtattgcaacaaggaggaaaatataatgactccaaatttaatgtgttttaagttctttgtttaaaaattatactggcttactttctatgtttctaataaagaattgagaaaagaatgcttccagttgtccaaattaggtatgaacattatcactggatgcaaagtgcctttaattttcaccttgagagaaaagagaaccagttaaatcactttgaaacatttgctcagaaggattagagagacttaatgcaaggacagagaaccatcacctgaagaattctaccttcgagcagagaactggaagcagtgagctagtatctgaatgctttttaaaataggg

SEQ ID NO: 27666 - DNA, 1798 bp, Bovine  19866880918313
  misc_feature (1)..(1): n is a, c, g, or t
nacacacacacacacacacacacaagcgcatagcttcaattatcttctcagctttattctagagccaaacatcttattttatgatcttaacacatatatgtatggttgtggaatattgtgactaaaacatttcatgtgccactgaatattgttttctggctacctatcttataatttaagttattggtatagaaaaagcctaggaaatatacatacatttcagttattggctattttaattaaattttaatgtaaaaaaagtcagatgtccaacaactggttgtttgaatttttaataattatttatggagtatctcgtatttgcatctgtttttgaaactgtcaaatattcttagttttacattattattttatttcactcagtatctaagtccaaagtgagggcaatatagtcaccttatttggctgggtcagccatcatcaaaagacttgaatagtgtggaccacaaacaataactttcttctgctagaacttggctgacaacacaggttgtgccttctgataaaaaagtaattcacaatgataagtatcacatttcagatagtcattttaaccccataatccaagttgttgcctctaagcaacctatttgagattactgttctaatacctatctcaatttaccaacaattaacatgcaaaatttattcctgtcaactgcaactgccaagacctaaacagtcactcaattaaaaattctgtcctgatcactcaaggtctctgaaacaacagaagatcttgatattactgcttgattgacctcctgatcagcttatggagcttatgccttatgccttaatttgactcaaaaaaaacctaagtactggagcatagcaattcattgagggtttaaagtagaacaaaccactagtaggatttttcattgaatgtatctttttaaactattgtctaaaatgacctatctgtttcagtaaatggtgtgtcatataaggaaatatcattaataactatcagaaatgaactcctgaacaatgagacagtggttctataccctagctgcactgtaagaggcaaacttttatattgaaaaatattttaagagctgtagtttttcctcatcccctttcctccacaagcatgatatgaagtaaaacttggtgaaggctgaaataggtatctcaggctttacattccatatccctgagtgtaccagattatcttctaacacccattttgtaatgttctgccttgactggtttttaaatattacaaagaaaatatgtttctactactcttcttggaagattaattctcctccaatctttaatgctatattcaatccttaaaacacccatgtaaattttttctcacagtgagaattttacttgttgaacttttttctgttacagtataataggactttatatcttgaaataaaaatatatatcctccacaacagggtagctacttaacctggtaatattttacatatgtgagtagtgagatgacttcagctattcaaaaagcaatagtaattcattaccacaccaagttgaaattatttcctcctttacaatagaaaagatgaagcaaaataatctttaaaagtaaaatcacaggttttaaaatggtagctgtttctggtgctgtgtgacatggaaggaaatgtgacctacttagaaatttcttaaaaaaacagattctcaattattttattagctatcatgttctgatacttttcaattttattttttcctttgttcttatttttcattcatcttccactatttggcaccagactcaacgaacacactt

SEQ ID NO: 27667 - DNA, 650 bp, Bovine  19866880937661
  misc_feature (1)..(1): n is a, c, g, or t
ngaatgctgaggacccagaaactgacagcagcagaagtgttcatcccccactaggcttgaaagacaaaggaatgagatagactggtgttgtcagaactcagaggttaggttgacttgaacctaacctctggaaccacagtgggcttgaatggtgggagctgaagccaaagaggaaattcagcctttctcaaaagagctgacaaaagcaaaggatggagagatgaagagagaattactagagttgctctgttttccctaccctccagtatcttgcctctcaatgaccagaagtcagttgacattgagccagggaaacaccacctgcagaggccagctcagagcacaggaaaaatctgaagccaacagtgttttcatctttaggagatcacacggcataaggccacatcactgtgggtaggagtgggtgtggggtgtcccatggaggtcctgctgttgccactatcagcttttctggaattgattctgatttaggcagtgaggaactggaaaagaaaactaatggaacactaggcagcaataggaaatgagtttcaaatgcattatgctaactgagagatgctagacataaagaatatgtatactgagtgattccttttatataaaattctagaaaagacaatagtgatgga

SEQ ID NO: 27668 - DNA, 801 bp, Bovine  19866880994517
  misc_feature (1)..(1): n is a, c, g, or t
ngggtgggatggagggtacctgcacgagccgtcttacctctaaataagtgagacagctaatgcagtttggtagattcctaaaagtctgttcctccagaatttctcccttactcaatggctatggtgaataaaacttttaacactggaagtattgacttttagagaatcctggtgaatggattatatctattttggggccatttagaaatctcaatgtgttagctggaaagtacaacacattgttatgttagtactcattcatcttaaacaatgacttgtttatagggttgagagtttgaaagaacatgattctgaggaaatgagagtaattattcaaacagggacaagagtcataaaacagctataggtaagagtgcaatgcaaaatttactcatgttgaaattttggatagaattgccaagactatttctctatgttattaattacatgctgttggaagttcttctttcaatttcctttcccttctctcctctccctttccttcctccttcctttcttctctctttcattttacatttatttaaagtagaatcttacatttgaatactccattaaggggtaaaattgaaatacctattggcatgatttaacattcattaatatcatagatcaaaatggtttgaagaactttggcagacctcactggagagagtgtaaaatgggatagttgcccagctcacctctggagaaaaggtttagcataaacatgatgtgagaggatgagcgagtcccacccagatcacagcaggcctggctgcagtcttattacaggccagccga

SEQ ID NO: 27669 - DNA, 4321 bp, Bovine  19866881019429
  misc_feature (1)..(1): n is a, c, g, or t
ngggctgttgaaggtcaaaagcttcagcacacaggggttcagtctcccccagaggcagatggcagatatcactgctgttcagtcgccagcaaatgttcttggcaagtgccaatttgcagacagtatgcagacctgtgaactaatcctcttcattttctttttcattccgtgtctaattctaaactttgtatatctctcattcaattttttttcacaatcaacttttagtaggctcaatgtttggattgttttgcttggctctattagaaggaaatttatattttcatgttagatacctggaattaaacatttcccatacacccatcttaccaaatgtctctttgaaaggagtctatcaaaaaggatgcaagttggtacatagaagtctctagaagaggaaagtgatgataaggaggtaaatacagccaggcaatacgtgaaagcttggtgagagttagatgcatggagatgtgcataggtgagacaggcagacggataggtaggtaaagtaagtagataaatagatgcagtatccatgaggagaagtagttcagatcccagggccagagtaagtgagagctggtgcatttcttctagttccactcgtctctaatatcaccaaaaatgtgattgtaagtaacctgtacttagtcgctcagttgtgtccgactctttgtgacgctttggactataactcgccagactcctctgtgtatgggattttccaggcaagaatactggagtgggttgccatttcctcctccagggcatctttccaacccagggatctcctgtgtctcctgcactgcaggtggattctttatccactgaaccattggggaattaactatctctgctcaggaaaaacagaattaccatacttaaactatagtttagaggtcatctgatgacctttggtcagtgtcaaaattcttcgaagtgtttcttgcaaaagacacttgcactttcaagaaatgattctcttctcaatgtttacgttagaactaaatgacacgccaagtgtacacaattcacaaaatttctgcttatgaataattagtggagttctctggaagctttgcatgcaacaagcatcatcagtcctgggtgttactacacggcactgctttcccttcttattcttttctccctctcttctttgtttattctatatcctgacactgtccgctcactgctgatgttgaacttgaagctttcccaaatgtaaacttcagatagtattccatcagtcacgctccccctagagtccccacaatgcccaatggagaggggattaatgttggaagtggctcactccagcagcctgaaggtctctttttgtttcatgctttagggacgctttgtcagcctctgaatactgtctctttggttggctttgtggagacagcttgtgctcagaggtgatttagttgtaagctgattgctgctccacgtgtgaagagagcgtgagcagtttgcaggcagccagtcaggacgcccccagcccatgacatcagcatcgcatgatggggacctggggcagcaccaaacagtcgctccttgttgctatttttttttttttttggtctttaagaaaagagaataaagcctgggaaaagagcaaaagatgcctgctttttctggagaattactgaatgctcttcactgtaacacccaccaccaccaccaacaaaaatgtgactcatgttctataacagaaggtgggaagcacagggacacaagaccaaggggaaaaaatagtacagtttagtgagacttgggactagtctgtcagcttgatctgttttggtactttattgaaccctcccccatgactcccttcccatttttctagtggttatgttaatatttatctagaagcgtatgtgtactaacataaccgagacaaagaaaatcagatttctgtttgttttgattttgatcaaattaagtaggttgctttttcctgtttggcattgtatagtacattgcttactgtggactgcatgcttaaaataggaggtgagctagtgccagtccttcacctgcgtcatttctcatcaatcacatgctggtcagcagagtcacagcacgtggaaatctggtgacgcactggctaccgatcccgtcgtccggtaacagtcagggcaattcctccttctgggataaccgggccaagaatatgccctatgtccccctgaattgtagtcactgctgaggacccacgtccacagttggctttgtggtgatcggcagtgttttgaatctgactttcaacttgtgaccaagaggtttttaaaataaggaacttggttctgctgatgtccactaacatcttcatgacaagtggaccaaactcctgaaagtgcttcttgctctttgtctacaataaaatcgcagaattatctctatgatctcatgagactaacaatggtattcttgctgataacactcatcataaatgaaagaaagaagcatttgtgttaaaaatagttaagtataaggaattttccctagtggtccagtggttaagactccatgtttccactgtaggaggctcgggttccatccctggttggggaactaagatcccacatgtcacaccgcatggccaaaaaaaaatagtgaagtatgctttcttatatttcttggaagagagattactgcttctgagaaaacttgtttcagttatgaagaagaggcatccaagtacagactacaaatctttctgtcacttttaataaagttcatttataatattactttatgcctgtctcctttcccttggcaaagaaaactcctgactgtagcagctaaaatgttaatgagaatatcttttatgtattatttaataagttttgttaatttgattacataagtcaaataacatcctcattgcaaaaaattaaaaaatgtagaaaacatgatggaggaaaatcttccatcattccactccttaaaggaaacctgttaatatctgttgtaccgattggctgacttgccaggaggacctgggaagaccaaccatccacgttgattctggcacctttcctttgttgcacttgtcacagctgaaatgatcttgtccttggtgtaatttttattttttgactctctctgcttcactaatacatgtattagctccatgaagacaggtgttttttctcttttgttcatggttgtatccccagcaccaagaacgatgcctgacatttgaaggcacttactaaatatttgttaaatgatgctttcatgaatgaatgtgagtattgtcttattcccttgactagtccttgcttagttgaatttatcctatctgaataattttgtatcttgaaaatttaaattaacatgataaaaatagtatctctgcaagcttttatgtggcatctttatgtaacgttgcaaaattggatgctgactatcgaacaccatgccttctagtgagtaggacaggatttatctgtgttcattcttgggtgatggttatgacacttaaaccaagtagggccctttggggctcctaggcatggaagcctttcaaacagttgctaatcaggcaagagaggggatgcagagatcagggagaaggaattaaggaacaatagagcagccttgggcagggttctgatcctgcctccaggggtgcatgtaatagtatctttcagctctcctgcagaactaaaccaccaccaaaggaagtgctccagagagaaggtcacagtctgatgactttgaagctcatcaggaggtcacctgaggccagattaaaggaatgcaggccctacgtacaacctgagccttatcagcaaacttacccttgaaccattactataaagaaagaaaagcgtaaggaaagaaaagttgtcagtcgctcggtcaagtctaactccttgtgacccccatggactggaggccgccagactcctctgtccatggaattctccaggcaagaatactgggttgagtggccatgccctcctccaggggatcttcctcacccagggatcgaatctgggtctcctgcattgcaggtagattctttactgctgagccattaaaaaggctcctccttattccctcttgctataaaatgcctcatcaaatctccccaggttgggacacatcgattttgtagcgtgagcctgctgtgtctccctttacctgacaaagcaataaagccattcttttctattccacccaaaactgtctctgagatttggcttggcaccggagcacaaaggccaagttgttggcattgttactgcatttacttgtgtcattcgtttcaagctgcttttcttctgtctccagggcagag

SEQ ID NO: 27670 - DNA, 1207 bp, Bovine  19866881256630
  misc_feature (1)..(1): n is a, c, g, or t
nattcacataaaagcataacattggccacctcctgctaataatacacatgtttcacaaggggcaagtagcatattatccaaacagattaaaaattatcatccagatagataattcctagaggagtggggagcactttggcttctcattgtgtgaattatctggattattgctccaattccgttttttgccctgggagtaagggtttagactcagaagcctctaagactacagcagctctacctttagacccagaaaccatggtaactgatagctacagcgaaggcaactttcttagcagctgtgtattttctagacctttacagctgagacatgaaacattgcttacaaccagccaatcccacagaatccacagtgagctcattgccctttattgatatgactggcaccattagcttctggatgaatgtgcacatcaggcaacattgtagaaagaagagattaattgtgtgctgttcttttttgctatcatcattatgtggcaaactatggtagctctctctattttattattttaattaaattcccaggagacagagaaaagtaaggagatgtaacgtcctgaacataaaaactgatgcttttattttttctaaatatgacatgtaaatatatttttctcataaaggaatatcccagagattatctgtctcatgggctataaataaaaaatagacaccaggatatgggggggggtgtgtgtgtgtgtggtgacgtgcatgctcaatcatgtccaactctttgcaaacccatggactgtagcccaccagattcctctgtccctggaattttccaggcaaggatcctgaagtgggttgccatttcctacggcagaggatccccctgccccagggaatcgaacgtgcatctctcgagtctcctgcatcggctgtgaacctgtgccacctagggagagtggtaaaaacctggaattttattaaatccaatgacactgaagggtagcagctttattattgtggggctccacagttttttaatgggtcattaaataatctctactaattagaatgtaaaacttccattcacagcatctaaaaaatattgaaagggagagtgcaatagtttatagaacaaattcaggagtcagactactccagtcagtcacctgccatatgctggctatgccaccttaagcaaactactatctctcttgtgcctcagtttcat

SEQ ID NO: 27671 - DNA, 1286 bp, Bovine  19866881394439
  misc_feature (1)..(1): n is a, c, g, or t
nacactaacttcctgagtgctcagtaaattgaatggagcttgtccttgcagatggacttaattcatacaactgattttctgcttagattttcctgtctaggaaggatttctgccccaagcatagtctccttcactggaacccttacattttacctaatttttctaatctctttcacaaagatgctattcttttccttgccccgtatcatctctgccttatgtcttgtcctttcgctaatgggctgaggacatggaccctagaggctgaagacctacatttaaatccaatttagatatgaatatatgcaaacatgcaccaaacagattcatcacacctctttgggcttttgtcagactgtctagcaaacctcaggatctattatatttcgacttttcccttagttggggggtggtggtggtaattctgcatgacatttctatatgactgtgacagcttttctccaaggtatctcttaaaagatgtttatatagcaagcagtcttagaagatagagtgtttatataccctgtaaaggtagagggcaaatttgtttcctgaacaggatagtaaaatattatcttcctcctggtggctgagatggtaaagaatctgcatgcaatacaggagacccaggtttgatccctgggtcaggaagatcctctgcagaaggaaatggcagcccactccaatattcttgcctggagaatcccaaggacagaggagcctgataggctacagtccccacaggggcacaaaaagtcagatatgactgagtgaccaacactttcagttcagttcagttcagttcagtcactcagtcatgtcgaactcttcacgaccccatgaatcacagcacgccaggcctccctccatcaccaactcccggagctcactcaactcatgtccatcgagtcaacctctctcttaaatgaacaaaagatattataaacaaaatcctattttggtttattctaggatttgctttggagaaggagttggcaacccactccagtgttcttgcctggagaattccggggacgggggagcctggtgggctgctgtctatggggtcacacagagtcggacacaactgaagcgatgcagcagcagcagcagggtttgttttagagatatcatatactagttaaaataatctaaagttcaccaagctgatgtaaaccactgagtctagtctaagtttaactgaaatatgcaagatagacaataatgacttcttaatgtaaggtcgctggatcatgaaaaagcaagagagttccagaaaaaca

SEQ ID NO: 27672 - DNA, 2488 bp, Bovine  19866881580288
  misc_feature (1)..(1): n is a, c, g, or t
nagtccgaaagtaggcaattacctatcttttggcagataaaattgagacattttcacataggcagggaccaccacaacctacctccgtgcacttcttaggatactctttctggcaatgtggctcagaacagtgtggtctcggtccaaaaaaaatagtatttcagtagccaatctttccatttttctgcttttggggtcgggaagggactggatagttgtctctctttctcccagatggtcttggaatggtaatcctagctcctaccttataggtaaattttgattatttaagccaaccatactaatttcattttctttgccaacattttgtttaggagtgagacaagggcagatacctgcataggcttctaggttaagtcttcctcaccttgaagtagagaaataaaaaagagatgatattttcatgcctatgtgtgatccttagaattgtgacttccatgtcgccatcctgacagcagcaagacagtcggacaaagaagataactctcaggctggcaaagcagaaaaattgaaagtaattacatccttgtttccattgagttattgaattaaacagccctagagtcactccatctcaggccttcttttgtgtgaggtgagtatttctgcaattacttaggtcatctcagtgtagttttgttccttgtagtctaaactattctagtgatacaaagaaaaagatgtgcgattcaggaaattggaggataaaatatgaaaaacaaagtctccagatgatagttatgtaaaaggtccagatggcaaacaaaaccagaaaaaattcctaagagagcctctagagaaaaagtcaagctaatagaatgcttgattggtagattaaaaaacaaaagtatgataaaccaaatagtacagggaaaagaaaaaacaagggaaatgaggaaaaataaaaaactgtacacaaaagaaaaaaactcatggcaaaccattgattctgtaaagagcaggattttactactcacagtaatgtaaacactgttttcgtttgaatttttagaatgaacttatggaaaattgaacagcttagcttgggttatagaacataaaatagagttgttagcattaacaattccaaagcttagatgacaaaactgtaaaagggaaaagatggaaaggagattttaaaacaatgaaatccttatcttatatactgcaaaaatgaagatatgctaatagaaatggagcaaaagcaatttcttaagtatgcaaatgtgtcaaaatttatgtaaaatgtaattactatcataatggaaaaattttcaattgtagggtctttgcttttgcttttttttactatcttggatgtacagcccagatttccgtaaaaggaatccctttatcccagtcctagctcaagatctctttccaagcaagacttccctgactctatgtaaagctgtatgtggttctacccacattttcccttaatattgccatgctttattgccttcatttcactccattaacatttgaattttctcattaattcatttacatatttatctctctcctcatataaccatatgctctttgaaagcgtggaccttatctacttcattaattgttgtatccccatgacctggcacattgtgactatatcttaaatgaataaatgaggaagggaatgagaaaagcacagtaagccagcataacatgaaatcaaaatataaggcataaaatcaataacataatacatttcaatgtgaggatattataaagagatataaagacaaccagagaagaaatagtaaaaagattttaaaatggttaagttaccttttggaaggcattgtcaagtatgaactttctatatattgtgtttcagactgtatttgtaatatcctatttttttgtgtgatgacatttaatatccttaattcatttttttaaccacttgcacatgtcttcctagtcctcccatgctgggactgaagatcataaattgaggaagatggtgcagcaacttcatttcttagacaaatgagtataatacttggataaatcattatcctgcaggcagtgctctcataaaatgctttatgcctgtaaagagtctgaaacagacttcatctactggaaccattgacctaccctttcacagccaactgacaggtttgatcttgactataaacttattacagaaaacaggaaatttaaagagaaaggcatttgtctataagtgtaccagtgtcccttacctatccatgtgctcagtcgctcaatcatgtctgactctttgcagccccacagattgtagcctgccaggctcctctgtccatggaattttcccagtaagaatactagagtaggttgccatgccctcctccaggggttcttcccaacccagggataatcccgcatctcttgcattagcaggtggattctttacttatagcaccacctgcaaagtcctactatctatagagaaataatttattttgtagatttcata

SEQ ID NO: 27673 - DNA, 1064 bp, Bovine  19866882004754
  misc_feature (1)..(1): n is a, c, g, or t
naagtgttttagatgactaataaaaaaaagtatatataattcatgaatcttatgtgtttattctacgaactttctttcttgcctttatttcagaaaaatcattaggttgttatcaagatttttacataatctgtgttctaacgataatggtgaaagaatttaaaaaagtaattgtattccaagcatgattgcatttaaaatccaaatttgaacatattttataaaatgtattcttaagtaaatgtaaaagatttaaaattaagattatgttaatgtttttaagttacaaaatattacgagttatgtaattgaattttaaatgcttctaccttttggctattgtgaataatgttgctatgaacattgctatagaaacatagttttatgcattttgcttttctcgcttgacaacacagggtggaaattcttttgtcatctggcatagttgtaatgtacttcttttaatgactccgtggtatctgtgatatgtgtgcagcacaatatattcagccattctgttactggtgcgcatctgctttgtttcaaggcttttatctatttattcactctggaagcttctgctgccgctgcaaaaaaaaaaaaagaaaaaaaccctaaacataagttattaaatacccgtgcttttatttctctggattagtgagttcagatatccatgtaaaatttgcatggcaaatctatacgtcctgttattgtactggcatagaaaaagaaagtcctgctgattaaaaagccccacatctaagctgacagaatgctattgtatacgtacgcaatgctatgacgctcctagcaaccagaaatatcaacaccacgtttctatggcaataagcaaatgtttaagcttgacagagaatactctaatatgtggtgttcaggggaagttttgactattagatagaaattaaaggagatacctttgttcttagatatttgcataatatattaatgcaaagccaggaaaatgtagatttattacatgtgattttgtgagcacgggtggctgaagatacattccatgttgctactggccctgtttaatt

SEQ ID NO: 27674 - DNA, 1579 bp, Bovine  19866882005485
  misc_feature (1)..(1): n is a, c, g, or t
ngtatacctagagcctgtgactgatggaggatcctgggcatttggcagctgtaatacaaaatcagtgccatccacttgtggtaaccaagacaacaagaattgatgataatgtttgcttctccatcagttttgattcacatgttttctagagggactaaaaaagcagatttactacaggtggtgtcagacaagatatcgagcacaattctgtaaaagtaaataaaccttactattctaggtgtccattaatttttcattttggaggcttaccaaaacagatttgatcagaaaaaagaaagaaaatgttggtgtgccaggcactgagaagatcctggaccaaatggtagtgtctgctgcatatagtgtatgatgcatgcagacacgttacaggaaaattccagtctcaaattttgcagcaacatggaaagccgaatgctcagggaggcttatctaatggtgtgaagctgggctcaccttgcctgggcaagcgattcacttcgttaacaggctaatgaggaagataattaatttttcaagaagaagagaatgagggaaagtgttgtgtaggagaaatatatttctaattcacttactgagtaatataccaatggctgtgggcttaataattacctccatttaatagaagaggtgaaaacaaataacatcatttcatgccaaagtcactttccagaactcccagtttcccatcaaaatcaaacaagtttcaatttctaaagatttgttttctgtaatccacaatttaatatagaagaagtgtgtgtttctgtatttagactctgcttgaaccgtttcagcacctatagaagaattttcaaagaaaataattttagtgcttgaattgagctgcatttatacagaaccctctaatttcaaatagggaacaacagattttaaatctttaacatactgcgctggtaagactggtcaagtataaaatagttgttaaataatttcagtataaattcacttaaaaatttttgtacattaaaaattaatataataaatgtgttaatttcactgaccagaaacacttcaaacaccaatttttgataatttcataacaaggctaactgcatcttctgtctgtataccgtgtcttttctttgcacctgaactctctaaatgaggaacatctgctagtgtttaattcacatcatatgtttgatgtggttacttctgtgagaataatttagatttcatcacgttgaactatggagagactgccactttattttcaggaataatacttatcatttccaatctgatcttaatacatggggcccagagaaaatatcagaaaataactctttaatttgttggataatacttttcatcagataatagaataccttaaattttaaaatttgaatgaaagaatcataaaatacatcatattttgctttgttactaattattgattaatacttattcaattaaaatatttactgagggcttaatctgatgtgaagagtcttaaagatgagttgtacacaaatccttactctggaaaaggctataatctagtatagtaaatacaaacacttcacatattattcta

SEQ ID NO: 27675 - DNA, 1121 bp, Bovine  19866880489721
  misc_feature (1)..(1): n is a, c, g, or t
nagaagactctacacatggacatcaccagatggtcaacaccggaatcagattgattatattctttgcagccaaagatggagaagctctatacagtgaacaaaaataagaccaggagctgactgtggctcaggttcagattaggaatgtaaaaacaatgctgttctgttttcaaaggtcccttttctttgcccagaaactaagaatgtacttaataaatgccattaaccaccttctcataatgccattcccctgggcagagttggttagactaattctcactcctccttcccactgggtagggaaactacataaactaatttatacagggtaatacactacgattttctaccacaaaggatattattctacacaaagacaaattacgaactcaatcagccacatttccttttggctaattcccctcctaagccttcccagtacatcccaccctgacaaacaacaatctgtcaaaatattataggcataggaaaggaagacatgaaaattcattaaatgcctgttctgttatgaaacagcctcaattaaggtcttagacactattttttctgctttatagttattgattttgttttgtttcattaacaacaagtgatcaaagggctttgggcagaggcttttggtcttttccaccccctcaaaaaagagtatgattaattagtttgtccttttacaagtaggtaatggctagtgggggttcagaagttcttgggtctgcccccaagaagaaaccagcaaataaaaaaccttgaccctggggaaaataacagcttcccttgtctgccttcataaatttcactttgaacactccatcaatttgaacaggcaacttaaaaaagaaaaaaaaaaatcacacacactatagtagttcaggctccagttaattaagcagctctgaacaggagttctcagggcaggtggaataaggccaaaagactggaaaccagtttggcagaatattgtaaagagtcacacagttctttgtgaaaggatgaagaattcttccaaatggttataaatctcctcgtaaaatatcctttttgaatgtctcatatgaattcttttcttcttcagaattaaatttagtaactacgaagggatg

SEQ ID NO: 27676 - DNA, 1681 bp, Bovine  19866880520291
  misc_feature (1)..(1): n is a, c, g, or t
natgctgcaagaggatgcaggaacaagaagttcttatatccccctcttgtggcctctttaattattgccattaaggacagatctattgtattttcagagctagacgttagaatggaaattttattcttggatttgtgttcctagccattctagtttggataattccttaaaacctaatgtgaaggattatgcctattatgtttattctttgatagtaaattgtcatttgtatttgagatagaaaagtaatatggtcagtaagattctgtatcaattgatgttgataccttagcatcaccagctattagggtgagtcatgtaaattggtttgctctgtccattgcctcttagtatgtctaagacaagttttattttatgcattaatcttctagttgaagttttactgataagtttctaactttttgtgtggaatttttttttcagagttattcttagtactactgtcagtacaatttagaaaaataattacctgctgttcagtatacctagttatccatgattgcatggtaaagccttccagccattccttgccttaagagaaataaaaagctgtgctactgaaaataaacataaaattcctagggtttgagatgctaccatttctgtcattagttctgtctcagaaatcttctcataaaaatgaaggcaaaaaagtgtctcttcacacacttgtcaggacagacatgaggaggttggtgtgtaaaacttcagatggtcttgatgtccgccatggtaagtaacttggttttatgtcattgttttcttcctaggagattaatgagaccagaaggaagcatgaaactcgcttggtagaggtggattctgggcgtcagattgagtacgagtacaagctggctcaagcccttcatgagatgagagagcaacatgatgcccaagtcaagctgtacaaagaagagctggagcagacgtaccacgccaaagtgagcaggctgcccgggacggcgggaaacactgaatgcgtttgtttcggagtgtccctgagtaacatagccttgatgtttggcttgttctaatattattaaatgaattcctgcggtctccaagaacattcatttttttctttaagaaagcaattttttataaagtaaacgttaactatgaaattattcagagaaagtaggattattccatttttaccaaaggtatggtctttaacctctttgtccaagtgatcatttgtgtcaaagttatattagttaaactccagccacctaaaagtaacttttcattcaatgacaagtactaaccttgttggactgtgtctaattctgaatgcatgtcatcattgtagatggattgtgaccaccacactttgggctgttttgaacaaaggccaaatggacagtctctgatatttcttccttggccactaattattcatttaaaaaagactatagaaacttctctcttatatcaggagaccatgcaaaaatttattaaatcaccgagtacaggctttcatagtaaataattttaccccaatatgttaaatgttacatgatttgattaaaaagttagtggaagacttagaaaataagtcatagaggtgttgaaaatgatttccattgcatggcctcaaattggtcgtattgcttttaatccactttatgaagtagtagttggctgatgagagggtgat

SEQ ID NO: 27677 - DNA, 1968 bp, Bovine  19866880561525
  misc_feature (1)..(1): n is a, c, g, or t
nattctagataggctgtctgctgcagagattgctagagaagttagtcatctccctcagttcctgctgtaggcagctagagaatcccactggagcagggcagaaggctctacatggaaggatggctcataagacccgtagaataatagagtgctggcagtgagagcttatattcattgagtcagccacctcctctttatcagttcagttgctcagtcgtgtgtgattctttgcgaccccatgaaccgcaagcagaccaggcttccctgtccatcaccaactcccggagtctacccaaacccatatccattgagtcggtgatgccatccaaccatctcatcatctgtcgtccccttctcctcctgccctcaatctttcccagcatcagggtcttttcaaatgagtcagctctttgcatcaggtggcccaagtattggggtttcagcttcagctcctctttctgggtcatcattttccttcacagtagtcccatgtagtaacaggaccatttctgtcccattggagggtaaaagtaaggtagcttgatcaaggtgagctgacacgttaggagagctaggatatgaatctagtccttgtagcagcatttttacttattagatggggaagctgaggtctggatgagctctgtggctcttggaagcataactggttaatatagcaaggctgaagctaggccatagtcctggaaattctagaatcactcctcttacaagatgttaaaaagtctcatcattatgttattggcacgtgggagagcagggctgtgcatagactgatttgatttcctttctctttcccagatctgggctgcgaatgccggtgtcacagccagtcctcccaccgacctcatctggaagaaccagaactcttggggcactggcgaagatgtgaaggttatattgaaaaattctcagggagaagtatgtatcggttttaccaaagtgtcattttttttttaattgaagtatagttgatttatagtgttgtgttaattactgctgtacaacaaagtgattcagttatacacatatgtgtatttgtaaaaaaatattattttccgttatggtttatcataggatattgaatgtattgtttctctgtgctgttataaagtagggccttatttatccattcaatctgtaaaagcgtacttctgctaaccccaacctcccattccatccctcccccaaacccctcccccttggcaaccaaaagtctgttatctatgtccccaccacggtgtcaatttcatttgagagttcatcgtgcaaatgtgatttcttttcaaggatgaaatcaaatgtgaagtaactgattgcttaaatcagaccaaggctgctgagtcagtcaaagtaaagctaagtgcaggttttagattttaggaatgaaatatgagtttgtcgtagttttagattttaggttttagattttaggaatgaaatacgagtttgtcgtagttttgattgttagcacagattccagaattcagtctgttttcagtttctgtctccactgcccagtgaccttgtgactttaggtgagttccttcagctctcttagttttatcattttaaagtgaagatggtaataacaaagtacgataaatgagatgataatataataagagtaatataaatgcaacagtccttgggaagtgctcagaatggtatctggcctctggtaaatgcttatattattaaccttgttactagctttccacatgcctgtgaaactgagtttaaagattgaggagtgtacctttgcttgatgagtatgtttaacatatcagtcatagaattcttgtcaaagaacctaacctacccctgttgtcacataaagacgcctctaagttcccccagccacacacacatactaagagatcagagtgtctgcaaaggaaggcatggttacaggtcaggagttcttctctgctcccatagtgccaggtt

SEQ ID NO: 27678 - DNA, 1047 bp, Bovine  19866880565411
  misc_feature (1)..(1): n is a, c, g, or t
naatcaaacaaatgaccctgctttaaacctactgttcccattcaaacttggcacatcacaagataatatcagtaatacacggtattgatctgatcacaatttcccataatagtagagtcagtagacttctacttaggaagtgaagattaaaacacttgctattttaaggattacagaatctgatttgggtaagaagtgtcaaatttccctacattttttttaaccaccttcacttcctcctctgatgtctatattgaccattatttcagtttctggttaatatagacaatttccaactgaaatacaaagtttgatgggagaagagtggtgagaagttaatactacaggaattcgtgcaaaactcagggcccctgctcctccagggggcatttgcccaccagaactctatgtggaaaatgctttctggaggatatttctctgagatgccttgcatagagtgctccagagtatgctgaacatagagaatcatgcctctaacagttgtacagtttggtggcaatgtgagaaatgtagcaataagccaaacctaccatcaattataaatgccaaccacttcaatatgaatggatcaaattagaacttggtctctgagtagaataagcatttctgtagagaaagacagaagctgattaatgcacttcctggagtcccgtcttctgaagacggaataatgtctgacctcagaccctctagctcatttgacctgtgtgcctctacatttccatgtaacatgatttccaaataactagtgagattattctagatattggttcagtaattgcataagcatttaatcctaaatttaggaaaaaattagatgaatataaaaagttaattaaaagatacttgcttcttggaagaaaagctatgacaaatccagacaatgtattaaaaagcagagacattactttgcctacaaaggtccatattgtcaaagtaatggtttttacagtagtcacgtatggatgtgagaggcgaacaataaagaaggctgagcgccgaagaactgatgcttttgaactgtga

SEQ ID NO: 27679 - DNA, 1939 bp, Bovine  19866880776630
  misc_feature (1)..(1): n is a, c, g, or t
nctaaattcttccttaggcacttacttgccaacctcagcctcagttttctcatctgtacaatggagatgacactctatgacatgtgaaaagaaaccagcacaattcctggcacagagtatctaattaatggcaatcagtatttataaggaaatggaaattcctgaaaaaaattaactaggttgtgtaaagtcatgaagagctgggatttgcagccaagtttgtctgatactgtactataagcccatcccaacacacatgatgaaatggaaacttttttctggtgtaaaataagcccacagtggacagtccagactgctgtgatggctccatggttttcaatggcccagcctcctttcacttttctccccttcctccttggcaccacctccaggtatcctcagagtcacagaatggtcactgtaccatcaccatgttcagaaaaaacagaacgaggaaggagcaaaagggaagaataaaagatgcctactagatgttttcttaataatctgggttcaaatacactgcctggatttgtgcattgtgcccagtgctgacccttctagtccccaaagcaaaaatgtagtaaggaagcttcccctatgcagggctatttgctctggtgtgcagtactaggtgtagtggaaaaagaagatgagggttaagaaccagatttcttagatcacattgtctcactgagtaggacagctttgtctctcatatgtcagtttctctacctgtgaaatgaggaagctgagtgggatgatcatttaaagatggggctttgctgctgaccaggtggccacctggggcacggagcaaaatgttagtgttaatcacacacctggtcctcggctctcactgtacactgcaggtccacaccttgctgagtcatgttgtcagggatccggagtgttccctggagccctgccatactgcctttccttccttctacgctttgaaatgcccccacattttattgcatgcaaccagcggcgtgcaggctctaagggccccatgctccagatatttgggtgctcttacatataaaaatcctttttcctatttctcgcttgttggtctctgccctcgctctatgacaggggaggcaaaatgtcattttaatatatccttacaccttcccagctaatcctcatatgaggtgtgtggcagcattcctactttatggatgagaaaactaaggcgtgggccttccctggtgttccagtggttaagaattgccttgcaatgcaggggatgtgcgtttgatccctgatcagggaactaagatctcacatgccttggggcaactaagcccacacatcacaacaactgagcccacacgtttcaactagagagtacgtgggccacaacgaggatctcacttgagatcctaagacttgatgcagccaaacaaataaatataaaaaaaaaaaaacaagaaagaaaggaaattgaggcttagagagggtaagtaaggtcacaaagcttaggtttggtgtcaggatacaaatatagatccatgtgatttctagttcatgaaatatttgcaatttaatttcaggaaatactgtatttcattaagccttcccaatggtagacaaatggtagaatttctagttccctctcaagtttgaagtatgaaacattttgtgtacaagggcattttcctgtgccccaaggtcattctttgcctgctccctgctctactgtgaaattgagcagcaatggattagcctcacttattctgcagagtgacactgaggttggaagctctgtggtctctgttctctctctttctccctgctggcatggatcagggaatgcccaggacatctttgccagctggcatggaggcctcattgtcacttttgaattctaaacaggacatctgctcttacagcccaggtacggatgcctctagctggctccaggaaaatg

SEQ ID NO: 27680 - DNA, 1246 bp, Bovine  19866880930412
  misc_feature (1)..(1): n is a, c, g, or t
ntattcgttggaaggactgatgctgaactgaagctccagtactttggccacctgatgtgaagagctgactcattgggaaagaccctgatgctaagaaagatttaaggcaggaggagaagtggtcgacagagaatgagacggttggatggcatcaccaactcaatggacatgagttgagcaagctccaggagatggtgaaggacatggaagcctggagtgctacaaagaggtcgaaaagagttgggcgcgcctgagtgactgaacaacactgattaaaatatggtatgaatgcagggaggtgtgtgctgtgtgaggtagttctatatggtgataactagggtgtcatttgttatgcatttgggggatttttatcttgggattgctttagctcagtgagttcatcttgtagaaagtagaatatccaaattctccctagactgagctgatgataacaattcagaagctaatccagagtcagtgtttgcctttctcttaaaatattcctgcagtaagctgtgcaaagattagcagcttacacttgaaaataactcacgaagtctcagaatttctgtgctctgcagatttactgcacactctggtgctgtctcagacacaagataaatgctgggttagaaatcctgtctggtgaagcagataaaatggtaacttttccacacagatttgtcttcagaacgggaatggcagtgctgtgtgtggcccaacttggttgtgaaaagttgccacaagatggggttctcgtcatcaggatccaacctaggtactttactgctggataaattaggttatagaaatcactttaataggcattaagaagggtagttttaatacagaggagtattatatatgctcgtgaaatttagactgaaaatccaggactcagttaatacgtagttgggtgccactgaatatgtggcaggagactttggggtctatttaaaatgacagactttataccaaagagaagtttcctgaacgtgagctgcacctacggctgttcccacagagcgtcatggggacagagactcaggggctgcctctctctgcagtagatgcgacttagcctcagtggcggttagggctgcattattgaactgtttcataacgaggtggaattttccccttttatcttgtcttcagtggtctggtttcactactgtgtttagatacagatttattttcttctcacctcagagtttttgaccaagaaaattctggatgctcatat

SEQ ID NO: 27681 - DNA, 2050 bp, Bovine  19866881159352
  misc_feature (1)..(1): n is a, c, g, or t
ntatctataaagttcactaaagcaaagcacagtaaaatgaggtatggtaataaaaggcattaaatttatcaaataaaaaaaaaaataaagtgctgaaaaattaaagctgtcaaaaaaaaaaaaaataaggggccatggtagatgaaataggtttttatgagccatggaatctagtcccatcttttttgtgtgtgaaaacatgttccaacttagaaatgatcttataggaagataattcgggatgcaggaggtttaaaagcccacaaaataggttcaaggacaagtgaacaaagtagataccatgacatggggtatgtctagaggtagtgttactgatgacgtatcaatatagctgactgaagcttaggtttcccttcataatccaaaccactgaatattagattgttgagtttgtttgcctgttcttttaacaaacttccgtcttctgcttgctagactctgtaaagtgacttctgtcagaaatgagcaaagtagtatgaatacggttcttatttctgtgattgtcagacaagtacttttggcatttatatatttcattctgtaaggccatgttcattagtaggttccagactgtatttatcataattcataattaccacctgtaaagaccattttttctataacattgtaggtaactgacttactaagtcaacttaatttttcaatgcatgttttcttgctgaggcattggagatatcaggaaacccaattaaactggctttaaagtaatggggatatgtgagctcacaatgcaacaatccagggagagtggacttgatccactggctcacccagcgtccccagggatctttctgcggtctgtttcctgggatctgtccgcggtctgtttcctgggatctttccgcggtctgtttcctgggatctgtccgcggtctgtttcctgggatctgtccgcggtctgtttcctgggatctgtccgcggtctgtttcctgggatctttccgcggtctgtttcctgggatctgtctgcagtctgtttcctgagtgtctccctcatggatgcaagacagctgctggctggaggtgccgtcattccagattgacttcttgtgggcaggagcatggtcccggtcaggtcctcgcctgggcttcactcttgttttaccagcctggatcatatgcccatctcttagctagttcctggagttgggaggacagaatttgagcttgagccctcctccacctccacggctagatcacactccgctccttgtgacacacacgtcacatctccatgtgagagagggtacccaggtaaaactgcattcttaatgagaaatgagtggggtggaatgctggtgggtaaaagcagtaagtgtcaccacagaaaacatggattattattattttttttttaatgaggaaaataataaagcggtctctctgtacctctaaaatacaggcgtccctgaaacttttgtacatgtagatactacttgtgtgtcctgagaccccatagtttaacagccagcctctttatcaataaaaaccaccttgatttgtggtaattgctggtttctgtggtgtgaatactcagactggtgattccaggctacccacatggcatgactgagtgcggagttggagagacagcatgggagctagccctgctgcactgctgggtagatggtgtacctgtacgtacccaggctttatctggacagacccgtgacgtgttgatagagaagcaaaccatctgtgtgtgcctttcagatcactgatacggttcagtgtccttctaagaggaatttttttggtaaagacatttatctttagtaccttttggggcctaaacctcccaacaagttttgattctgaattttattatttttttatttaaatctgtagacatttagctcacttatattccatacaggctttctgcattagattaattggtttttaaatgttgtcaaatgaaaagtgcttaacagcaggcttaaattaaaggcagttgtgctgaagtaattcataattaatgaagttgggcaaattgctattttctaag

SEQ ID NO: 27682 - DNA, 732 bp, Bovine  19866881281656
  misc_feature (1)..(1): n is a, c, g, or t
ntaagtgcttaaatgactggcacctcttgtaaaatgtaatcttcgtatgtcaaccgctattattgtcattttgtggatgaaaaaactacatcttaacgtaaatatctcactaaggttaattcggccttaactggtttacttggttgaacctttgcactctgaggaaagcacccttattttcttctgttttctgactaattgaaaatcaattctttctacaaaagtcttacagaatatttattttatatctccttcacagtccataagaaaaatgagttgtagtttgttaaattccattccagtttttcttagtatagttcagattacttccttggggcatgttgatcaatagcatagtagagtaaagatgtttttaaagccataaagcttagcacagcattatttataccagcagccacagaaacatacatacaaaattatcttagagtgtttaaagcacttaatgtatttctaaaatctaaattatccaaatagcatcattaaagaagaaaacacataaaatgtataaaattaaagtggatttttggaatgacactatggattttgtgacaagctgtgggctatgtcaggaaaaggtcattcgttggtccttttataaatgatgctgtttgggaattcttcccagggtagttagagatggatgcagagcttcagttctcagtctgcatttctttgccaactctgtgatcagtgggttacatttgctgcctg

SEQ ID NO: 27683 - DNA, 2422 bp, Bovine  19866881286854
  misc_feature (1)..(1): n is a, c, g, or t
ncttgatgtactcctttcccatttggaaccagtctattgtccatgtccagttctaactgttgcttcttgacctcatacagatttcttaggaggcaggtcaggtggtctgacctattcccatctctttaagaattttccacagttttttgtgatccacacagtcaaaggctttggcatagtcaataaagcagatgtttttctggaactgtcttgctttttcgatgatccaatggatgtgggcaattaacctagggaaaaatgcaaggtctttctttgctttccaggttaaaggttttgaaagctttgaagaacgagaagatccatgtgacagagtatgtcatgttcagggtaaaatagaattactaacattcatataaggtcagatgtttgtgttcagtagagataaaaacaggtagcacttagtaaaatgaaacccaatcacatgaaatcagtatgcaagatatcaatcttttattcaacaaatatatatattgagtatttagtttactttgtggaaggctctgtcctagatgctgggagatgttttcctctacttaagcttatgttatggtgctcatatcataatgtaattaaagacaactcttgatgattaaagcatgacatgggatccacgtcagcttttccccagagagagagccaaagcctccctcttgattcaaggagtcctgcagggggatatgtaaacaaacaaggatgtcttcaggagaatcagataagggagcattggcaggtcatgaccctgccctctgaataaggatttgggagatggggaaaagtggttggtgaattacatttaactttttattgagcattatcctgaagtgcttttcatgtgtcttgaatactctgaatttgctctttttttttccctcttggtcttctaaaaatgagctttgtagataaggtcaactgaagttcactgcttctttttctcaggtctgtgtgcctctaagatatgcagatcctctctccataccagtggattgtgtggcctatcctttcttttcaaacttctgagaggatttgcctaatataaaatataagatagctaacattttacttatgactcgctatgagctaggacagatatgaaacatttttaaagattcagtgtttggctggttttcttcttatgcccattgcatggatgaggaagactgagggttagcagatttaggtagtttgtccaagtaagtgactgaggtggggtcatacccagatccaacttcaatgcccttgaccttaaacaattatggtgctcaccactcaacacaaaagtatggcgtgcctgctgtgtgctagttcctctggacactggggatatggagggcaggagaacagacagaggtcttgcctgtagatatttcttcagctatgtggggggaaccatgaacaatgaaacaaacatgaaatgtactatgagggagtgagagttgtatgggcaattcgatcctgtatggatagttacatgtggatatgtgttgattacaaacgtgactgaaaaaaagactagaaagacacatactgtaagggtgattacctctgggtggtcagatttttattttcttcttctcatgtttttgaacattttcaaatattccgcaagcagctgtatacttccaatataatcagatgagatccataaagattattaaaaacagaatttaatcttagaaaatcctggcaaactgcatagagtttaggcacacccctcttaccctcttttgtttcagtcctggaagcaaagtgtgtatttctcccctctgtgccagtgtctgacatatttatccctgcccccagggatcatgttggctccctctgtcccaagcttctctaagtttgtgcacatcagtccttcccaaggctggccccacacgtgaatctcctgggcagtgtttcaaatactgatgccagagcttcaacccccagacctgctgaagctctgtgtgtgtgtgtctcccaggtgactgtcacatatccagggttaagaagccttggatggtgagccccttccccctgttcctcagtgctctcacttctgggggaacagccagagcacctccttcctctctgtctcacctggtctgggatgctcaggaaagagaaggaggagggaaagacccgagcaggtgggcagatcctagccctcccagcaccaggctgcagcccccaccaccttcctgacctacttactcagggcctgcagtgcaagcaagtgactcaagcctggcagccagcagggattgttaacaaaagccgagtactgtacagatgggagcagagggcacactccagccacactagaattctcaccgttccggaacacagcgctggctgtcacagcttcgggcctttgcctgtgctgccctttcagactgaaatgtcctttgatgccatctcc

SEQ ID NO: 27684 - DNA, 1117 bp, Bovine  19866881622918
  misc_feature (1)..(1): n is a, c, g, or t
ntataaaagttgctgaaaactgtgtgtgtttgtatgaatagtgcactaaataaatgaaggagcaatattttctcttctcaaaaagaaatatccaggcaactgaaagagattactcgcttttctttgttgtgttttaaaccatgtggacagtgatgaacaaagattctatctacttactttaggatgagaggggcttttcataggtgggttaatggaaacttgagtaatgttgtgtctggctaagccagaagctacattttgacaaccaaaaatctacctgattttcatgggtcacagaaactatgctaatcaattctacactgtatttaattttcctaaggtgagaagcaagttttactggcataaacccttttttcctacttgcccttatcactccattttttcaagtagctctttcatttagcgtcttctctcctttgaaccaccaagtattcaaatattcattcctcctactaggataaattttatgcaacaatgaagagatcttcctgtcgcaatgagttgtgagaataatcattttctcctacatgtctctaatttataaaacatagatatcatcaatttctaatggaatggatagttacacttaattattttttacataatttcccactaatgtgtttaggagaagtgattattggagatgtgattgaagcactagaaatgccatttggtagacagatggttcatctcaacctaaagttctatccgtcaataggaaaacggagtcatgccccacgtgggagagtgggtgtttgaagctccatgtctgtgtgtgcgtgcacgtgcagacatgtgcttatataggctgttaaaactttctgtgtgtgtacaggaccagtatgaagagtttcaagactcattaaaatacctacattgtgaagtgacaagctccatagatttctgagtgaataatgttccttttagtgactttatacatttcaagatgtaatgatcattcagaactcattaccatctgaaagaatatggggagttggtagaaacttggcaattgtctttcaccaatgttaattcctgccattgggagcagaaatagaacttgtaggaggagaaataaatgctcacactcacccct

SEQ ID NO: 27685 - DNA, 1421 bp, Bovine  19866880488828
  misc_feature (1)..(1): n is a, c, g, or t
ncgtgacaggcagaaggcttctggtcctcccatattcagcctgcgtgaagagtcagcagttccttctttcgctttgggcccgaggaccaaagcgaagcttctttctctaacgaatctagggaagtgactccaagtgaggtttcccttcttgataatacatctactcaaagcaagtggctgaaatatcaaaatacacgccagtgcaacttgactactccagacagagttgatgagaaagtaacagacggcttctttgctgaggctgtttctgggatgcattttagtaacacaggtgaaagagagaatgatgctgtgaatggaagttctttagactctgtgtatttacaaatgatgaaacacatgcttcaacagcagcagcaggattttagcagtcaagattcggtttgcagaaagaaggcattttctttgaatataaacgaggcttctaagactgaggaagttcagaatatgttaggagagtatgcctgctacaactgcagtgtaacaggagatttacaggtgaggaaatgtcccagtgttttcttggtgcatcttttccagtacttatctgaatttcagcaaaagaattaccaaagtcatacaggtgaaatgattttagtcttgaagccagtggctttgggatttttcttttttttttttttaagagttttccagaacttttgctacagtcacatttttttaaaaaattctttttatttatttactgaatttatttggctgcaccaggtcttagatgtggcctatgggatcttagttccccaatcaggaatcacacccagggtccctgcattgggagcatggagtcttagccactggaccaccaggaaagtcccagtcacatctttgacttaagacctttctagaggttgtaaacactaaattacgtatttgaaagtgtctggtgcagtatctggacataaaaggtacttaaattatagttctgtttccaccatcacttccactactactactactattgttttcatttttacaatcagctcagttttgattattttcatttcactatgagctcagttttgctgaccagatcattattagggtaaaggtacatcctacttacattggttatgaacaattcttactgtaattgtgaccagaagtagagatacataatgattcactcacatcagttaaatttttcctacaaaaaatttaaaaacatattaaggggccgacaagaaaagttagtcttatttatcattaaaagtgccatgtcatagcctttcctgctatactcaatttcccgtttaaaattagaaaatgatttcatgcattctggaaatcaaaagaaaaatttaatattatctatataatttgcttattagtaaacagtatttttctggaattattgtaataacttgaattattgcatttcagga

SEQ ID NO: 27686 - DNA, 5307 bp, Bovine  19866880574754
  misc_feature (1)..(1): n is a, c, g, or t
ntacagtcttccttacagcgatgatgatttgggtaatacggagaataataaaatcaaccattgttcggtcatgaacctataacaaggagccatgtgaaggcatctggagttttgagtcaatttgttggtagttgatctgaaccaccccacacgctttcatcagaagctgtgtgcacaaatctagttttcctggtttactcaaattatgactctgtctttggctaccagattcgacttttcttcatttgtttctatatccctgaaacttgccacccacttatcagattatcgtcctccattaacacactggccagtgtagtatgagaaaaatactgggtggtgtattaacaaccttagattgccctagctttattatatgttattgagtaagtctctttagctctctagcccttattcatttctaagaccctctagatttcacggccccaaatcaactttcttacgatgtttgtcaagaaaagccagaaaggattccgggaagtttttttgatttatttgatttattttaattcaaatttatttattcaaataaaattaaaattcacagtgaaaccccttgtgatcggtattccaggggctcttttctgtttctttttttaatttttctaggaaggggaagtggactgaggagtggagggaagacggcatattgctggaaatctcctaccgcttttgcagtatgcaattttagatattcctcagtgaacaaaaacagtgaaccgaatatttcaaagctatatatagactttagattttttaaccctttgcctcctgagagacaggcctagatcatcaggctgtgtggtcttcagcaagtcatttaacctctctgatctccatttcctcaagtgtaaaaggaagtcagactggacctgtctactccacagtgtgatttcaaggactaagttaaatgatacatttaaaattgcttggtaatctgtgacatactaatatagggtattagttactcttttgaaattgtattctttatcactattttattattaaaatagagcaaaatattttcaaccatgacgaatgatctcggcatctatctgcatcacacaggaaaatggcagagtacaatgcatgtcaattttattttaatatttaaaaaggcataatgtgcacgtacagagcattttgtctaatagatgtgctgcaatagtttatatatgtgtgtaccttatacatatacaagaatagaaacaaggttactcttgctaaattcctgattatcttcctgatttctcctttttttgatttgcaataaaatatataggaaaaggagcatatatagaaagatttctccaaattaatttagacatgtgtttattttctgcaagatgaaaattggtattttttaatttaaaaaaatgtgctgtgatcaaatatgtttagtctatactgtggactctatgcttatcttacagattaaaaatacagcaacttatgaaaggttccaagaaatcttgcaacagaggaatctgttcaacttcatttaacacggtttcccaaatttatttaaccatgacactcattttttttttaactaaccgcctattaatagcttatgaacctccagtattctgcataataaaatgtaggaaatgctgaaacctgttccaaatatgaaacagtcattataaaataaaagacacccagtgtcgactctacactaggcttgctgagctcttttctcctcactaacatttcaacctaaaagtcatcctggaaaaccccgacaaatgcaaacgaaacatgccaccacgtgactgagatcgaacgaaaggcagagggacacttctggcaaatggtacaaagtattacagttgttaaacaccatcagtcattttggacacgaaaccgcttctgaattataccctcagggcctagggggtgaggggaaaattgcacctaatatgaggcaggcgtaattgacttctgcttgaaacagtcagtctgcccttggcaaaacagccaaatgtaccttgaaaatggcaattatttattaccattggattttctgagatttgtgaaaaactcaaagtctgccagactctataaaaatattagtctcaactaatagaccttttaaaatttcttttaactttcaagaataaaatatgaggaattaagaccatcatgtttagtcaaaaaaaaaaaaaaaagaccatcatgtttaggaggaccacatgctcaaaagatgaccttgatgtatgttacaattttccacatgctatataattcaacaaagttttgtgaaaactgatgctacaattagaaaataatggccaaaatatttgtgtacatgcatactgtgagaataaaacaaaatgctacactctccaacaacaagggttctgttgagtgtttttagtgtttgagtagaaatgagttcccaagggtgaaaaatccaagagtcacgtgtggatgcgagagttggactgtcaagaaagctgagcactgaaaaactgatgcttttgaactgtggtgttggagaagactcttgagagtcccttggactgcaaggagatccaaccagtccattccgaaggagatcagccctgggatttctttggaaggaatgatgctaaagctgaaattccagtacttcggccacctcatgcgaagagctgactcattggaaaagaccctgatgctgggagggattgggggcaggaggaaaaggggatgacagaggatgagatggttggatggcatcaccgactcgatggatgtgagtttgagtgaacgctgggagttggtgatggacagggaggcctggcgtgctgcaattcatggggtcacaaagagtcggacacaactcagtgactgaactgaactgaactgaactgtgatggagaaatcacctcagcctctgaagggtttcaagatgaagacctggttgacactgttgaagcttgttgtattagcagtggtttcctggggaaaggaggaggggcgaaatggagaggggcctaggggagacaagctcctagatttgattctgccagattccacaaagtgtgatacatgttcgattggaaaatttttactactcttactaccggaaaacaaactccatcatattcctgtcacctacaaatgcgcttttcaaggacgtttgccgtctgcttctatggagactggaccctgtgctactgcagctactgaccttcagggcgccctgaagggagttcagggtggagactgaggcactctgtgcgccagggacactgatgggacaggtctttagatggttagatattctcaggaactgacttcatgatcccaatccttgcatctcctcatatctagaaaagcattaaatcccttcatggtgacatcagctccttgtgaccagcagaaaagctcttgtaaagtaagtaactgattgcatggaactccccttcaccaaaatcttatatgttgaccttcccccactccctctttggaggagttgctcagagctctctctgaggtgctgtctcccgggctgcagtcctcattttgtcccaaataaaacttaactcacaactctcacattgtgcatctttttagttgatgctcttgactagtgaagatatgcttagcacaaaagcactaggagaaaaacctaaaatttatgtaggttgaaatgaatgaaatattatgatacaaattaagtggacagtgcaataaaagaaaatgatcctattgcattctatgagcccagtccatgtttgatgtgtaaaatgaatatatatgctttccctttttaatatagttttattgaggtaaaatttatgtaaaataacctgcatgtatttaaagtatacaatcagaagctttaatttatgtatatacatataacatatgttaagcaatcaccacagttaagataatgaacatatccatctctcccccaaatttcctgatgtctctttataataaaatctgaccctctctatacccaaccttgtccccagaaactcacaaatctgctttctgtcactatggattagttggcgttttctagagttttatcagagaaggcaatggcaccccactccagtattcttgcctggaaaatcccatggatggaggagcctggtaggctgcagtttatggggtcacgaagaatcggacacgacttcactttcactttcatttttcactttcatgcattggagaaggaaatggcaacccactccagtgttcttgcctggagaatcctatggacgggagagcctggtgggcagccatctatggggtcacacagagtcggacacaactgaagcgacttagcagcagcagcagcagagttttatataaatggaataatacagtatgtgtttgttttatgtctgttttttttttaacttagaaaattattttgagataatctatgttgttgtagatattaatagtttgttccttttgtttacccatttgccagttgatggatatttggcttgtttcaagtttgtggctattacaaataaagctgttgtaaatatttgcatatgaatctttgtatggattcatgctttcacttatcttgggtaaatatttcggagtgaaatggctgggtatggtaggtgtgtgtttaactttttaagagacaatcatatttttctccagagtgactgtaccattttacattcccaccagcattgtatgaaagttggaaaggacgtggaatcctcaccaatatcccatgaaaatagaccatactatcaaaaatccaacatatagatcacaaagaatttttttaaactaatgaagaacttactcataaaatcttgcagtctgagtcctgccaaactttattattaatagcagaggaaacccaaagtaatcttcgctaattctcttatgaattattggccctagaatgtaaatttcaaattctgtaaacaatcacatcatttttctttttgctattaattgtaatgaatctaccagtgaaagggattttatctatctacttgtttattgcaatatgtgacaaaaacatggaagaagaaattcctttcctcagtgtcaaatagaacctgtaaagatgtctctgagataaagtcaaaaccatcactagaaaattggttactatctgtttttattattgcattcactgatccactcaggtccaagcatcagcatgcagatctagcaatgaattagatgttccaataagatgagagtccatcagacagaaatatgtttgtaaggaatgcaactgccactagaacgtaagctccatgtacctggggactgtttctcttatccctgttttcctagtac

SEQ ID NO: 27687 - DNA, 2471 bp, Bovine  19866880626198
  misc_feature (1)..(1): n is a, c, g, or t
natggattcctgagatctatgcctcttataatcctcataacaaccaacagctgaagtttattgctaatgctacctctttctcaccagaccctcaacatggaaaataggccccctgtgatcgaagcccatcttttttataatcttacctcctacagttagtaccaacagcaggagtagcactcacggcagcgttggtgggggggcataggatgcattatatctaaagtcatgaagcaacatcaaaaacaggagaatgagaaataacattagaagcaggagcatcaaaagcttatagaactggatgttaaatgttatgcaaagtgagtttatatccaagagagctatcaataaagagatttttaggagttcttttttacatgttgtttgatgctgtgcagaaagatggtagctgaaagcagttgtatgactcctggaccctctactcaaaccctgtgcacaggccctgaggactcgttcttctgaatcccttgctattctggaactggcattttcttcatactcctgtgcctttgcaaacacttttcctttcctctgaaatatccattgtccctcactcaaggcgtccctcttctctgctcccacagcatttatggaattggaattcaagttgttcgtgtatatttcctttatgattgtaagttccttaaaagcagagccctgtttaagtcatcttaattccactaaagtgctgtaacattactctgtattaatatatagtaaggaaatatgtaatttgatcattgaattattcattaaaatacactgagtggaaatcctgatgcaatataatggttgtagatattctcacacatattcatttattcacttatctgacaaatgcgtattgagattttagttttttacctttttaatgtgtcagaccaggtgctaggaatgggagacatgaaagtgacacaatcctgaccattacagtactctctgtaccgtaagactatacggagagtacggtcttagcagcaagttgatacttatactctcattaccaaattcctacaaaatatacatagactacatatatttcattgaaatacttgtatacttaatagattaaaggtagaaattttaatttatgcgttggttattcatcaagtctttatatatcaatttcctctgctttataactatagttttgagtagaattataatgtgcatcaaagatgatttccataagtgacctcacttttcaaggtttccattactgaggttccgagtcctgctcagtggtaaaaatgcaatagtacatttagtgcattaaccttcagtaacaaagtcaaaggcagatctttattacctatgtccataaactactagatcttaatattagcccatttccccatcaaatcacattggaacacaaaaattccacagattcgtgtgtttggtttattaattcaggaattgtaacgtttagaatccacaaaccaaaagtgtcatttgatctctaaaacatatattggatagttgaacaacttttttattttgatgaaagtcatatatcagtttttctcaatgcaaagctaaatattaattaaaaacactaaaaggtgtacatgaaaggaaaaaatttccatatgctaattttgatggcctgggtacaaaattctgtgctaatagccaaatgtttgggcttccctggtggctcagacagtaaagaatccacctgcaatgcaggagacctgggttcaatccctcagttgggaagatcccctggaatgccaacccattccagtattcttgcctggagaatccacatggacagagaagcctctccaggttacagtccatggagtctcaaagagttggacgactgagcaactaaggatatacacaggcaaatgttacgttaagttacactaagtacatttagacttagtaattatactaagcaaagtcatgtgcccagaagcaaaactgcaaaagcctacatcatgaaagcaagtgcaataccaaaacctaacacaaactgaaaaataatttatactatattgctatcagtttttaaaattcaaaattattattcaagatgaactccatcctatattctgctttgacaattttaacttattcttttaagcaaaatctgtttggagtctaattttcctgtcaaatctgttcttggcaaagatttctttaaatctagtttgccatttgccgtttgtttaccccaatatgattaccaagctccatcatgagctccaaggcactgagaatcctgagcttaagaaaatggacaagactcctgctctgaaagagctttctctagaaaacaaaccaggaaatggaaagagcaataataactagagaagaaatcaaaatctaatttttgtggctcaattcaattcactaaaagtcatagacttattatcttgggaaaagacactaaatttcgtcacaccctttagtctagatgaatttctttaactattcag

SEQ ID NO: 27688 - DNA, 2171 bp, Bovine  19866880772420
  misc_feature (1)..(1): n is a, c, g, or t
nttggtcttcaactctctctctctttttaaaaatcttttaaaatttatttttaattggaggatgattgctttacgatcttgtgttggtttctgctgtacaccaatgttcagttcagttcagttcagtcgctcagtcgtgtctgactttttgcgaccccatgaattgcagcacgccaggcctccctgtccgtcaccgactcctggagttcactgagactcacgtccatcgagttggtgatgccatccagccatctcatcttctgtcatccccttctcctcctgcccccagtccctcccagcatcagagttttttccaatgagtcaactcttcgcatgaggtggccaaagtactggagtttcagctttagcatcattccttccaaagatcagctataagatacatatatcccctccctcttgagcctccttcccaccccaccccccattccatccctctaggtttcaactctgttttaactcacccttacttctggttcccaaagcttataaatttgaatcgcttaacagtctctctctctgtctctttctttgcaaatgatgaagttatggtctacattcatagctgtttaatggaagaatttacctacaacacacacaagacaaatacatacacatcatttaagatatttcacctaatcgtgccctaagccatacagatatctactatttagctcagtaggagcctgaagttatccatcccaagacggttggttcagtggttcaataacgtgatcagtgattgaagcttctctaggccctctgttttgcagtcctcaagtgttaagtcatctctcttggtcacaattccaagcatcatgtctttgtataatagctaaagccaaaagcaagggtagggggaaggtggtggccaggtcttcctctggttgtgcctccttcttataagggagggaaatctttcctaggagccatcctgcaaaagcctcctttcatttcattgttagaactggatcatgtgtctgcctaccctttgaaaaatccctaaaaatgaacaggatggcatttggttgggtacattgtcatccaaccaaaatggttgggagaaattagagaaatgtgtttggtagtcaaccaacaaatctgatacatctacataaatagaattccactgaattttaaatctcataaatctgcagttaattaactggatgtttaccatccttagatttaaaggtgttatcttatatcaatatatctatctatctcatagatatgtatgtctgtatatctatatctatccatctatgtcatatatatatatatgtatatatctacctcaatggaaggaaagttgtttttaaattctttttctgtttagctattgctataaggacttttgtggttggtgtttccatggtgatcaaaaacattgtcatctaaaagcatttctttagaacttaacaataaaagacacagtttagatgatggtcacaggaacaattaatgtggttctcgacaattgctgagaatgtgttttgaaagaatttattcttcagttggatatgatgtatgaattacattactgaagttatatctactttaaaattttaaactgtcatcaacagtaataagagtctcaattttatattcaaacttctgagagaatctgttagagatggtctatctaataattcttatattaaatattctcttatcttttcaacttcaaagttacactgagataaatgaaattttttaggtgggctctcgttagttcattcaacaaattttttggatgcctaatgtgtatcaggcagtattataggctttgggaatacaacactgacagaaatgaagtccttgctctcacagagtttatattctaataggtaaaaaaggtagcaataaagacataaaaataaatacatatgatctcactggcattaggatgagtactatcaaaaagcagaaaatagtgttggtgaggatgtgcagaaatccgaaccctgtgcactgctgatgggaatgtgaaatggtgcacctgccatatgaaacagtatggcagttcctcaaaaagttaaaaatagaattatcatatgatccagcaatcccacttctaggtgtgtaaccaaaagaattgaatgcagaaacttgaacagatatctgcccacttggattcaaagtcgtgttat

SEQ ID NO: 27689 - DNA, 1195 bp, Bovine  19866880777103
  misc_feature (1)..(1): n is a, c, g, or t
ncagaactatgtgacgcagttgcttacgaattaaaagtgttcctttgggttcttatcatttgtctgaaaactacagaagtgccagcatctacaagctctggcgctctatgagcataaaacggtgacctcgcttgagcatttaaaaaatctatttaattcccctgaagaacagacaatgataactttctgttactctggggagaagcagatggctttcttcaccttaacggtcataaaattggtggggaaagtaatgctgatcttcactaatgaaggaaaattccttttgcaaatcctgctttgaatgattttttttttctgttaaactgaaaagaggcttacttcctcaaatctgtgaaagagaagattcacaggctctacggtgagtgtatcaaattctccctaagtactgtactgatgtcatgcactacggcattaggctaattaggaattacgcctgttttcagtcccatctgtattttcactcagacaaatggaatatgatagcaatgaaactaagtggttcaatgcttatcacaataaaaatttccattaggaaaatatgtttaagagtactcaggatacctgaattacccttaggtcacttaccagaacattgatgcttcatttctaagaggctccattggaagtggcctcatcaaactgctgcacaaaatatgtctaatgtaccagatcgtgatgtcaccggtggcataaatggtacattaaccctgccaagcatttagtgaattcttgaaattttatcacttgttagtcatgaaaactgagggggaaaaaaaatattatatacccaacttggccttcatcccatgcagcctcatcatatctttgagctttagctgttctaaagcatgtttcattaatgtgactcaaagaaaccacagctaaatcataagcatcacagactcccccttgtttccatccctgtgaattcacagtggaatggccaagggatggtggaaacattggggcagctactgaatccaagagaacatcatgcttccagtgagaaatgacagggagctgtgagtaattgcattttcctgtgttctctacatctatctcttaggcaattgtggaacattctatagcacaccctgagaatataagtagccccccaaattttatgtcagtcaataacagttatctccttgagaagaaaagaccagcagaa

SEQ ID NO: 27690 - DNA, 2216 bp, Bovine  19866880780962
  misc_feature (1)..(1): n is a, c, g, or t
naaactgttctttgcttgctgaagtgtcagtgagatctcttataatcaagactgcaaagttctacacagacaactaatctgtttgccctcttttctattgccctttttaaaaccttactgtttatcctatatctttgttttgctcactggtacattcccatttcctggtatacagtaattcaaaaatctgttggatggtgtcatcttagttgatacactaaacttacacacacactaaaaatgagttagcaaaggcctaacaggaggcctggggtgatactaagacaaatgggaagtttcatctgtcttctctggtgcactggggtgggagacgctattagttggtatgcaggccttgaggctgaccagcatgacaatagattggtgggctaaagcttttgggtatcaagatgaccaaaacaccatactagtcttagataagggtaggggaaagcagtggatttgggttaattgctgtatttggggaagactgggactacatctccagaagagatgaagattctgcccctacgcttatcttctgtcttatatcctttaaagctcagtaaacagttattagattaaagcctatttgtgtctcctgagtctgtcagctataatctgaaagtgcagcagtgatgctgcagatagaaacagattttgtttcaaagtgacatccaggaggagggtacgaagccattaatgcatttcacttcaaaccgccaactcaatgtgcattctcatcaaaggaagagtattttggcatttttaaaacaggcttctgttggtcgggtaagcactaatttctaaaacataagtaatttatttagatgatgctagcctaactcataaaatggaagtacatgccaaaattaaccattagaaaaacaatcaggtgctgcataaccatttatttctcacctcactctcacttcaacccatcctgtcaggctttcctttccatcattctaatgaaactgaatactagggtctccactgtctaccagacctctcaggagcatttgcagttgctaacgccctcgctgaaaacattttcttcatttggcttccaggagttgtcttctccatttccttctccggaccctccgactctgtctgctctacctttccatgatgctcaggaactgcatttagtcctgggctccctgatctacacagatgccctttcagagggtctctggctttaagctccatggctctatatgttgatgtttaacaaacctatctgccccactcccgacttatcccattatctccccattccaacaggcaaatacccacctgacctcttcacttatttatctgaagcatatctcaagcttaaattgaactctcaaattttagtaaaccatgttttttgcctagtttttcccatctcagaaaataccagtaaaaattgctgagagggcaaaaacactgaaatccttcttaattcctccctcacaccccacagccaatttatcagcatttctgttggctctagcttttcaaaattcatatgaattctcatttcttccatcacaaccacctgttccaagctatcacgggtgtcttgcctgcagttcaaacacatcctcacatttacttgcttctactcctcttccattatcaattctccagacagcagccagaatgatcatttaaatatataagtaaaatgtcaatttcttgaacaaaatcctccaaaggtttcttatcccaatcagaataaaatgaaaaatccttattgtggcctataggtcctattagatctggcctagggatttcactctaacttcatcacttgcaacttctttcagggtgctcattacaacctcaacacaccatggttccattccttgaacagtctaatgcattcccacttcacggctttttgtcctgctgttccccagctttcctgtcacacctgcagggattacttccttgttcacccaggcctctgcaaatgtcactttttcaaagaggctttctctttcaccaaatctaaaatatcccttccctgccaaccataaccctactctctccctcactcaccactttctatacttatatcctcttattcctacctggaattataattttattgcctacctgcttcattataatataaacactacgaaggcagagacttcagcttgatcacaaccttggcatttattgaatagttaagtaatataactaacagtatctaataa

SEQ ID NO: 27691 - DNA, 999 bp, Bovine  19866880789062
  misc_feature (1)..(1): n is a, c, g, or t
ngcgaggcagcctgctttacacatggtacttaagttcctgctgtgtaaaatgtctctacatagaattcctgcattactcaatgaatgcctttgatttttccccctcagtctttccactcacacagaacaccaaagctgctaacctcacttcaccaacataacaggtaaaaattacttttgtaattgcataaaccaagaagcagcctcttggcttaaacagattttttttcataatcatttacagaagacaattaaccatgcttgcagcatttaaagtccaccggaaaaacatcgatcaaaatggctcattttacaccaatatggatgtttgaaattttataagttatccacagtttttcattatctaccagcatttcaggaagaacaaacattttgcttcatttataattcattttgggtttccgtggcggttcagaaagtaaagaatctgcctgcaatgcaggagaccagggctggatccctgggtcgggaagatcccctgtagtagggaatggcaacccactcctgtattcttgcctggagaattccatggacagaggagcatggccggctacagtccacggggtcgcagagtcagactgagtaaataacactttttacataatttgtttttatttgtactattttgaaaatgtttcactcagctttataatagatattcaagaatggttttcaacacaatacatactgtctttgaaaccatattacagattttgaaagaaattgttctctactgagatgaacacagcaaatacaccataggttttaaagccagttatgattaaaaaaaatcaagacattgttatagactattatcggagaaggcaatggcaccccactccagtactcttgcctggagggtcccatggacggaggagcctggtaggctgcagtccatggggttgctgggagtcgaacatgactgagcgacttcactttcacttttcactttcatggcatggagaaggaaaggcaacc

SEQ ID NO: 27692 - DNA, 1711 bp, Bovine  19866880817243
  misc_feature (1)..(1): n is a, c, g, or t
ntaattttaataattatctttcctgcactaaatactgcaactggtgattgataagtacctattaagtaaatgaataaattaataaatgcctgtattgctgcaacaacaaaaaaaaattcttaaggaaacaagggtgacatccatacaaacttccctaactagagacacagatccttcatttcccctcatccctcaaatcctgctattcaaagattagtccataaatattggcaattacatatttgatgttttatatgcccagcatattactgcatataatatgcttgtttttagtaaataacactcatgacattacaaactggacttccattgtatcaggctatatgcgtgcatgtagtaaattggtaattccttatgtaatccagtatacgttaacctcattttcatttaaaaaggtttttacaataagatgtttttggggtttaaaagattttagactaagaattaaaagactaagttttagccttttttgctacaatgctgtcacatctacatatcaaatggaaatttagaatatgtgtctctaaggttctggccctttcactattaaaacttcttaccttcagtataatcttaaatgattatagggatgaaagatggtttgtacaaatcattaggcctaggttaatcagatgcctagttctgaatgaagaatgcagcttcttatttttcatgatctttattataaaaataatatgatctttttaattaaaaaaaaagaaaatgttaggccacaaccactattaacacatcattttcttccatagaaagtttaaatttttgcctatttttagtgaactttatataatttgtatcaaagaaaatgattactactttttttacttacattgccataaattttcattttgttgccttgcttgtgttaatataattgtaatatgagcatagttaatgtgacttcatatttcctgccagagatctacatttttcacaattataaacatatttagccatgtagagtttttttaaatatatttagggttatttcctcagaaccaattcctagacgttgacttcttgcttgtgtacactttcatgtttttaatacatatttcaaaattattttccaaacatattacccatcttatgctcatgccaggaggcaaaccctatttataatacttaatctacacagaatttatacctacaaacaaaaagcagagattacacttcaattctctgaacttttccatttctaaaactagcgcctttctagtttatcaagatccttcttagagactatacttatatactgctattctttttgtttagaaataaatgccagctaatgctcaaataaaattaaatctattaagaaatcaatggaggttaaaaaccaggcattactggtctaggtagctagtacaattttctactgaatgaagcccaaaaaccaccacctgtttaacaatttagagttcttactagtgtgcttatatttgacttgtgtgttagatatgagccatcagggctcctggtgcaccatcccttccatttaaatactttatcacattattctcatggacaataaatggcataactggagttcaaataatattctgcctcagttcaggaaataagttaatgagaagtgctttttgccattctaactctgtagagggaactatgcctttttaggggcggatgtattactgaattgatttatgga

SEQ ID NO: 27693 - DNA, 936 bp, Bovine  19866880932890
  misc_feature (1)..(1): n is a, c, g, or t
ncacctccctccccacctttttgcttcatctcttgcctggggtggcgtctttctaattccagaagcaccatcttcctttgcactacagtcctgacagacttccttttcactgcgagctgcaaacactggccctgcacgttatttttattgataaattcttagtttctctttccgtttcactgtgggctgacagaatttcaatgctacactattatgaaattatccaggtcagagtaaaagccaaagagaatagggagtctcccttaaagtcctcactcctggaaacatcaggcacacacttcaaagtattaatacaaagtatgcttctctgattcggaaatcctccttatcttagtttcatggtttcactctgaaataaatgccttgcaatgcaggtcaaattcctgcatctgacagatcaaagatacactttatcctccagcaaaaatgaaaatcaaaatatttcagaaagatttctggccctctcccccaccaaaaaaattcacaataagcctttgttaccagtttagggaacctaccacaactgaattattaaagcatgtaagtcaacttaaataagtgatggctcaacttctctaggactctgaacaaaatattattatcataatcaaaacaatatttaaagggcttttcactgacgtcaattaaatattagaagaaaaaatgcctttacaggctgaaactgagatttgaagttagcatgtgcttttcaaaaataatctgtgatcctaatgaaaaatcaactatcaatatataaacaggcaaaatatattaaccggttgaatgtaagtgaatctgtgcaatactgctgcaagtcactccataataaaatatatattcagttttgtaaattttaaattaaagagatgggcatccttgtatactcccaaatggtcagttcatcgctaaagtcaa

SEQ ID NO: 27694 - DNA, 2768 bp, Bovine  19866881046461
  misc_feature (1)..(1): n is a, c, g, or t
ncttttttcacagtccaattttcacatcccatacatgaccactggaaaaaccatagccttgactagacagacctttgttggcaaagtaatgtctctgcttttgaatatgctatctaggttggtcataactttccttccaaggagtaggaatcaaattaaattgctcacaaattaatctagctgaaggcaatggcaccccactccagtactcttgcctggaaaatcccatgggtggaggagcctggtaggctgcagtccatggggtcactaagagtcagacacgactgagtgacttcactttcactttcactttcagctcaatcttggtaaatctttcctttgatgggtttttgtctttaacaagctgtttcatgattctgcatgtgagtggcaaataacatgagcgtgaatttgatacccatgaagctgaatgtacctagtgaggctgaaaccagggactttaataaattcagaaaatattataaaagcagtaggcagctcatgtctgtgcatatgaacaaggattagctctgaggctttctggtctaccctcatccccattgcttgttcgatgtgtaaacttgggcaccattacctcacttctttctgggcttctagcagtgccgtgtgtattaacaaaatgttctcagcttctcattgaagacacaatggaaattgaagttactgctgtgcttttcatttcagtgaaaagaaaggaaagattgtcatttatagtactctacaaggctatttttagcctgtagaacataataattagaacagtgaatttaaaggttctgtcacaattccaccctccaaccacatgtgaaaaacagccccagcgaggaatttaagagagagtaattgctcacagaactttaagaatgctatataaattaaggataaagtgctttttatactctgaactcttacatcttttgctcagttatgcatatgggaccacataaaccacgcacaccctagcatcgtgagatcttaagatggagttagattgagaccagttcatccaaaactctcagtgacacctggtgaatttgaagccaggaatatagacatctcagtccagtcccacagctacttagtttatggaagtctatttgtgatccacaacacttcatcttacatgttgctgaagacatctgatcatacccactgctccccgataggcatataattcattccactgtttgagtcgtatatgtaagtgtattcataaacacattcattgacatatgtggacacacagcaccaagaagtgtcctctgatagaagcttaacccccagtgccagtgccctaaaggtttatactagatcttggtggcaatagcagaaatttgcattttggatgaaaaaaatatatatggatgctgaatagttataaaacaatctgacttcaaccactggcgccaaatttgacattttactcaaaaggaacaaatgaaagtttgcttgcagatacaaaataattcaggtagactcaaaggaaaggggagataagagaacacaagagaaggaaggagacaagatgtccaaaggtaagccagaagtgttttgattgaagtcagccattttaaaaaccaaggtgatcttaacagatgtgtagagatgtcagaaggaagaattaagcttagggaattaagaagcattagcttagggcagcccatgggcagaaccctcagcttcttgacactaggaatcggtaaggaaaatactgggtaaagcttcaaaaactgatacatccaatgctggtataaagttggtccctatggcctcatggttatagattcaaatcctgaaacctttgatttttggccctgttgtataataactgagttatttttttttatttggagcactgcttaaattctctgagatccagtttccttacttgctatataataatagtacctggtccataagacatgtttaccacatatttgtggaatgaagaattgtatttacaagcagagagggagcaaatcacagtatgatcactttgcagtaaagatgcaggaaaataatcataccaatataacagtacatggagatgaagcagtgccctaatcaaaacaggcatgagtgtatggttagttcttaagagaatcatatgaaaacatcatttcatttatttgaaatatttcttaaagtttaaaaaaaaaatactccttgttccagaatacgttttagaaatttcatgagtcatttaaataggagagctgtgtctaaaagaaagaagtgcagagatggctgtagttggtagtagcccaggacagaggcgtcaacagtaagtatcactttcatgtcttaggtcctctcataccaaaggtagtggctgcctttagcaggaaagaaagaacgtaacattctcttgtctgctttcctccaggacgacaatgagtaaagctagaacccagaagagggctgtggtgaaggaccagcagggaaaacgcatttacttggagcacctggaggatgtcccagaagcgctagaccaggacgacctccagcacgacctccagcaactccttcggcatttctgcaaggaggactcgaagcaagaggcccagtgaggggctgcccaattctcacaccagaaaccacaccttcactcaatatgcaacgtcccgtttcattagaggagtgacctcactggcctgattaatgggataccctgacatttcactttcagcaaacatgcggcatttggtttgagttttcccccatcctctttaactgtaagctaattt

SEQ ID NO: 27695 - DNA, 1255 bp, Bovine  19866881100702
  misc_feature (1)..(1): n is a, c, g, or t
nctaaatttgagtgttagaggaaagtgtctgtacattctgtattatagatcttttttgccttatgccatattcccatctagcatgattttaaagatactgttgaatgaaagaaagttgttagagttgatgttaaattggtactcaactttgtccaagtctatttctaagagcatttgtttttttgtttttgtttgaggtctttttttaggtggtggtttggtttttggtttggggtctgttttgggcatcttattagcttatgggatcttagctcccagaccagaagttgaacctgtacccttggaagtgcgagtgaagagtcctaaccactagactgccaaggaattctccatttgtatatatcttggaagctaactgaaatgaaatagttactcctcatttgaaatgatacatggctcaattttacaataggtcctatactggaataattttagaattataatcaaatgtttttattatttattttaagcccttctaaattctaatgcaggatactttggcagcaatctcagaagttgtttatgttgatttgctggaaggagatacagaatgccatgctagatttaaaactcctgaggatgctcaagcagtagtaactgcacattcggaaattaaaaagaaacactgctggcaactagagattctttctggtaaaactttatagaaccttctcttttttttttttaacaatgcttattttggggtgattgttttataatttccgagtttggcagatgaaaaactagggggaggtttctctacactaatatacgtaaaaggcattaaataactcggacaactgttccggttctactgaaaatacaaagctgtggatgtgtttcttcatctgtatccttatgttcagtgataagcatgtttatgtgtgtttgttttcttaaaggtgatcatgaacagaggtattggcagaagattttggtagataggcaggccaaacttaaccaacctcgtgaaaagaaaagaggcactgagaaggtaatcagttcatactttgtaatttcagtttctggctgttttctttcataacttggtggtaaatgattatttaaagattgtcttaatggtaaaaagcacagtgtgtatttagagtgtagtttttaaagatatgagtctccacagataagattcagaaactatgcatattattcccaatagtgatggtaagctttattcctttttctctagaatagctgacaagggaaataaacaagctta

SEQ ID NO: 27696 - DNA, 955 bp, Bovine  19866881126985
  misc_feature (1)..(1): n is a, c, g, or t
natccttttttgcctatctggtcattttgatcaacagatcttttattatttttttgaatgtcagaatctaataataagccatcatttactacaatgttacgattaattggtaagctactgttttcacagaatgaaggaatttctagttttccttcttgatcccaggattgatcattatcatctattgacttatcttcattatacctttttcccttttcagcacatgtttccaagaactggatcctgttttgcatcgaaaggtctttcaagtttaaatgaccttcttgggtcttgggtttcttttctatatcttttccatctactgtagaagaatgtacaggtgaactccgtgaggataaatacacggcccagcggcttttatttctcatggtattttctgattgatgctggttgtgtacactttctgtgctcttcacttcagcatactcttcctgttcaggtaagcaatttggttcagcaggaatttctaaacttccttgtggttgtatctgagggaaatggcctataatctcagaatttaactccttagacgtacttgtggatgtggacttcagaagagctaatatctgggctttgcttctaatgttttgtgaaactcctaaactgtgagataccaaactgtctcttttcatggactcatcagtcagtaaagaatctgaatgcttatttacagaactgacaggagaacaaacataattttcttcacatagcacttctgggttaatcttgaaggatggagtagagataactgaagaaaaaggtatgccatttcgttctctgttcttgtaagtgacaatgttctcagagtctgttggcatattacttgcatctttcttgccaattgtaggaaacaaaggaggtgtgctgtacaatggagaaagaaaggcaggaccaggtttctcagactcaagtgaagcagctgggtcactatttt

SEQ ID NO: 27697 - DNA, 1930 bp, Bovine  19866881171304
  misc_feature (1)..(1): n is a, c, g, or t
nacaatggtgtgaagagagctttagcctccccttctgggttcatggaaagatggtccttagcataggttggcagtgcaatctttgtcagataagactttcattgtactttctttgtttctttcttatgacaccagtcactttttaatcatgcattattagttgtgtattatagtttatctgtaccaagtaaagttcctgagggtatatatctgtcatgtacctgtttcaatgcttttcccttagcatggactggaccagtgtttgtcaaatgaatgactcaatgaatgaatgaatgcattaatttagaatggaaatcctagcaatatcagctgtgtatgtcaattatccatcagttgatccatgcatttatatccttccctacttaaaatttgaggaaactcccaaagatacatatatagagagattaaggaaaaagctaaattaaaattaggtaagataattagggcaaggaaaagtgttggaaagtaaaatgaataggactgaaccttgttctgaaaaatatataccataaaatcttatgcatttgcaaggggagaacattgagttggtgttaaacttactagaagtgtatgaaggaagcagttgattttctatatctagaaaattatgttgccagttgctcacatgaaacagttattgcaactatgaccagagagaaattcttctcatggtatatcagaaggagtttattgtgtagtataaagaataatgtattcagcttatctttaagcacagcaaggcatttcaaagagtattatattacctttggtttatactgatagcatcttcaccataacttatataaagagtacagctgtggaaagggataaacagtggttcatgaaatcctgtgataaaaacagaattgcaaaatatctgttaaacattttttggaaaatctatgtttagcaattaatgtggatataaagtttcaatagcaggtaaaagaaaaaaatgtggaagactataaaatgtattatataattattagaataaattataatcaattaatagaaacagttgtctggagatggggctcaaatattgatgagcattatttactgttttttgttttttttttttacttttctatgtataactatagaatgcagcaaacagaactagttgttaaagagcagggaagattcagttaaatagagaatctatttctttttaggttgtaatttaagctccttttcagtagaaggaaatggactccagtgaaaattcatagataccaattatcccagaaaatgattacttaaagaaaggtgagagtagaaaccaattaaagaagagcatgcacctggagccctctctggggatgggaaagttggatagaagtgttgtaactgcagggatgtgatagcaatagtatgtctttggggaaattagctgtcagtttcttatgtacttgtgtggattttatattgccatcttgtaacagaggcaccaccaacgtcagtttggagatatttgtccacatgcagaaatttactgagggcttaccaggtggctcattggtaaagaatctgcctgccaagtaggagccacaggagatatgggtttgatccctgagtggggatgatcccctggaggaagaaatggcaacccgcttcagtattcttgactggggaatcccatggacagaagagcctggcaggctgcagttcatggggtcacaaagagtcagacatgactgaggtgactgagcacacacaaaaatttaccgaagagttttttaaaatgtgacatccccagagttaaatcttggggaattttttggctttgttgtcttaatattagaaattctgaggttgggataaaaccttactctgacctccgtccttacttctgacttgtggtgttggtgctggcaagggtaagcagacagatctaggatggtaa

SEQ ID NO: 27698 - DNA, 1584 bp, Bovine  19866881268447
  misc_feature (1)..(1): n is a, c, g, or t
nattcttgctcggagaatcccatggacagaggagcctggcaggctgcagtccatagggtcgcaaagagtgggacatgactgcagcgacttagcatgcagcatgctacatgtatatatatgtttatgtatggagccatctcttggtatccatagggtatcagtttcagaaccccctcagatatcaaaatccgaggatgctctgtcctttgtgtaaaatggtgcagtgtttgcatataatgtgcacatccttccgtattctttatatcatctctagaatactggtaacacccaatatagtgtaaatgctatgtatttaaatagttgcctgccatgtgtcaaattcacagtttggtttttagaacgttctggaaaatttttttgaattttgcaatctgtggttgagcgaatcatggatgtagaaccttggacatggagggccaactgtacataaaatggaatattgttcagccttagcagaaaggactctgacgtgctgcaacatggatgatccttgaagacactgttaagtgaaatgagccatccacaagaggacaggtatcctctgattctgcttacatggggtgtcgtcagagtcacagagacagaaagtagaatggtgtttgccagggtctctggggaggggaagtgggaatcttgttcattggatataaagtttcagtttgggaagatgaaaagaattttggagattggtcgcacaacaatgtaaatagtagttaagatggtatattttatgtgtagtttaccacagttaaaaaaaaataaagtatcaggtggtgataagggctattgaaaagacaaaacgagatgattgtgggagcacgagggaggttggggaggtgtgagctgttattggacatttggtggtcagagaagaccaccctaatgatgactatcaggcagaggtgtggaatatccgaaggaggggacacgcatctgggagaagagcattttaggcggatgttaaatgggaatggtcaaaggtagggctggtttgtgtttcggaaacagggagcttggcagtgtaactcaagcaaagtaggtgaggagagtggtagaatgaaatctcagaggggtgggggtgaacagatcatgtttcaggttatgacactgagtatgtataaatgcatccttgtatgaataaaatatgggtattatatttctctgtgattgcaggcatagcgttggtttttttgaaagcagatgattgtattgattgaaatcgtatatgtttcccccctctacacctctgcggttaacacataaacatttcgtattggctcacacagtccctggaccaaattcgtatgattctttctcaccccttcaaccccccatgccagaatttcttcagagtcacaaattaagcttatcttaagaattctattattgtgaatgtaaattaaaaataatgaaaatcaaagtatcagccttactgatttcagtattatgagtcattcaatgggcactatatactaaggtgggttttctcagtgtttataaatatctagctagagcttactatggattttatatagaaagtaaataatacagacaggctcagga

SEQ ID NO: 27699 - DNA, 1181 bp, Bovine  19866881328823
  misc_feature (1)..(1): n is a, c, g, or t
ngggaaggaaggaatggaaaattatttttttatggaaacagtttcagtctgtgaaggtgaaaacattctgaagatgcatggtggtgatgattgtacaacaatgtgtatgtacttaatgctagtaaactatacatgtaaaaatggttgaaatgttttatgtacaatttaacacaatttaaaaaaaaatgaaattctggtatatattgcaatgtgactgaatcttgataatattatgcaacctgaaataacagatacaaatgaacaaagattgtatacctctgtctatataaggtacctagaacaagcaaatttatagggacagaaagttaagtagaggctattaggtgctggagggagaggagaatggggagttattgcttaatggtgtaatgtttctgtttgggatgatgggaaattttgcacagtagtgataatcacataactttgcgaatgagcttcatgccactgagttgtatgcataacaatgctaagaatataagtgaaaatggtcagttttatgttatgtatactttaccacaatttttaaaaagttgaatgatttttttaatcattctaaatgataataggaaagggcaaaaggaacacttccaaagcaagtgaattttacttttctctggttcttttgagtgtcatctcactaaagtaaacagtatgtgtcacacgtgagtgaagcatgtatgtctttcttgttcaaggtacgtgatacgactcaggaaccttgcggacgactatcatttatgaaagagccaaaatctacaagaggcctggtgcaccaagctatttgcaacttaaacatcaccctgccaatttatacgaaggtattataatctgctgtagtgcaattcaggctgtagaggatttgatttccaaatcctttagaatagatacaggcaaagacactgaatgcaaccacgtataatagtcatttttgataccctgtccaatttgtgatgttccatttaagtaaggaaaaaagtagctctaccttattttgcattaaattcactttgatggaaaagtttctataaatatgtattggctatggaagagagaaaatttcaatgtaaggtgtaacccttttggactgattttgaacatgaaattattcactttgcctcccttatgggtttttgtgcgccctcctggcaccatgctagtgg

SEQ ID NO: 27700 - DNA, 935 bp, Bovine  19866881421052
  misc_feature (1)..(1): n is a, c, g, or t
nctgaccagtgagtcataccagccctttgcggtgaaagcacagagtgcaagccactggactgccagggaattccctacatgtgtgtttcccttggtgattacatggtctcaacacttaaacacctctctctggtccagagtttgtggggaaagattgtagttgatacttattctgttcatcagggttgaatatttgtcgtttttcattttaggtgctataaatagttgaatgactactgattattttctggacctgactgtaatatcagaagaaataatggaaagccaagaatttattgtaagtcttacttgtgttcactgtttcctttttccttccttctttgcatgtttcacaaatgttttgccagatttagctaaaaaacctaaaacaaattttttaaaaaccccaaacctgggactttcctggtgatccagtggctaagactccttgctcccaaggcaaggagtccaggttcgatccctagtcagggaaacagatcccacgtgttgcagttaagagttcacatgccacagttagggattctgcatgccatggtgaggatagaagatcccacgtgctgcaactaagacctagtgcaaccaaagaaaaacaaaaaacccaaacctaaaataggacactctgttaaatttgaacttcagataaacagtgaataattttttagtataagtattcatctcttaaatattgccctgtattctggctggcaaccctgtattttgcctagagttcacattggttatgcaaaattctttggaacaaattctttggaagcttggaaccaggaaataatttctttctctcgaaagactggcacgtctattctatctagattaatggttcttaacctgtttggtgtcaggacccttttatactctcacctctcctttctcccctccatgtcttaacgaccagg

SEQ ID NO: 27701 - DNA, 941 bp, Bovine  19866881435898
  misc_feature (1)..(1): n is a, c, g, or t
nttgatgaggatggaaattggaaccccctggtacattgctagtgagaatagaaaatggtggggccactatgggaaccagtatgacggttcctcaaaaaattgattaaataactaaaagccgggtctcaaaaagttatctgtgtaaccatgtttacaacagaattattcacaatagccaagaggtggaagcaacccaagtgtccatcaacagatgaatggagaaataaagtgtgatatgaacattcaagatgagaaaagaaccttttggaaactaatccaggatgtttaagaaaaaacttttcgccaaaaagttaaactatgttcatgattctgagttttttccaaaactgggccccacacaacttaaacatggatgtacttgctttcaaactaaaaaaggaagcgcttccaagtttcggggatggatctggccctacctcaatagcctttgccacttgttcttttgtttcaaattccacaatggtaaattccctttggatcagacttacaatgtggtatacttatataaacaacatcaccacctttcccaaataacttatttgtttttgagaagaagatctttaatttaaaaagcttctctattggaatggataaagaagatgtggtacatatatacaatggaatattactcagccattaaaaagaatgaaataatttgcagcaacatggatgtacctagacagtgtcatactgagtgaagcaagtcagacagagaaagaaaaacatcgtatgacatcccttatatgtggaatctaaacaacaccatcaatcggctatatcccaatacaaaataaaaagtttaaaaaaaaagtttttcttattttatttctaattacatgcattattacttttggaaattacaatgcagctagtagcagagacttattcaacccattaagtcaaactggggacctcataaa

SEQ ID NO: 27702 - DNA, 960 bp, Bovine  19866881684149
  misc_feature (1)..(1): n is a, c, g, or t
nattctggaaatttccaggaaaggagattctttccaaaaggaaaaagtatgcaaaagaaacataagcttgtgtacatattcaaatgacagaaatcaatctctaatctatgtggctataaagataccatggagtttatgtaactttttaaagtaaggaatttgttggctatatgcagtgagtggtttgtgttagattactgtgcaaaagtacaagtttgtttttttttttaatcaccccctatattatcttccagcttccctggtggctcagtagtttaaaaaaaatccgcctgaaatgcaggagacctgggttcaatccctggggccgcaagatcccctggcaaaggaaatggcagctcactccagtattcttgcctgagaaatcccatggacagaggagtctgatgggctacagtccacggggctgcaaagagttagaaacgactgaatgactaaacaataacattatcttggaattttaagaattttggttctgtttttgcttagtagccttcaagaaaagcatcactgttcataatatttcgggaaatatttcctactatgaagagtgttgttttttaaaagagaagaacatcaagaactattaacacactagtgcaattcagaagccagccattcacactcatctgcaatattttatttgttccacattttgcttggttttgctgaaagaaagcaatttcgatttgtactcagatttgcaaagacgaagccagtgccagatatccttagctggatgcttgtagcactcttttaacttaaataaattcaagaggcacttgtgtggtctaaaagattgtccagatgaaacgaggctgaaatgttatgcgaagggggaggggagcgcgtgaatagcgtcagtgaatttggtgaccgagggccgctcctgtccattgcgtgaactgtcctaaagggtcaaactgttcatcttcagcccct

SEQ ID NO: 27703 - DNA, 1351 bp, Bovine  19866881968234
  misc_feature (1)..(1): n is a, c, g, or t
ncagtgcattgaaaagcggctgtgaaaagacaccatagagatacagagttaactgagaaagtcctaattgtttcattccttagctgttcacttccagggcaacagagatgcaagtgagtaagctctctgtaggtttcagcctccagcttttgagatgctcagttgatacagagcagagtagacattagctgaccccccactgaggcttgcccagattgaagatttgagcaaagaattaatgttttaactcaagtgtggtgtggctctttagatagccacagtaatcaggacagatgttttcatgaagctggtctttgggagtctccgcagatcgattcctgtgtcctttgacacagtgccagtgctcttcagtagtttccctcttttctggcataagagaatgtcctgagtttaccttgtgcattctctgcctagatctgaaatcagcctcttctcctacaaacccgtaaaaactttttactaggtaatagtatttaggtttcaaaatctgggcattaggaatgcttttcatgaaacaagttgtaatagaagaattacaaacttgatgacaataaaacatttcagcatatttcccaaaagcagaattgaaagacaaactatgaagcttagcagaatggacgagaatactaaaattccaataaaaataaaaaatgacatgaataagcaattcccaaaagatggaatgctaatgagcagtaaatcatctttaacttgctaataataagagagaacatatactgttattgtcctttatcaattcactagaatttctttgaaagaaataagcttcaatgttgataaaagtatggtaaaactataatcttgtacacattggtggaaatgtcgcttgatttttggctttctgctaagtaccttggaaatatgaattaagttgcagtattaaaaattgcagccacttgtattagttaggatagagcttcagatgctgtgacaaagaggtgccaaataaagtatcttaaaaaaatttatttttctcccacttaatagtccatagtaagtgctctaggttggaagaaaagctctgctttctctggtcatttgggggccctgtttccttcccttctcttgctctgccatttccaaagtgttaaagctgtgtggttgatgccaggtcacaggtaagtatgtgttgcagttcatatgaagggaaaagaaagaagtctagaataagccattttaaacaggagatgtagaattctgcttacaaggcctcatctagcaagggaggttgggagctatagtctgctcaattaactatgtatctagcttaaacattattactttggaagaaggccatatccttcaatta

SEQ ID NO: 27704 - DNA, 1056 bp, Bovine  19866882021765
  misc_feature (1)..(1): n is a, c, g, or t
nttctctcctggcgcttgcacagtaaagcctgcctacaggctacacagtaagcctgcctacaccacaacatgaggttgtggtgaaggaaataataccatgttattgcaggtgcaaagcaagaagtctgggtttttgagcattagctgcccagaccccttgtttagcaccagtgactcagtggtaaagaatccatctgccaatgcaggagacgtgggtttgatccctgggttgggaaggtcccctggggagggaaatgacccactccagtattcttgcctgggaaattccatggacagaggagccaggcaggctacagtccatggggttacaaaagagttggacatgatttagtgactaaacaatgacaacagagtgttctggtatattaccatggtgatgcattggagtgcacagtatatttgcctagtcttatttttgttgcattcaggaaaatgaaattctttaatagtaaatatcttagattaataaagaaatacggcccatctctatctttcatgcaaacttttctaaaatatgaaatagaatagatgctgtttccagagaaggcaatggcaccccactccagtactcttgcctggaaaatcccatggatggaggagcctggtgggctgaagtccatggagtcactaagagtcagacacaactgagtgacttcactttcacttttcactttcatgcataggagaaggaaatggcaacccactccagtgttcttgcctggagaatcccagggacgggagaacctggtgggctgctgtctatggggtcgcagagttggacacgactgaagcgacttagcagcagcagatactgtttcataacaaaatgaatagatactggataatatatccatgattttcaaaaatgcctaatctgaacatttagatatttaagacactgataaaaagtgctaaacttttctccaggaaaacttacatatacccataactactacgttataggacaatataattttttctttcatcaacttatttttcagttggaggaaagtagctttacagtgttgcatgttt

SEQ ID NO: 27705 - DNA, 919 bp, Bovine  19866880574974
  misc_feature (1)..(1): n is a, c, g, or t
naaggataggagcaagatggcagtgtgtgcaaagtgatccagaataaggaatcatattaattttaaatatgttgcctttaaaagcaaaacatatttttaaactaaccatcttcacaaactgagctttgtcagcatctaagggaaaaggcaaaatatttaactaaaggtatagaaaaggttcaaatccatgcagaggaaaagtaaatgcatattttgagtttatccaaatgctaaggcctctttctgattctcacaagtgaccatcagacttgaactgttcaaaaatttccaaaggagcccatctcctcaccaaaatatttctatgttaaaaccttcaagaaggcaactggcccagtttttatgatcccaaattaccttggtttcaatgtaatctttgtaaactgggattcccttaggaagatttcaatcttaaaaataaagggatattaagaaacaaaaccctatcccctgctccattttcagagcccatatgccaaaattgtagcttattcatcccaagacattaaaaaaatatattattttgtgacattaacttagaaatttgtacttttgtgtggaatattctaatgtaaaactagtacattatgataaatgtccctttcttggaacctcctctgagtgaatcatcctaggaagcttttctttcattttaatttgtctattatgtcagtgtatagaaccaccttaacaagatggagttaagagaaaaaaatttaagacttagttgtagcccctatagtaactgtatttttctggtaatttaagtttttattagctgaaaatactggttaatgaccacagtgacgcaatggtctagagaccacctctaatcatatgaaagtactttcaaatttcttagtggggaaattatccccaccctaaaaacattcctgtcctt

SEQ ID NO: 27706 - DNA, 3648 bp, Bovine  19866880558434
  misc_feature (1)..(1): n is a, c, g, or t
ntcatctgctcatttgagattgttgatatttcttctggcaatcctgattcccacttgtgattcatccagcctgacattctacatataagttaaataagcaaggtgacaatatacagccttgttatattcctttcccaatttgaaactagtcagttgttccatatgagactgtaactacttctccttgacccacatagacatttctcaggaaaaaagtaacgtagtctggtattcccatctttataagaattttcacagtttgttgccagagcacatctgggtaatgagctctacctatttgccaatttgagtttgacatttgctttatttgtctgtgctatatgttcatgataaacccttagcatgcatgagtcaaggtattatttttcaaggaaattaaatgaagctaatcatagatattttcaataagaacactaggaaataaaaaagcaatcaatactgacaaatctcattgggcttcctaggtggtgctagtggtaaagaatctgcctgccaattcaggagatgtaagagatgcaagaaatgtgggtagaatctcttgcatgtgtgttgggaagattccctggagtatggaatggcaatccactccagtattcctgcatgggaaattccagggacaaaggtgcctgccagactaccgtccatgggccacaaagagttggacatgactgagagttggactgtgaagaaggctgagagccaaagaattgatgcttttgaactgtggtgttgtagaagactcttgagagtcccttggactgcaaggaggtccaaccagtccattctgaaggagatcagccctgggatttctttggaaagaatggtgctaaagctgaaactccagtactttggccacctcatgagaagagttgactcattggaaaagactctgatgctgggagggattgggggcaggaagagaaggggacaacagagaatgagatggctgggtggcatcactgacttgatggacgtgaatctgagtgaactccaggagttggtgatggacagggaagcccggcatgctgcgattcacggggtctctactagtcggacatgactgagtaacagaactgaactgaactgagcacatagaacataaatctcattaaatatataatgcaaagtgaattttagaaatgacaagtattctgtgaacatttagaacaaattcatagtctcctctatccacaatattaggagattaaaaattagactacattttatcattatcattgtaaactgtgctatttggcttgttgcatatacttaggttgctgtaaaatgttcttattcaatttatgttttacaactgctaacatgtaggaaaatggagaaatacaatataatttccacataataaaatgaaagaatgaacagtgatggaaagttagggtgttattaacttcaaatttgccttcacatgaggacgtgtgaaaaagtcagcatgcattttagcaggtagacagtaatgggactggaatatgagatatattgttggataatttatcttaccttggcctacctctcctttcctctactgctatcagagttcaggccattattacctattacctgagatattttaatagcttttcaactcatcccatcagtttcagtcacttcctgacttagttcatttcttacatactgctctattcaatatcctgaaaaatatatttgtgttcattgctcatcttagttcaaaatctgaaggggtttcattgtcctaaacctagaatagaaattctcaggctaaatcaagtgtttcaatatcctgacaaaaatctactcttcatcaatactactcaatattccaaggaccttacctttcaggtaaatctaatcatcatgaagtaatcactcatatactcattactggaatggctttctctacatcaaggtgtgcaaatcctacttgtcacttagagtttgtttaaagtgacaaatcccctgttacatgttcctagaatccttgcctcttctggaaacaaactttctctcctgtaggtagagctagaactctgctgccagtatttgataaaagtgttttctcccttaaaatccacttagttgggacttccctggtgatacagtggttaagaatccacctgccaacacaggtgatgctggttcagtccctggtcaggaaagattccacgtggagtggagaaactaagcccatgagctgcaactgagcctgacctctagagcctgcaccttgcgaagacagaagccctgaaatgagaagtccgcacaccacaacgaagagtacccttgctaactgcaactagagaaaaccctcacacagcaatgatgacccagtgcagccataaataaaataaataaataaaatttaaaattagaaaaaaaatcatttagtcacagatatttatcaagtaacaagtatgagtgtttacttggaccattttgtttacatgtaaactaaaacagaaaacaaaacatttatgtaaaatacttgacaggatactttctattttattaggtaggtagtcaagcagtattttcctttccatgactggtttattactataaatttccatagcatctaatctattttcttgtacataacaaatgctcaacaaatctttgttgaactagcagatggtctttttagctctttcttcatttctttaaaaactgttacattaatgaaattaagtatcatgttattacaattcatttatgaaaaatgtccatttgcatggacacatacctgtatatactgtaatgtacaactgataatacttttactttccaagctcaaagaacaattttaaaaattcataattaattaattatttctagtaatgagaataaataatttcttcttttttttgaagaaaaaattaaatgtactatttacctttcaaaagagaaactaacaaagctgaaagtatcttaagtacctgataatagatactgtcttttattatacttaacgaggcagcagaattttccatgtttctattctatagccttgtgttgtataaaccaattagatcttcatacaactacaaataaattccaatcattaattcagcatataaaattattactttcaaagatatttgttatcaagtgaagttaatgatcaactctttcctacacagaaaacatacaacaaatcaatattgaatcatgactaatgatgtcaatatataacaagcatactgttataaagaaatgaatttattacccctttgacactcagttatagctaaaactgtgtgatgttttaatgaacagcttccaaataattgcattagaatcaactacatatttaaactgtgttaaaaggcaacatagagagggtaaaattgccttccccaaaactcaacaaaagcatacttgtgtttatcatcccctaaactattttcaaagcattttatgaaacatatgatgtgttcagtagtattttgggtgttctaaaggatatacaaaatgtatttgcagatatcaccttcaaggatgttataacttagtacacacatgaagcagatagcattttacactatttggttaaacagtgaggtaggttgcatggattttatagctacttagttttaagaaagttcccaaaacaactggaatagttctttgcaa

SEQ ID NO: 27707 - DNA, 1705 bp, Bovine  19866880582674
  misc_feature (1)..(1): n is a, c, g, or t
ntttttagtattgttaggaaagttttacttgtgttttagaacaggaacagatttctaacacattatttgcacagccaactataaccaccccttctgtgcttgctcagtgttttccatcagtgctcccagaactcatttttaaaagtacatattatttttcccagtaaatcaagcaagctctatgggagcatagtacaacctttcatgaagaaacagtacagggaaacaatattttaaacttactaggtttagctgataaactctcatcactgctgtagatttataattatcaagtaatgattattttctgaactatgttttctgttgtccaaatgccattgattgtttcaaacagacttttcattactaaggtcttttttctatacacttttgcttgctctgctgttgctaagtctaacaaagtcaaaaaaccaaaaagcttaaaagtgatagatcgtctcaagatacaaatagtgatgaaaatgtcatatggaaaaataacagtctttaaaatgttcaagttatcttaaagttattcattttttttttttctttcaaatttaagactatttgaaaacaagtctcttgcttggatgcagctagtataatgtacatagtaaatccactgggagattgttgatttatcccagaatgaccaaactagccaagagatccaaggttgtttccatggtttagtaatgaaccaaacccctctccactgagaggtagtgatgggacatgctctgtggttcaaattcagaccagctcaattttaggctttggttttacactggctactaaaaggaaggacttccctggcagttcagtggtaagaatcttcttgttaatgcaggagaggcaggtacaatccccggctcaggaagatcccctagagaaggaaatgacaacctacttcactattcaccatgagaaaaccccatggacagaggaaactggtgggctacagtccatgtggtcacaaaagagtctacaacttaggctaagactaagacttaggctaagttgtgtctacaacttagcaactaaatcacagtaataactagaaggaaagtgattattactacatggaggagaaggtttgtaatgaattgctaggtgaaaacagacacctcattaggatttaaacagttgatttggttatcttggagttttggtatctaccattataatcactaaacttattgtttaggagatattaataaataatatatatcttacctatttgggtggaaatccagcattagagacaagtcaacatctctttctgaataggaactacatagctgtttgatgatagattgatgttagaccttgaagcccatcagtaaaaacttcaggataattattttttctatgaagatttctgatgaggccattttatcttacttagaaattttattttgccataagaagatgattataaggataaacttttgaattttcaaatgattaacatgaatgtgaagtactgggagcttgattcagtgtcctgatattattccttacttccaaagtacaaccaaattcctttgtgtttacatgaggaaagatttccattaaaaaatatagaaaattattatgtcctaatgttcttatttatctgttgcatttatgtaaatattttcataaatatttcataaatattttcataaatatctcataaatattttgtcagcagtccaat

SEQ ID NO: 27708 - DNA, 1482 bp, Bovine  19866881298849
  misc_feature (1)..(1): n is a, c, g, or t
nttaagtactgacagaacattaatatcagttttagaggaaggaagggagtatagagagcggaagaagtataaagagaaagtttgtggtaacagttaaaacaggggtaaatatatcctaacaaatagcatttggaggtcagtgattcctctagaggggagaatttatgttacacagcaggggggaaattgaaaaataggttggggccagatttcaaaaagcctttaaaaggccagattattgaatttggactatattttgtagatattaattggtactatacttctagaatatttttaggatgctaaaagcagtattttaagataagtaatttgatagtaatgttcagaattattaaatgagtaaaattttatattactgatatcagttaggaaaacattgattagtcagcagtaattcataatgtcaaatgcagtgggaaagcaatggatacttttgaaaaatattataaattcacaattcaccaattatggcaaatgattaaagatcaatggttagaaagaatgtgaggttaaaaaaatgactgaaatttctgagccttctttgaataaaaggatgtcgattccatatgactttgttagtgaggagaggtattagcaatatataatagttttatgtgtttaatagtgtttaaagaaagtttctgttaagcttatttaaaattagcagatgcaagtacatatgttggaaagaagagtatgagttgtataaaaaatgataaatgtttatttagagggtatgaaatggagaaggcaatggcaccccactccagtgctcttgcctgaagaatcccatggatggaggagcctagaagttcttgcctggagaatcccagggataggggagcctggtgggccgccgtctctggggtcacacagagtcggacatgactgaagtgacttagcagcagcagagggtatgaaaacataacacaaaataaaatagattttttaaaaaaattctataacacctctgaaaaacacaatagagcaaaatttagtgtgaggtagaccatcctggaaaacatgtcactttagtctctaaattattatgcttaacacagcagcttggtcatcataagcacgtttttgcctttatgaattatttttcttaaagcatctccaatggcataaatcccaagaatttctataaagcacaggatacaatcaaactttacttattttcaccttgatttacatatatgataatttatgtgatggatatcttacataggcatctataggaatgtttctttttttctgttcttacagatgtatttctatttgaaggaggaataattggtttttttttctttttaataattcaattaatggtttgttgagtgccttctattggagaatcactaggttagctgctggagatgcagaggtagagaagtgttacagctcagagttcagcatgaaagtaaaatgaatgaacaattataatggagttcggaaaag

SEQ ID NO: 27709 - DNA, 1195 bp, Bovine  19866880514321
  misc_feature (1)..(1): n is a, c, g, or t
nctttctttgactcttcttcttcctctctccttaaacactaatgcttcctggaatttcatatctctctcttctgaatttcaactgtctttagtctcacctacttttctggcttcactgatttgcttattgattaccaagtctgtatttccagccccagattttctgtgcagctcctgatctgtacttctaattgtctgtcggtttacttagatgctctgtaggcattgtgtcagtcaaaataggcgaggctgtgctgtggtgacaaaagactccaaagtctcagtggcttacaaagatttatttcttgctcacattacacattcattgtggccctcctgcagctgtgacctcgctgtgctccctttggaacctaggatgttggagaagcatctgtctggaacttggccagtcattgtagcagaggagaaaaaagatacatgtcaagccatattctggctcttaaagcttctgcctagaagtggcacatctcagaccacattttatcagtcaaaggaagttacgtggccacttgtgagttaattgggtagggatgtataatgtacccccaccccctagcccccccctccccccgccagagggtctctagaatatttggccccagtgatccaatctaccacaggcgtttcaagcaaaacacatataaaccctttcctgattgttttaggataatccaaaacaataggattctcctcatccaaaaggtattcctcccctgattctctgttcttctgttgcttggtatcactgtgttagttagccaagctagacaattcttaagagttgtctttaaattcttctcctctattcccctccccccttcctgtgttcagttggtcaaacagtcttctgtgctctgtcctgaaatctcttgtctcagctcttctcttgtgtgtcccatctgccctaggcagaacttgttaggattgcagaagactcatagaggtctccttttttccattcctctttcacagatgcatcctccacctgctgtcagggctaggtttttaaaatacagatcttatcctgccactccactgctcaaaagtctttgtgttttcccccattgcctatgcttgagggtacgaaatgctttcttatggtgttcagtgtcttcccgaggtagccaaagcataatatttcagtttgctttttcaacatgtactcatacacctt

SEQ ID NO: 27710 - DNA, 1374 bp, Bovine  19866880528054
  misc_feature (1)..(1): n is a, c, g, or t
ntaggtacccaagggtcacatatgaatttgatggaatgagacttttcctatactcatgtattttattatatgaatagcatatgatactcaactgaagtgaacgatagttaaaatggagtcaaataaattcccatcaaatttgtgccaacatgctaaatatacttcctatatggaatctttctgtacagcagaagtggttggaaattgaccaaatagcaagatttttcttatttctgcttttctggaagtttgattttagagtttgattatagaagaacttgagaatttttaaaatgtaagcaatcatcacctaattttgtggatggttagattgagacccaaagatactatgcttggttcaatgcatgtagttgcaaggaagggcttagaactgaaactttggttttcctaattctcatttcagtacactcctcctgataatgcatgtgccagtgaattcttttattgatcctgtacaagtattagttttgttgaacctggtgaaccagttcgaagattccttcatcttaactttaactggaagttgacttttttttttttaactccaaataaagaataaaactgattttttttccctcaggtaacttgtccatcttaaatgtctttttttcccctctgtgaacataccagtgtgtcatctaaaaaattgatgacaataatgcagcccaaagccacaggtagaataattcagtctggattcccttagtgaaaccatggagtatatttgtttgtgaaaatatttaaggatgaaatagttgggccaagggaaatttacagaaaattcaacatcttgaattaaactgattttcaagagttcacttaagagcagtttacttacttgttactaatggcctgaacccaacttagctctttgatgactaattataccctttttttttggtaggtagggaaaagtggcaatgtaccagcaggcactactgtggatagcaccatcacacatccatccgagtttgacttttacctctgtagtcatgcgggaattcaggtaatttggaagctggtccagatacttgtcttgatagggaggtgtttgaaaattcaggaactagcttaagtagacttgtcattaaacactgtacataactttgttaatacttgtgtcctaaaactgttacctcttggtctgagtatctccttgtaggtgtgctaggcaggactatttctgaatttaggtaggtttccattctcctctcaggtagtacacccatgtcagagacagtaatcatacaattctttctccagggaaccagccgtccttcacattaccaggtcttgtgggatgacaactgcttcaccgcagatgagctccagttgttgacttaccagctttgt

SEQ ID NO: 27711 - DNA, 2215 bp, Bovine  19866880583478
  misc_feature (1)..(1): n is a, c, g, or t
nctcttcctaatctcactgggtttgcagccatgatgggaaagggggccctacacccagctccaggaaccgcttcatttctccctaatcctcccaatagcagagacagcccagggtggggcaggatggaccagcatctcagggttctttctcccacctgtgtacatcagctcagctacccagggacaagcaggcccagagacaaatgggaaacacagagagatacatgggagacattgtcatacacacagctgcccagggcacatagacacacacacagatgaaacgcactgaggaccaagaacagacgtgaacaccaatagagacagacacacagtctcagatgtccaggacacagaaacacatgtccacaccaagccaggagcccagggacatttgtgcagacacccatggactcatacaagccactctgggatgctcagacaccaggaataaggggatattcccacacctgcacaaatgcagctcctacccaagggtgcgtgctcagtcactcagtcgtgtccgactttgcgacccccatgcactgtagcccaccaggctcctctgtccatggaattttccaggcaagaatacttggagtgggctgccatttcctactccagggagtcttcctgacccagggactgaaccctcctgctttgcagggggactctttaccactgtaccacctgggaagccccacccaagggtaagcatatactcacaccacccacagagtagaacatactctgaccaacacatcccactgaaagtaacaggaaactcacactcatggaaacatatactcttgtccactccctacaccacatacacatacaagcacacatgcaagcatgcacacaaacactatcgtcaaatacatcaaaagtcatagtcctgaagcagaaatacctacccaggcacaaggacatacgcagagacaggcccaattatgaagacaaactatggaccccatgctccctgctcagaacacacacaccagagaggcctgtacctgacacagggaatgggccttaagtcctgggggtcctttttctgggtggggtgggggctgtcccttcccctaacccagcctttccatcatgcccaatgtggctgagtcctgcatcccttcttggtacccaggctcttctctactcccgaccctccagcctgcagacccatgggagctgccaaggacataggcctgtccagagagcatacataatcctcctgggagactgaggtagagatgaccctgtgtgtcctggggtggggccgtcccctctccaaacccctgaggaagtctgaaaggaccacaggttttagccttgaccctgggcagggagctgtgggctggccttcctacctgcgaaggacaccacccaggagagaggcattgaggcactcgggaggtgagagtcgccgctggacctcccccaccgtcaccttgtacttggacgtcgagctgagcagagagagccggccgggcacggagcagaagacctcactggggttcgtgatgccgccaaccaagctgtctttggccagtgagagggccgaaaggctgctggctttggaggggatggggactgtggagcagaagcgagagcaagggagagaaacactgagcactggccagctgggatgcgagcgcgctgctgaggtgccagctgcgagtcagcaccgcgctcacacgctgtgcacacacagctgcttctgcacgtcccagcaccttccagaaggaggttctactaaccctgctttaaaagagaagagactgaagcatgatgaggttaacgtgactcactcatgttcactcagccaatgggtggtggaaatgaaactcaaaacttctctggctctggaaccccgattcccttcattgagtcaggctggttccctgttaaaaatcaaacagcctcagcagtcttgggagtttgggcatgcatgatcacagagggtgttggaaatagggaaacggaatgtgagctggcgactggattcctgggtcactgccagatcacaaggagtccccgattccctgctcccactcacctgtgatccccatgtctcccccaccatctcaggtcagtgaaaggcctgggggctttggactcccgcattccagagacagggaggttatgaccccattaggcccccaaccctggccctcttccagctaagtcactctgggatgtcaagggagtccag

SEQ ID NO: 27712 - DNA, 1867 bp, Bovine  19866880670449
  misc_feature (1)..(1): n is a, c, g, or t
naagggaagagaatatgtagggtttttttagctgatggaaactttcttttttttatagaatatcttgtaaaccatccaatagaataatttggaatgactgctctatctagaccagggtttctcagcctcagtactattcgatactttggactgaatacttctatattttggggggctgtcgtgtgcattgccagtatcatcccccaattcgtgacaaccaagaaggtctccatatatttggcaaatgtttactgggggacaaaagctcccccaagttgagaactgctggtctagactgtcagttccttgaaggcagaggttctatctttttcttgaatctacagtacagcttagacatggaataaatgaataaatgtttgttgaagaaataaactaaatcttatggtcaggaaatatcagattgtccagattttttaaatatcaggttataaggaagaaagtagcctcattggtattgtttcactatccaaattagcaattaaattgataaagatagctgctgtttaatctctgacagtctgtacaaaactataacaatcaagctaatttgtggaggattaatggatcatctccagcatgaactgatgatggcctccagagtttagagatgattttattttaaaatgcatacaattttgtaagcctagctgtagatctactgatactgataaaaggttttagacagtagagtgcatctgagagttcatcatattgtatctactattgacatccccccttattcaaaataatagcagcatggaaaaaatatttagaaatctagagaatcttaggccaaaaagcttttgacataactttttatatcggagtatgttcagtgaagtataagatcacagtaattgtagctgtttttgttttgttttggctgggctgcacagcttgtgggaacttagttccctgaccagggactgaacctgggtcctgggcattgtcagtgcagagtcctaactgctggactgccaggggattcccaactgtagctatcatcatcatcatgatgaagggaatattatccttcacaaacaatagtacatcaaataatctttcaatctcttcaggacctccagccagcctgtttcagccacctcgtcgtcctggccttggaactgtcggaaaacccattcgactgttagccaaccatttccaggttcagattcccaaaatagatgtgtatcactatgatgtggatattaaaccagaaaaacggcctcgtagagtcaacaggtaaggattaaaaagaatagacttctatatgtatttaaatacacatagtttatttattatgaatcatcttgttctctaaactcttttaacatgtaagctttgtttttctctaagacagtgagtttcttgatagcagatatgctatctcatacttggttctccttcatagatgctagcagagtactggacatatcatccttcagtcagtaaataatgaatgaagaattgtccctctttcactgtccaaaggtagcagaaatttataagaagtagatgaaaccattgatatccatggaaaatagaactatctggaaattcaaattttattattaagtgttggcattggacatgagaaaaatgtaagtgtaaagacagaagaatcatcttggggtattgaagaaattaaactcagagagaagctctgtttaattctagcattatccaagaggggtctagataggatgatttaagtattgtggtctgtataacaggaatttaccaagggtgaagatatagccctataacagatcttattctagtgtgctgagatcactcattttccttgtctctgtttcttcactgatactcagacagtcattaatat

SEQ ID NO: 27713 - DNA, 1737 bp, Bovine  19866880726161
  misc_feature (1)..(1): n is a, c, g, or t
ntcccataaagttcttacagagtttatttgactaaatatgctcagagaaaactgaaagaatttagggcattaacctaaggtgttaaacaaaagggatctacatgttaatgtgatttgaacagaatgaaatctacaattcatgaaattatttacaactgtttaaagttctcaatctgtggaagagtagttagtccctggcattgacctaagactcaagtttaattttacctgcattgttttgtgaaggtgggtcacacatactttgctgattacagaacatcaaaatacaaagcaggttacagaaatgtttcatttctccccgccatttcaaggactcactgagcttaccctgtcgcttacaaccatcacattttgccatctgaaaaaagaaacagaagacagtaaagaagtaagaaataaattatctatggactgattaaataaaaggtcccaggtaacgagtgaggaaatctgcttagaatttagatcactaaaaggaaggttaactatcctggagggaggggcaatatacagtaggggactaagaggtacaaactactatgcagaaaataagctataaagatattgtacaccacagggaatataggcaatattttataattataagtgaagtataacctttccaaattgttaatcactgtattgcacacctaatactttactataatactataattcagctttttttaagaaaaaatgaaggttaatgattctgaaattggaaattatgtcaacaatcttatacaacattaaaaaaagtcacattatagatgccaaaaatagcaatttttagaaagtgaaatggaaatagattgatcctccttaaacacgtcagaagactattttaaagtgaataattataattttaaatattttaatgttttaagacatatgtcttctacaaggaaattaaaaaacaaaagcaatgtaatttcagtaacattaaagtctttttaaatcctacattaatacttaacactgaaaatcattaattgccctttatactatttgaaagaaaaaaagaagggaaaaatgtgccctaacttgaaaaaccaggaatgtgaatcatatttacctgacagagcaaaactgtatatttggacatgcattcttcacaacaaaactcttctactttcccccctaaattattctgtaccaatttgggagatgtctgtaaacaataactgcacattttacagtgatttccccagcgttttgccaagtcatgtttataaagcaatttgcaacctaaaaaaatcagagaaggtaaaattaacattagagagaatagtaagtatttacatctttaatttaaatgccctatgataaagtttgcacagttgggttctcaccaattagtagatcaagaaatcaatttagaggattgatactaccattttctttttttaaacaaaataagacagcagagcaaatattacagtccatcatatataataaaagtcagttttgttttataaaacttgttttctttgggtatgtgatcatacactgggtcacaatgtaaaatgtatgttttctgcatgtggtcaagaggtttgaaagccactagactaggaggttacttctgcatggttttagagtaaaacaaaacattctaaacttacagtcatctaaataaggaagacatgctgatttgcatattcagaaatataatggatgttaaaaaaaaaaagtataatcttaggatgctacgaa

SEQ ID NO: 27714 - DNA, 1473 bp, Bovine  19866880727536
  misc_feature (1)..(1): n is a, c, g, or t
nggaacttttgtttttctgtgataaaaatataaaatattgatttagaaaagcctattccagcaatttgaaatgcttatttttagctcattcaaataagttatatattaaatgtttgttcttttttgccttattatttctctttctctgtagaaccggactgtagcaacaccaagccacggagtatgggacatgcgagggaaacagttccacacaggagttgaaatcaaaatgtgggctatagcttgttttgccacacagaggcagtgtagagaagaaatattgaagtaaggcttgtcattagtttcactttgggaccattttgtgtttcaattttaaattattcagctaatgttctaaccaacattgcctcaatatgaagtatatttaatcaatgaacctttaaaaatgtttcttctcagtactttgatgaagattctgaattttttggtcatatccaagtcactgattgattcttataggcattctaatagactagcttatatggtatagcaggagtaccattgacttttgatggcaaatagtttagatttaattcccaggtttgccacttcctaactttattaccatgaacaatttatttgatcttattatgcttcagtttttaccttttaaaaatagagataatagtacttatttactgaatgaaagttaaataacatccttatttctcaattgagttccttgaaagagtcatttaacttctcattttcactttccaaaatttggcctccatctccactacttttcgtcttctccacattctttccctcaacaatcttctgtttaaaacaaatcttcattttaccttgacactctctcaggattccaggcttccattcagtctccttccttgaagttttagtgctctaccaaaattgattcctggaatcaatttcaaccacaaaagtatctttgtgattatcagttctaatggtctattctcaatagctgagaaaagaagagaaactaaaggcaaagaagaaaaggaaagatatacccattttaatgcagagttccaaagaatagcaaggagagataagaaagccttcctcagtgatcagtgtgaagaaatagaggaaaacaatagaatgggaaagactagagatctcttcaagaaaattagagataccaagggaaaatgcaaagatgggcacaataaaggacagaaatagtatggacctaatagaagcagaagatagtaagaagaggtgataagaatacacagaagaactatacaaaaaagaacttcatgacccagataaccatgatggtatgatcactcacctagagccatacatcctggaatgtgaagtcaagtgggctttaggaagcattactacgaacaaagctagtggaggtgatggaattccagttgagctatttcaaatcctaaaagatgatgctttgaaagtgctgcactcaatatgcctgcaaatttggaaaactcagca

SEQ ID NO: 27715 - DNA, 1295 bp, Bovine  19866880747021
  misc_feature (1)..(1): n is a, c, g, or t
nataatgttacatttcaaagtattataatttcaaaagaaatgctataatggaatcacatggaagacacagaatataaatattcaattaaatatgtaagaaatacaaaattcctaaaatatcaacagcaataaaggaataccttgataactacatattaactctgaatgtatctaattaccagttctattaaccaagaaaaataccatttgtattaatgaaatattgttgatcagtaacaatgatggttgagcttaaaatcagaactgttttttcttgactgggttaaatcttagaagaaccagtttcaaggtaactagaaataataatatcactcatgatcctataagtaacttgagaaaagatgatatgataattgtcccagaaactaggaaagactttagaaatgccactgttctagtcctaagtttttctcattattgattttgtccttaagagacaaaaatatttagctttaaaaaaaaaaaagaatgcttatttatagcataatcttcactgaatgggaaacaagctactttctacaaatacttcatctacaatctgactacattacaaaatgccccaaatccttgtatgcctaaatgctataagatttaattctatacaattaaaacaaaaattttcagtaactatataaagcattcaaaaaaactgaagtccataaaagacctagttaaataaccaggaaatcctgttcctgaacaagattaaatgaactcatgaaatttattttatataataaataaaaaatgaataagggcaaatcagcttagacatattcattctgcataagatggaaaagacagtagcaataacaataaaaataataaaacttacatccccaatgatttttgctgttactgttggaactgcacctgatataaataaaaatataaaatttaggatcttattatttaaacactagcattaacagctgattttcagaaaacaaacacaaagttttataataaaaatatgtattatcttttattttattcaggggaagagtagcatctaaagtattatacaagaaaaatagatttggaaactacaaaaacactgtttaatgccaaagcagcacatagggaaccaccattcctaatatgaatgtgacaaacacatgaaaatgattacagacagaaaaaaggtagaggaccactgtcgtcaacctcaaaaaggctaaataactgctgtcaaatcaagccataccttgtaagacactgttagaattcactgtgggctgagcagcaggagcacttgctaatgataccacatt

SEQ ID NO: 27716 - DNA, 1653 bp, Bovine  19866880795543
  misc_feature (1)..(1): n is a, c, g, or t
ncccctgatcattattaactgagtctaggcagtggaattctactctagaaagagcctcataaattccccataggttggagcttactgaaaaaaaacaattgtgagaccatgtactataattatagggatactaactaataggattatttctttaatctacagtattaataaaagtcatgtctctgtcctttcttcccactaaaagggaacactttgatcaaaatctctgtctccccatcctatctccaaggagagaagcaaagggctcacctgggagtggtgtggaggtgctctggaaagaggcctggggggtaggggtggcataactgtaggagggagccactggcagagggtgagcaatctggactttctcagggctttttacttgctgaatgctaggagtagcaccgggatcctctgatgcttcacgctgaactgatacatctgaccgaccaggaatcttcacactcaggtctgtggttaagggattaaaaattgtgtctgtgctgtggacctagagaaatgcaaaattttatttgaataggcaaaagttatacagtcagtttttaagataatgtctcatgaaataactgcaagttaaatgattttttgaaaaattcaaaaccgccaaagatactaaagaaattaatcttaccacgcaaattggtattaaaaaatgttgatataaatgttcctagtatttttctctctatgcaaaaagttttgcttaaaacaaagcagtaataatcgttccatgtgtacttttatctccttctcacttaacatttatattcaatctttcaacaaatacatattaagcacgtatttataaagcaggcctgtggatccaaaacataaataaaatataatcactgtgctcaacaagtacacaatctagtgggggagaaaggactagaaacacaagccaaaatggtcactatacctttaacagctatgactgaaccaaagaatcaccattagagtacttctctttcttggagaggaagcatgtgaagaaggatagtttaataaataaatgaagactttctggaggcagagagtcctgagatgagttccaaagggtaaactagacaagaggctgaagggtgagatgtgaatagccaaaagaaatgagattaacatggctagtgttgggaaacaagggtcataagcaaagtgagaggcagggtgttgaaacagaaggtaagctggaaagacagtcaagggccacactataggagactgagggtgtgcttaatcactcagtcgctgccaccccatggaccacagccccccagactcctctgtccagggggattctccagataagaatactagagtgggttgccatgccttcctccagggaatcttccaaaaccagggattaaacccaggtctccctgaaactaacataatattgtatgtcaatcaaatttttttaaaaaagctggttcatgccctttgcagtgaagtcctgcctccatctctaggctcggacaaccacagatttgtttctgtcaccattaactagtttaggcttttttggaatttcatataaaaggaatcacatacaaactatttttgtttctggctgcttcccttcaacataacatttttaagattcatatcatgttatattcactctttttatta

SEQ ID NO: 27717 - DNA, 1784 bp, Bovine  19866880833958
  misc_feature (1)..(1): n is a, c, g, or t
ntcatcactaacgcgggtgatatctgccttagttttataggataaagttggggaggttcatgcttggaaaatgaacaaaaaaaactccaccttgctgggtgagatagctgagaacattggatatttcaggaatacttttaaacagtttttgctataatgtgtagctttaatatttgtcttcagttatagacccatgaaagtattactgtatcttgtgaataaagatcattcttgtggactatatggatgcattcataggctgtgggaagcagtggcgtgtgtgtccgtgtgtgtgtaaatattctatgtttataacactgtgtattacataagtttatatagaaaaaatgtgtttctttaatgttttgggggactaaaattgtaatataaccattccagtgtaatctgaccactcactctggagaacatttatactacacacagatacacacccctaaagcgtggctaactgctcccactttagataattgctgctttttttaaaacccaaaataatggaggaggaaatagcgctctttttaaaggggcttttctgaaaagtaaaatgtaaatataggacatgtgggaagggtggggccttctgcagatgtcctgcaggtggacaaatagccttttaaattttactttttaaccatcttaaccgtgtgtgcctatttgtactgcagatgtgaaatatttgggggggttaatatcagtatgttttgaaactgaattattacataaaatcagagtaacctctttctccatcctccttttccacactgactattcttgccaaatatttctactgaaaccaattttcagcatggtaaaactatggacactcaaacctccttcttcatcttccctatcctgtcttacacccggtctggccttatatttttttgttggcttttcataagtaagaacaatttactgtagtttagagactgcagaatttcaaaatgtttatctataagccttcctttgttaatgttcggttacacagtcatattagttaaaacagtggagtcagtggagtgagtctgagttcttaatatgctgtaagataaaatcttgactgatactaaacttgacggctgcatactattaagaggaaattggattacatggtgggtgggagctaatctatgatatatgtgtactcactgtatactgagaaacaccaaatgcggagtcctatcactgtgtacttgggggccaggctgtggagatggttttcattttaattccttgaagactgtatgtcattaagacgagcagaaggcaaataaagtttttaaacaaaaatgctttggggggtatttaaattatgttcccccaaaaatctttactacaaaaaacctagggttgagattgagacgcttcaagccgctttttaagcagttcagtcacttacaatattttatgttaaagaaattgtcataattctttctgagccaagctgtcactaaagtgtcctgtgacagaaccactccttttttctgccattctgtgtattggaagagttctatgttgtatttgtttttaatccttgattttaaaatattaatggttttagtgttgcttagcatcagtttgaagtgtaactttcactaataactgcaataaaaagaaaagctttgctccaaactttctgttggtgtgtgttcatcattactgcacttcagacttaagtaaagggagttagtgtgaaagagtagaaagaatttaggctttaagaatcgtaaagtcctggattctagacaagttcccttgatgtt

SEQ ID NO: 27718 - DNA, 944 bp, Bovine  19866880877871
  misc_feature (1)..(1): n is a, c, g, or t
ncttcagggttagcatccccaaaacgatcgtagcaggggtggaatttagacattaggggaagaacttcccctttcataactttctgacgatgatatggccaaagaacactagaggggggacttcccccgtggtccagtggttaagactcggcgctccccattccgggtgcctgggtttgattcctgttcagggaactagatcccacatgtccaaaccaaaagcatgccacaactaaggacccagtgcagccaaataaataaatattaaaaaaaaaaaaaaaaagaatccaccttgcaaggcaggggatgtgggtttcatctatgatcatggaactaaaatctcatactctgtggagcagctgagcccatgtgccaaaattacagagtccatgtgctgcaacgaaagatcctgcatgacgcaacgaagaccctgcgtgcctcaactaagacccaacgcagccaaataaataaatattaaaaaaaataaataaaggacactaggagttgaggcttgtctgtccattaaatgtccggggagggaactagttctgtagctgcaaccaggaatttttaaagcttttttctgttacaagcaacagtatagggcagcattatcaggaaggagctgaagtaggaggctctggaggcatgactctaggctacaacagaggaaatgttctgtctgaaagcatagagtcctctctctgcatgcacacgtgcacacacacaacagccaagatcctttctggcctgaagaatctttggcagcagcaagagcacttgtcccattgtgagggtcatttttcaaagcgccactggactgtgaaagccacttaataacttgatctgtataatctgagttaatactagctccgcagttgtgaggattaaaatttgagaaatttgtaaagcgtctgcctccaagcccagcacctaggaaacct

SEQ ID NO: 27719 - DNA, 1758 bp, Bovine  19866880912890
  misc_feature (1)..(1): n is a, c, g, or t
nggtctgcaaaggaaagacactgaagtgacggtcaaggcagtaacaccaacatctctcatggaaacaggaacattccaactgctgataaataacagcagcagctgagtaaatgatgatgaaagaaaagattcagagaaatctaaaggacccagagtgtggtcagaggtaaagggaggtcagcttgttttctctgaacagaagaccatttggaccactttgaggtatttgaaaaagttgcgtcttaaagctcatggaccaaaatctgttataaaagcatttcaaaggcaaagcatgggtgttcttgtgttgttcctaacagctgaaaccaaaacacactattctgagagtgtcaggccacaggctaaagaaagctatagcaccaaccacgtcatccaaaataaaaaggctcagtatgggcatctggaccacaatctcaaatagtgaactgtatgtctcactattaagaaactacgtcttgggctacatttaataaatcctggacagggtgtgaaggaaaggccgacgttgctggaatgtaaactggtgcagccactatagaaaacattatgggaattcctttaaaaactaaaaacagagctaccatacgatccttctattctactcctgggtatatgtccaagaaaaaacaaaaactctaaatacatgcaccccaatgttcatagcagcactatttacaacagccaagacatacaaacaacccaagtgcccatcaacagacgactggcttaagaagctgtggtacatatatacaagggaatatcactcagccatagaaagaatgacttattgccatttgcagcaacatggatggacctagacactattacacgtagtgaagtaagtcagagaaaagcaacattatgtgatatcacttatatgtgaaatccagaaataatacaagtgaatctacacacaaaacagcaactaactcaaagacatagcccatgggattaacagcgacaaactactatacataaaatagataagtaacaggatttactatatagcatagggaaccatattccaaatcttataataacttatgatggaaaataatctgaaaaaagtatatatataaaactgaatcattctgctgtatatctggaattaatacaatactgtgtatcaactataaaaaaagaataaaaaagagaaagaagtcttggggtagggaagcgtagaaggtctcaaatatttgaatcaaatcactgaacttctttattgccgcgccacacagcttgcaggatcttagctccctgatcagggactgagccctacaccctaagcagtgaaagggccaagtcctaaccactggacaaccaggggaatccccaagtcattacacttttaatgcagacagtaataatgcaagttcacaagttcaaagaaatgtggtaactctagaagaactgtagatttaggtgaaatgctaattatttttctaatataacaaggctgtgctaagataactaagaggtaatttttaccgagacaaaagtaattataataacctattttataggtatcctttttttgtattacctgcaagtgtaacgagcaagtttctacagagaaccctgccttgttcttcatctctaaatggatgattatttttctacaccaggtgggccatttaccatgttagattcagactgtctgtgtccccaggcaccagtggtgtgacttccatgaaaaatgacttcctttttctctgcacagtacgttttccctcttgc

SEQ ID NO: 27720 - DNA, 1379 bp, Bovine  19866880940633
  misc_feature (1)..(1): n is a, c, g, or t
ngccatgcaggagacgtgagacaccagtctcgatccctgggttgggaaggagggcatggcaacccactccagaattcttgcctgaagaatccccatggacaaaagaacctggcagctacggtccatggggtcgcaaagagctggacatcactgaagcgactgagcatgcacgcatgcaaagggactcagccaaacatatacatgtatccattctcccccaaacccccttcccatctaggctgccacataacattgagcagaactccatgtgctgtacaataagtccttatttccaccctcctttgtctacttttagcttaaatctaactccttcagagatgcttccactaccacctctttcttaattaggttacctgtttcctgttttgttttttttttcttttgggtcttttatcacagtttaccactttaatgtttgtttagatctgctttctgcattagactaaattctgtgaaagcagagatcatatatattgtgttttttaaaaaatgtatgtttcaggtagcaccatgcctggcacatagcattattaataaaaatgtattgagcaatgaattatctgaaggctggaagagctcatggtgaagagccaggagctgaatggccctcaagggtgttttctaatgtgggatagaacagatacaggtggttgctatgtgagatcttaagctcttcctctgcatcttacatgtggcatgaccctggaataagtcattctgaaattttcctctgctggaaaatgaagctaaagtgaactggcctggtttagctcccagggttatggttgggatcataggtacaattaatgtgagatgagggagcacgtttaagaggctgtgctcacgctgactgacccactgctgaggaggaggtggggctcattacggtctagctgagtggaaaagagaagccaagtcttgccaaagctccgtagctgccagcccatgggcccagcctaggcccagtggtgcctcgctctgtgctgggcctcctgagaggggttgggctggaggtctgcttgtgtgcctggagtctcagtgagctgggaaacaggcacggctttgtgtacagccggtgtcacctcagggtctgccttttgagacccagatgccagatctctgtccctcgtggttgtatcatcttggtctgtactgcccacgtccttcccatcccctcattctctccgctcttctctcacctgaaaggtttttcattttcagtttattgatctggttcttccctggggtgggatacataatgggaaaagggggtttgaagtagcttcagcctaagggtgattggaggaagagggctggacactggggttctttcccttcactctagaaggaaccacgat

SEQ ID NO: 27721 - DNA, 1816 bp, Bovine  19866881013519
  misc_feature (1)..(1): n is a, c, g, or t
ncacaccaggcccagagaggcctcccctgggagagaggcactctaaaagcaaaatgctcaacattagacaggttttgacctaagaatgagcatttagtctggacaccaaatcgtgccctccaggcactggatttattgaaaaactacatacatattaaaacatctttatatacattttctctgttataagattacaaatatacaaatgcaaattccatcaaagtcagcatcttgtacattagaaacaactgcagaaaacctatatcctaattccatcagttaaattgggattcctcaaccagttaaaaaaaactggcacagctcacccagcttcccaagtgcagctcatgacagtgaaaccacagtgtttacatgggacgtttttccaaggaagcagtgatgtttggttccgaggggggaaaaatatgtttaaaattctgagagcctcatggtggttcggagaaaactgggactggtggcaatcctcttgacaacattttgatgaaactccttgatggtcttctctcaaaataagtaatgaagttattacttcattgtcctctgactggtcagggcaacgtactcaacccagctgaatgcaataaataatgattatatataattcttcggtcagaatgaaaaggaaggtccttgagcaacagtgtttcaaatcaaaaactgaagtcctagaagagaggtctctggtccacagactatctaatgtggatggccactggctgtaaccttctatcttcatccttatactccagaaaatttgctctttctgacttgggtaccagtttgagtgcttattataaaggaagcaaaagtgaaccggaaatttgagactgccttgggaagggccagaaaggaaaacggaaggggcatgacttctaaaatagcccatctgttgattcctaggtcctctaagaagcccctctcactgagtcctggtaaccatcctgcatgtcgtaggggtgtgaagacatcatcgcagtttcagtattcactgctttctgcaattttctgtcctgtcacactttttcttcctccaactacccctttcaccaaaaggaatcaatccagttagttgctagggtaaaatgtcaaatatttaatggaggacactcaggtatcccataagttgctgttgtaaacactccagaattattagtggccaacccaggaagtaatactaggaaagagatgtccagagccacatggtggaaagaaccggaatatctgtcctcagtcttaatgcattgactgtgaaggaggtggggatcatccacgtgagcatcaattccagccttcagtgccagatacttatcaatggagcccccacagaggtgctggcgccctcatagcgctagctttccaagtaacggaagatgctttgcttcgattctgaagtactatcatctattttgaggcgcttaggtgaagtggatgtcattaaagacggaccccttctccgtacctacagagcagagaaagagacaagaatcaactcaagacctttgtacaggctgtggttcactcatacttagcttcaatcggctcttaagcagctcatagttaaatcatggataattaggaaaaaaagaaattgaaaatttccaggcaagtctcacagctgattatacttactggggttagcaatccccttgtaccttattgggaatgcaagattaacactatggcataaatctttaagccagaaatacatatatattttcaattcaattcaattcactcattcattcattctgctttggagagtcgccaaatcagttctcaaattccctacccgagg

SEQ ID NO: 27722 - DNA, 829 bp, Bovine  19866881014144
  misc_feature (1)..(1): n is a, c, g, or t
naatgcagggggcaaccaacttcagaaaactattaatacttccttttctcttaggctgctctctcccttccatgaactctcttggttttctgggctagagactacttgcaacaacccctggagctagagtagtaggacacggaagtccagatgggttgatgggagctggcacccataccagactgcttgtgattttattctgatgaattcctagtggtctcgagagtgatgaaaaaattaacgttttgtttttggttgttgttacaataaataagcttctacggaaggaactagagcctggtatctggagttggctgtagcctgatggggcaggctttacctcatcaaagggtgtaattgaaattcattctggaagctgtgagtagagggatcccataagtgcctccttcctaggctaggactattttcttggaggttggaggacatagtacacaaagcagtgtattgtttctggcttcactgggctcaaggccagatgtgccgtctgtgcttaggtgtgtttcaagcacatatactggactaggagctcctagagggtggagttggtgtctgatttatctgtggaaccaactaatgtctaggccttgacacaagtacatctttattttttgaattgagtcacattccattgtgaacataaatggttaagtacattgtatggctatctaataatttgtgtgtacttagtgtgtggataaattctttttgaagagtttgtcctcttcctcttcgcttactggacagctaacccagccttgagtttgtcttttgaatgggtagtctagcttattggtagctatgtgggcct

SEQ ID NO: 27723 - DNA, 929 bp, Bovine  19866881021971
  misc_feature (1)..(1): n is a, c, g, or t
ncagtgatagagaattaactactatatatctcagcagactagtgagtagattaaattattaagcaaaacgctttgggcaaaagtcatatggatgttaaatattctgatttacaagcactcattatcctagcactcctgtggggttaggaagttatcaggatttcatagatgagtaaacaggcatggggtaaagtcacatggcagagctctatttacttagtccctgtgggaagggaataatacacacctttagcaatcataaactttcttgccacatcctacacaatctttaacacattcaatcctcttttccccctttcttttttcattgaatctttaagatgttgcatcttttcacatgctgtcaatggaacaaagacagttctaaggtaacagcaaggctagaccaagtgaagaggaatattctgtgtgcactggcaaggagtcacagaaagacgcggctactctcgaaataaaatgtgtatgtaatagtgttttaagggttcatctccaccaccacataatccaaccacaggaattaagaaacatggtttgctgtgaaaacactgaaaattaaaaggccattgccagaccttcctgttggtgtaccccctccaaattctctgcaactgttacgttcaccctctgggctttaattagcaactatgctgaaagaaaaaacaaatcccacaagactgaagaataacaagtagcaataggaagggctcagaacggccatttggtataacaggaatagacaagaagcatagatttctctgttcctaaggctgcttgctgtattgcttacccgactccgaagatagtcagccaggtttcggcgagtgaaattagctgctgccgtgggagacagttcataacctggtacaagagatacatacttgttgtcaacagttgaaaagtgaaagtga

SEQ ID NO: 27724 - DNA, 1510 bp, Bovine  19866881025183
  misc_feature (1)..(1): n is a, c, g, or t
nttggctaaatctcaatcacttaaagaagttatgagttcatattcttccgcttcatgtttttgtctccacattaaaaaaaaaagtttcttgcttccttgtttaacatctctaggatcctttttaattcatgagaattctgaatggatagacatgatatttaagtctgacgagagaaagcagccaactgaagaagatgacaagtagacacataccagtcacggacattatcttcctccttataatgttcatacgagaggtggcagctgtacttaacagcaccattcccagggtaatgcacatataaaacagagaaatgatgtacatttctgctacatactgaaagaaatacgtgtcttgaatataatgtgtctgtcctgtgtgagttttgctttcagcaaacggggctcctcgtatatgaatccacattcgaccagatgacatcaagattacaaaacacagagctaaaaccgcccaaaaatttttgctaaaaataaacgtcctcttccatttcaatacatacacaagtccaccgatgagagccacagatatccctaacttgaagggatagtgaaaatgtataggctgtctggttgtgaaattgcccatccatctcccagttctgtcgtctacccatgtgaacatatgctgcgcagagatatcccttacttggaaattataaatgtcatctgctgtgaattcacttttagcaggaagatggaggacaactggacctccccttcacctggagtgttttaaagacctcagggctttcatcaaaatccagcatagcaaaaaataccttgttgctgaatgcactggagaattgccaggaacctgccaagacctgaaattcttcaacagcaagtttgcacggtgcacatgatctaaacctctggagagcagtaaacattgcaataacggaatagtttctgggcttttctaatacaaaatggttgaacgcggcagtattcattctcatcactctgtctctcttagtccagtccatcagctgtctgaccttttcttctaacaccttctgtccctggtcaggatgtgccgaagcctcaggagtcatgaacatcaaggccaccacagtcagagatacgtgccgaagccaccagcattcttccatatttgtttacttcttctggttacgtttccaaatatctatgccaaaatccgatcattttttctaacaatttgtccagggatttatatttttctgtcttcgttaatcctagcataaagagctatatcacaaatttccatgcatgtctggcttgtgagccatgtattagagtttagaaaatattctgtggaaaaaaaattttgtgattaaagaagtcttggagatgtttccaaccctcagtctctctgcagagttccagactcacatttctgtcggctagactgcagtaccggatccacgacaatcacctcaaactactcagaaaccaaccctcatcatccccttgcctaccaagtcctaggttctctaacctctcttct

SEQ ID NO: 27725 - DNA, 2348 bp, Bovine  19866881030060
  misc_feature (1)..(1): n is a, c, g, or t
ngtgggttaagtaacttccatatgtgtgatagaacagagatggaacccgggactactgaatccaaaaaaccctacacatttgatttcttaggttgtttgttccctcctccccgctctcaagaggtctttccccaaacccagaactaaccagtgttgggagggtggaggttttaggagctgatcctgcctctttgattatcaggtggtaggcagcatggatgcccaccccagccgttactgtgctactgtgcgggtacagcgaccacggcaggagatcattgaagacttatcctacatggtacgtgagctgctcatccagttctacaagtccacgcgcttcaagcctacccgcatcatcttctaccgagatggggttcctgaaggccagcttccccaggtagggcccacaataggtcaagaaaaccttcacattgaggccatagggcctgatggtagcagagagaactgctccctttcttaagctgttggcactgggaggtgcttctacttacggaggtttgctaaacggaacaggcttggaagcagagatcccaactgagagatggtgtgtacagtcattgatagacctttcttcttgtaataaaagactctcagtgcctgtttactagttagttcatgttgaagactgattctttagaccagtggttctccagctttgggcttccctggtggctcagctagtaaagaatccacctgcaatgcgggagatctgggtttgatccctgggttgggaagatcccctgaagaagggaatggctactcactccagtattcttgcctggagaattccgtggacagaggagcctggtggactatagtccatggggtcttaaagagtcagacagactgagtgactgagcacaggacagcatacctgtatctattctcccccaaattcccctcccatccaggctgccactgatcctgcattataaacggtaggttcactcacacttttcctttcaaggccagggaggccccctttccctagacctggcttttccatgagaatctcgaagagacaagctgggaatgtttgttcttagcttttaaaccagtgagagacttccccatgccagagggagcaggactttcccagaaatccctcttgtacaagagcccccactttttgtccctccctctgcacctcagtgcagggttccttaccttctccagcaccccttcaccccttcatcaccagcagggcagcctgccagtccacacctcccgccttcttagcaagcagctgctccttccacacagattaggtccaggggcaggccaataaatgcaggtctcgggggaggggaagctggagacgctcttctgagaggctgtgagagccggcagggtggccccattgaacccctttcccctcccactgcggggcggtggtgcgggggtggcggggaacctcagcactgctagttgaaacaggattcccccctcccctctcagcagccaggctttaaataggattaatgagagagaacattctaaacactgctctgcgaggttccagaaccagcagccggctacttcctctcaagctgccattttggactcattccccgggctgccctcctgacttccagctacttctttcccactgggcgttacagctctctgctcagaacctcgctaggagctcaaggacagatgagtgtcgtccacccactgccaggaagtgccctctgctgtattcactgagactgattatcttctgtgataaaattcagaccttagggcagtgggtgggcacgaagtggaacagaaaaggagcagtcctaatctgtggaggacgaatcatattcactctggtgtgaagggctctttcatatcatgggggacttccctggtggtccagtggttgagaatccaccttgcaatgcaggggataggggtttcatccctggttggggagctaagatcccacatgaagcagaagtgagcctgcaggctctggagctcagatttggcaactagaaaggccatgtgccacaaggaaagattctacatgacatggggaagatcttgtgtgctgtgtgctcagtcacttcagtcttgtccaagtctttatgacccacatggactgtagcccgccagtctcctctgtccatgggattctccaggcaggaatactggagtgtgttgctatgctctcctccagaggatcttcctgacacagggaccaaaccctcccctcttacattttctgcattggcagatgggttctttaccactagtgccaagctgggaagccccttgtgtgctgcaactaagaccaaaaaaataaaaattaaaaaaaaaataacaatcacagtacc

SEQ ID NO: 27726 - DNA, 838 bp, Bovine  19866881062350
  misc_feature (1)..(1): n is a, c, g, or t
ntgagattgtgggataaaaacccacagatgtctggctctttctgtggctggtggtgagatttaaacaaacgacatgtcttttatatgcttttcctctttctgtcagcaaaatggaaggagcccaaacctccttgcttgcttatgctcacattttgaggtggcaagagaagctttaggctgttcagctggaaggcatcatttaggtaaaagcctgctcttataaatgaacattttttttttctcttgcaaattctctttcacactggcacaaactgtgggactgttgcgtaggagattcatttccatctcaggctcctgtcttactggagccagccttcccggtccatcctagaggctgtctgcccaggaagtccattctcgcgctgtgtacacagccaaaacaggattatgggaggagagcctgctgtagtcagagcttgctttatttagtgtagcatctttgaacctcaaagggataggggctggaaattactgcttcttaagacttggtctgggctttggagtcagagcactgggcttgtaccttgactcactatttagctctgggcaggtttcttaacctcttaaagacttgtataattgtgaaattgatgatacctctttctgtatggttgttgggagggccagatcagacaatgctcgtaaaggtcccagccacagatacatgtaggcagcagagtgaaacagtgtagagatatattgtctagatttagatcctgactccactactgtcaagctttcaagcttgggcaagcttcacctctttctgccttggtctcctcatgtgtataggggtaaataaggacagtactttata

SEQ ID NO: 27727 - DNA, 799 bp, Bovine  19866881104479
  misc_feature (1)..(1): n is a, c, g, or t
nagcggtggcctgctgccctactgtatcagtcactgtgagttggtaagtatagtctccttcttgcatggcggagagctgcagggtcggtgttctaaccccctgaatgaacacatacagagaagtggactctcaaaatcatatcatacagtaagtccttctctggtctacatcatctacccagttttaaacctaggttggtactgggccaccacctcccaattagtgaatactcaaccagacactatggaacatcttgttaaaaaggcttgacccttcaagggaataaacctctgacacagcaacagtttcaaataaagttagagtgctcacgagggaagggagtacaggaaaatgtgcagagataaccaagatccatttctatgactcaagccaaaaagaagaccatgaacatataacaaaacaacacaatttaaaaaacaatgttctaacaaagtgtgatgcttaacaaagctgcatcaataaaacatggcagcaacaactctgttgtaatgctgtgctgtccccttataggtctgaacagattctgtgacagcagagaaacctcatataatacttaaactaaagccggatgaaatgtgagctttaagtcatgcctcaaatacgaaaacataagactcctgagtgtcagaagggatattacagataacttagagccaactgccaacgcaggaacttctaaaacagtaggcgaaacctagcagcctctgggctgaatccagcttgcaagcattttatttggtctttgggtcttaaaagtggaaaatttcttataaaagt

SEQ ID NO: 27728 - DNA, 738 bp, Bovine  19866881153314
  misc_feature (1)..(1): n is a, c, g, or t
nttttttttcttaagccattcttattgtttgggggccagaaactctaggttctgagagggtgtgtaagtggaaagacctgagttttggcccacatagtagaggtgcttgggtgtgaattagctatgaattgagatgcagggattaaactggagacagaaggagccagtagctttctgggaaggtacatcaggaattactggaagaagtttgtctgcataaaaaaaacaagatgctgtctggaattcctttatactctactactttgcctagccaagagtgaaatccttgataatgaagacactctgcaaaaagaccctcaggccagagccaggcttgacttcactagccactttggaggtggatcagaatagtgaccagtgcctttccacaaagttaaggtgcctttcacggagtgaggcttggcatttagaacaggagattcaaactcttcttaagaatgctgagcttccagcttagttacaccaaggcaaagactttggtgtttctgaggatgttttgatgccttgattcagatctttctggatttagtaatcattctgggcactgcttgtgtgaagcactaaagggagactgaaatgcatcttgacatagtccctgtttttaaagaatttagaatgtagtacaagaagcagacagtaattatgggagcagccagtactttgcctgcattcttctaggtaatgtcctaagcttttatatgtattaataatagtcca

SEQ ID NO: 27729 - DNA, 1627 bp, Bovine  19866881182216
  misc_feature (1)..(1): n is a, c, g, or t
nttgagctcaagtctgaacttgagcaaattatctgccctttctaagccagtttctgagtgtgtaaaatgaagatactgtcacttacccctgcctaactcataggtggggaaaactgtacacgtacaacattatcatactcagtgtgagacaatgtagttcagattatacatgctacaggaattcagggggaaaaaagagcaatctgtgtgagctgaggtactgtgagaaatttaaaagcaattctatacaggccagaagataagagaaataaaatgtggcatataaccaaactgaaaccttgtgccactttaacaagcaagcaatctctgggaaacaccttctctatagtatcaaaatatcttacagcaacaaaccaaaaaactgattggaagcgatactttcattttataccagaagaataatgaatcgcaaaaggttaattcattttcagcctaccctacacattttcttcacgaaatgaaaaggaagaaaaaactccttacacaattccaaagcttctatcataaacatttttatatctgaaaacaccatagggaaaattagagctaaatacaattattttcaaccatttttaaagaactaactcaaatttatcttccttcctataccacagtgatttctctgaataccataaggatttacttttgaaaccattaatttaaaagctaacctaatactcactggtgatacttctttttatcatacaaaatcatcttgtaatatttatttcctggttttcttaatgtcttagacccctgaatggattataccaaatatactgcataccctgtaacacctagaagcactgtgtatgtaagtgggcttaaaacacattctattttttgaagtggcttcgtatatattattgtgaagaaacagaacacctataaatgtactgaatttgttactgctaaactacttcatgctaaactcacttgcatgtcaaaggccttagtattcaaaataatggatagatttacccttaaaaaacaaattgactcctttggaaaacatggtttaccagtaaaacttttacaaactaatcatggaatttcataaagtaatttgacttaaggaacatgatccataccataaatgtttaacagtttgacaattttcctttccttaagccaagaatgaactgttacctgccctcaaagccgtccctagtctctacaactagagatctagctgtagatcccttcttcctctggagtagataaaagcaatctctgctttctctgcactacctgagaagtttggatgtacttttcatacgcagcatcattttctagcttgtgttataattatttgtacatatatctgaatcccttattaaactgtaacttcttttttttttttttttaaactgtaactgctaagataagggccacatcttatttttctttgcatcccttcagcacctagcactgtaacagacatataggtgccccaaacctatttgtcaaatgaacattaaatcatctgggccaacagataatactttttcaaaagtaggatatctatgaatcgtgaaaatgcactcttaagattccacagacaagcaaccaaaatctttcaaaaatatgcagtcaaaccgcacag

SEQ ID NO: 27730 - DNA, 1203 bp, Bovine  19866881182850
  misc_feature (1)..(1): n is a, c, g, or t
ncataatcccatgatagattggctgccccaagctcctcaggctctgtgttcctgcatgggcagagagctggaagaaacactcagaagggagtagggacttcacatttttgcagaagtcagagaattgcatagttgtgtttagagatacaattgcaaccagttttccatttctgaataagctagtatgattagtatgaagactcaattatgaaaccattcaaatatcagaaactaatcatggaatatattaactttccccagaatggctgaaacatgtaaagggatggctgtactttttcctattaacttacgagtaatacctgagcactgtgaaacatttaaataatatagatgtgtataaaataaaaagtgaaagtgctccctttaaatcactgttatcagagggagcaactacatataatttgaggttggaagaacataaacatcttttattatttgtcttcatgtttagatctttaattcagtcatattttacaattatgaagcctgtaaaaagggcctctttcaaatttcaagtttatttttctctaatctagcttgcaggaaaggggtttcaggagctattttaccgagaaccgaagggaaattgccagctaaagacgcacaccttttggcagacgcatgtgctcggcactttgtatacagcgcgtgatatcctcctcaagcaagtttcaaactcccaattataaagaaagaaactaggagttacgtaagattacgtaaggcaagtaccccgtactgcctggatctcaagagaccggaacaggccagaagccgagagcagcgtttaatccaccaaacaccaccctcacttgccaaactctcgcgacagttgtgcgtcatccgggagcgccggtggccgggactgtcgcggggcatgcgacgcgcggagctctgctcggaggtgctgtctcacccgtgaggcggagaagcaggccagccccgcgctcgattgaacctgcattccccggcctcctgccaccatggagtacctcatcggcatccagggtcccgactatgtccttgtcgcctccgaccgggtggctgctagcaatattgtccagatgaaggatggtgagaggaagcaggggaggccaggccgggcctgggtatagggacagccgggaggagttcgtgggaggttgggtgagtaccggggagagtcttgggcatggaaccccg

SEQ ID NO: 27731 - DNA, 931 bp, Bovine  19866881240833
  misc_feature (1)..(1): n is a, c, g, or t
ntgttagtatgttgggagttacctttggccaataagtagacttaggtgctttccattatattgcttgtgtacttttgcacaatagttcatggcaaatccaaattctaaatgttagatactactgattattctacatccaagtgagagtaatcaaatggcaagttgtcattcataaagctggtatttgccataagtgtgaatcagacttgtttgtagcttgtagctttaggcatgttttagcaatgtttaggactttgacctacatttggtgtgactttatccatgaaaagggaattgtttagtcttcggactcgtcgtttccctcctgttgggcctgtctttaggtgtactttctaaaataaatggacatctcttttgctacagaatagcaaaagtcacttattttttagcatactagttgtgtgcatttgatctgaaccttcttgatggtgtcatattttagctgtacagatagcgtgtcaggatcctttagaacaaccaagagaattggtctgagtggtgataccgggattttacaatccttagaagaactgaatattggctgtagaggtgggtttggagaaaagtgctttgtcacaaccgaattgaatctaattagttcatctacagtcttttggcaaaggagagaagctgcagtatatagctcactagattcattttacaaataataaggatttagaatggggcttcatctgcttaaggctttgaagattagaatcataaatagttggagggttaaatgtagcgctgttagcttcaaaatgaattttaaaaataatgtgagttatatttttggtttatatgcttcctaatagtcagatgtaggttatatatcaaatttgtaactaattttgacacgatgttcccacaattcagattctatagtccttgggacgtgtagcttctggat

SEQ ID NO: 27732 - DNA, 1107 bp, Bovine  19866881282293
  misc_feature (1)..(1): n is a, c, g, or t
nactttatatatatttacaaaagcttatttcaagaaaatgtcattaaaattcagaaagttaaaaccaaaatgttgatcttcatgtaaatttgagataagataaacctgcctgatactcacagcagcaatagaaggcttcttcccatcaccagctggcggatgagtgacatctgctcccaaaaagatcactggttgctggaacacagaaggtcttaaacacatttttaacaagagttagataaattttttcattatgcttttatctgtctcacactagggcagcacaattgcaagttgttggtatagcacagagaagatccttttcagacagcttctgccttaagcagctgtgctgatggttgtaaagggcagttgcggctagcattcttcataataggcataaaatgataaaatttcctcatattaacccatcaatttatatcaacctttctttaatctacttacattttaagccagtataatcttgaaaggagataaagaatcattaaaccacactggaagggattaagggagtctaccactccctgaacaaaagtgtaaaatttgagtaacatatatttaatagtcataaagtagctagtggttcattttattttaaaattgtattcttgaaagtcaaatgactatttctcttagttcttgggcttgataaaattctatattcatctcatttatgaatctcatttatatttaatagggatgggaaatagaggcagtatggaaaaacagggaaaaaaaagagcttttgtgtcaacaagacatttaagattttagagccctagttgcttcaactattaaaaggaaacctattgtttaattctccaaataacattatgcctcttccccagcaccctatttctaggtcatcatgtctcataggtcctaagagctcttagacatgatggcaatgtaacagtaacatctgttgtccaattgaccccagcaattgatatgacttatttaactgatttacttaattgacatgccccctctggtggctcagacggtaaagcgtctgtctacaatgtgggagacctgggtttgatccctgggtcaggaagttccttggacaaggaaatggtaacc

SEQ ID NO: 27733 - DNA, 1243 bp, Bovine  19866881329028
  misc_feature (1)..(1): n is a, c, g, or t
ntgggtgcatccataaatagacaaagaaaatattttttattttatatctcaaataagaaaaaagggaatggaaactgaattttagtatgagctcatctaatctgaccctaggaaaataatgaaaatgatcagaatgacccctcattcttgctggaactgcaacccaaaccaagtgcttaagtactcagagactctgttgttaagattgcacacatccatgccatcactggctccaactacagggaagcaataccaactttggggcccaggattattcagatggttgaagaatcccagttgaaacagaaggctaaaatcagtgacgatatcatcaagatgtgatctctgtcttaaatataataataaataaatactatgggaaaatgttgattggtttatgagactcggtatcttaaaattttcatctaatgagttaaagaaagcaaaatgcgatcatagtcctaagataagaggcagcataggctagtggttaaacatctgagctctggagtttgaatgcctagattcaatttcttcaccttagcctcttatttaacctctgtgtgctttagtttctttagtggtaaactggagataacggtagtacccacctcattgggttgttgagaatcatgtagttaatatataatggttttttataagttaataaatcagcacttaacaagcgtatagaaatttcccagttatcactagtactaacttcagcagattcagaaacacaaggatgtgtggataatgatataaaatttatggaccaaattacccccacccattccatttaataccctcagcctgaagtttccaaaaattttccccatataacttagagattccctttcattacttactatcattttccagacttagtagagttgcacatatgtactcctcctgtgtggatatcatggacatagaagaatggacaaaggggaggagtcaaccctgagttggctccttggcaagtagtatatgcctccatggtcagttaactggaaaacagatgaattgaccaggcaaaaatacttctggcccaattctagcctctgggaaaaaggaaacaatagatactctggaagagcagaggcactaaggattcaaggaacgtggcttctccagggaagaactcataaattctgggaccagatcctagaaaattgctgtacatttgatgacctcaaaatactgttgttgataaggaaaattggtggtttgaacacatgta

SEQ ID NO: 27734 - DNA, 1009 bp, Bovine  19866881371343
  misc_feature (1)..(1): n is a, c, g, or t
ntgctatcttagtacctaattgacctttaatgtaatgttttagaacatgtaacttgagaggtctaccagtggatcttaccagtttcattctcaactctttcctaaacaaatctgacttatttctgggaatcatgcacttaaaagttgtctttctttagatgaagatgattcatgctcattactgaccaaggagagcagccacaatagcagctttgagctgataggctccacacttccgtcctatcagccctgtaacagacaaacaggccgtgggaccagtcttttccctacagcaggaggattcagatctccttccccagggctgtttcgagccagtttggtcagttcagcctcgaaggtgagatgctaatggttttctaatctcctcccccttttgcttcccgcattgctaaataaagtgtgtccaagccaaaaactcccaccacattatgtatgttcagttttaaaaatccaccccctttgtgtattaaaaacaagcctcatccagggttctttctttcttgaggatgttttttttaagcttcccttggctatgcattgtcctccccaactgcaattgcctgagagtagattaaattttacaaatagcagcttctgttgtcatgacagtgaatgacatttgtaaaatgttttgtttttgtttggttttgttttggtgccagagttcaggaaagctgtctgagccttcacttcccatagaggattcccaagatctgtataacgcctccccagaacctaagacacttttcctaggagcaggagacttccagttctgcttagaagatgacactcagagccaactgttggatgcagatgggtaggtagttttatgtttctgtgggtgggacggtgctgggtactgcttaattttgtttaaaaataaagcgagcttctgtcactccatctgtgctttctcttctgagaaagagaggtgtgcagaccattagtatattctacaagttgaacaaagtctatctagaaaataaaa

SEQ ID NO: 27735 - DNA, 2593 bp, Bovine  19866881406779
  misc_feature (1)..(1): n is a, c, g, or t
ntcaaaagaatcagacatattgacctgttactgagctactattgagtagctaaacaagttctctccattaatttttcttttcaaatgaccatctgtgaagtatagcagtttctgggctcttccccaagtctgaattcagctgctaaatagtagacattccactgcgagtctatttctgtacggttgaaagtactctattatggaaaatgcccagctgtggctttgtacctttcattctgtaatatacgtattcattcaacacagttattaggtattcactgtgtctccagcactgtgctaggtactaaaatcagtaagttgaggaagacatgtctcctgggattttatgtttcagtatggtagacaatacaggcaaacataaaacctgacgattagctcaaagcagtagagatgaaagtgcaattgaacatcagaggaagtctgttagagattttgtagctggatgggtaagatttggctctataaagaagagaaaagaattttccaggcagagggaataacagacacaaagaagacaagacaagtgacgtgtttggacagtagcaagttttctttgactggagcatttgaatagagaatagcaggcatgaagctggaaaagtatgttagagcaagattatctttgttcaaagtaaaaggctagtcatgggattaaatagatattatttaacagtcagttggatgtgcgtgacagagaagaggatgaagtaaaagatgaccaagattttgagcctagatgatagggggtaataataatttaagtagagaactcaggagggatgataatttcccatttactaagccctttgtatcacatggtgctcttaagaggtatgttcagaagttattgttatcctaaaagatcaagttcagaggggttgttacttgtccaaggtcctatagctagtaaggggaagacaagaaaggctggtggcacagtatcatttgctgagtatctgttatgttccagcagtgtgctcagcacattcactgattcatcaaatggttattgagacactgttatatgccaggcactaaggatttcgtggtaaaacacaaatttactagtttcttggagattctatcctggtagaggaataaataattatccaaataatgatcttttaagtgaaataaaagtagaggatttcatgaaagtatagttcatgtggctctgacctgaacttcagagtcagggaagatttctttgggggaaatgacatttaactgaaaactaaagaacaagtgggcattaaccagacataaaagacagggaagtccctgcttaggcactgataaagatctgggtctttgcagacactatgctatttaattattgcaacagtctaaataagttgtatttttcaattgagcaaactgatgtttagagagacattacagattacttaaggagtcacagtttgagctcaagatctcaaatccagtactattcatgctatttgaaacctgaagtttgaagtggtcttttgttacactatttttttttttttttttttgctttcttttttttacagtgcggaaggcagtcatgtgtcaggacagagcaatggccgagatcctcaggccttggctaaagctgtgcaaatccaccatgatacccagcacaccatgtattttgcctgagaatctcagaaaaagaactcaaccagtttgttatcccacgcagcctcaaaatgtttcaaatgcctactgcctctagagagagccaagttgacttcaggtgggcttctaccagcaactcggaatagttgcactgaatctatacttcacagcactgtctgatgcatcaacaaaattgagccattttttaaaagtaatagatactcatagattatcttttctgatgcactggactgaatttttacctcatcatgcaaaggctgatcagcctgaactttctaaaggactttatgagaaaggtttctatggactattttgctagctgtggtgttcaccgcatccctctagtcttaccagagaagattttttttccttttttctgtattcattgagtggggtgtgtgcataaatgggagagaaaaaccaaacaatctactttagttcagtgtaactatttaattgtgtgggtccataggctttttaatggagatttctgacttcgccactgtaaatgccttgaatgagcattaatttttttgtaagttttacagaattttatgagtttttactacttttctctgttgatctctacagactggtgctggtgcaagtacaggctgccaggcaattgcactatatttggctgcagattcagacaggcaattctcttatttggttgacttttgtgaatgtgtaacacagacagatgtgatgcatgccatgatgacagataacactgccatggcaaaagtactcatctttccccctctttggaaaaaaaaaaattagcttttagtatttttcagagttctcaaaagtgcccattttatgctgctgtgtggtttgttagatccaaatgatttttaaacttttctcatagaaacttatctttggcaataaacattttttaaagtccctcctcttcctcccc

SEQ ID NO: 27736 - DNA, 1587 bp, Bovine  19866881416195
  misc_feature (1)..(1): n is a, c, g, or t
nttttctttgagctaactttttaacattgtgtttaagttatcaaattaactggtataaaactgttcccaacattcccttatcaacctcagttttgaaagatctttaatgataaacccttcttaaatttttgacactagtaatctgtttggttttttgtttttttttgattagccttcctaggaatttaaaatttttattaacttttttaaaagaatcaacttttggtttcattcattttctatactgttttctatttaattaacttttgctcagagttttatttcttactttctatttgagcttaattttttcttctagttgaagatagaaacttcatacggtagtctgcctccaacatggtccctaataagtcttgcctcatgggactctgcacctttgtgttaagtctctcctacactgaatataactggtttatgtaactaataagacattacaaaactggcagaatatagctttcaatactaggccttaatgtcattatagcgtctgccttgctctctcatggattgcttgctccaaagaagccagccacaacatcatgagaacacttaaccaaccctgcctgttgagaggtccaggtggcaagaaactaggtctctagcacaaacttaccaattgagttttacagataataaaacaagacttactcatccatttaaacattcaagtatctactacatcagggactcctttgtgggttggaatttaaagataaaccagacaaagcctctccattttaagaatagattctggtcaagcaactcagttcattccttccccaaactccactaaaactctggtaaggaattaaggagaaaaaaaaaagaaagcataaatctagagggaagggacgatcgaaaatagaaaatgtaccattttagaagatgaaaaacaagtagccaagctgtaactgacagagcagatggaattctcaaaaggtgtgagaaatggcagtatcaggtacctctgaaactggtgataaaagaatggaggtgttgcagaaaaataaagacaaaagctgtttgagaagcaggtagagtcctagattcctgtctagctccattcacattgtggaaccactgcctcatctttatcctggcataatctgtaagcatattctctggcaaaagtaaaagactttttggagggatgatgtcaggcacagctgagggcacaagactgtacccaaaacaaagaattaagtgacaataaatattaattcctgaatgcagacactccccaagccaaaatccccaacttggcttccagaatgcaggtaacaagactattacccttcaggcaggagtctggaagtctcatctctgggtaattgaccagctaagaagaaagacctaactaaggtcactaacattataggttccctaggatcagcccaattaaaccactctatgacaaagcccaaagtcaactagtcccactaatgaattcaaagcatcgagtcaatgttttagattcccactgcatcatgaataaataatcaaggacaccatatacttgaaggaagcttccgaaatggaggacagtgatcaaaacaaacaaacaaa

SEQ ID NO: 27737 - DNA, 2104 bp, Bovine  19866881543908
  misc_feature (1)..(1): n is a, c, g, or t
naaattgaacagttgaagagtttactgtttcaaaatttagcatttcttctaagtataacataaattctttgtaaaaggccccccgcccgatatgaagcttttttcctcattatgacaataaacatagtaagtagtgttttcttacaaagatgatgcctatgaagtataaacattataggaaatattcataagcataatgaaagaaataaaaattgcccatacttctgcaactgcagggactcagatgctagcggcgtctaatactcttttggttctttttctttgcatagatgatttatctatatgtgaattttttctttcataaacagtctttaaatctcctgtagcctttaacaaataaaagtgtttcagtctaggagtttcaaggcagcttgatagtatctacaggcgcattttatgtgcatttcccccctaaagtctaggaaaccttattactggtatctccagtcctcaaatacttgtgaagtatttgactatagcatttgttttttaaatcctgttaaagagattttgatgtttcaaaagctttcaaacaggaagcatgtctcccagcgaagattattcagcactatttgaaaaatgaaaagtgaaagtgagagtaagatagggagatttagcttttttctgaagctatggactgaatatggagttttcttccttgggcactaatttctatctgaatatttatttatctgtttaatctgaatgtgtctggttcagctagataagattagaatattgggatttttgaggtattttttaaatagcttagtgcaatatttgttaggatttttgctttggcactcattgtaactttctctttgctttgtaaatggagttggtttacttttttaggtgatttatattcttagttgactttttgttcttccttgagatggtttcttaactgcagcattgattcttttcatatatgcttttgtttatataataatttgcattcatatttgtagagacatttcaggattttggaatcttgagcctaaagataatggccactggcttgattccttcagtttctttggttgttgttcattgcatttcaagtgccttaatgtttttatgtgtattttcagttatcaacttttacatatattctccacctgaaattgaagttaataaaatatgcaaatgaatttaacctggagagtgaaagaaagtaattgatagagttgcccatcaaagtcttcataaaacagttcttcataaaattcaatatggtaattgataagcctgtttgtagttgttgtgtaataagaataattttctgctaagataaaatttctaacactgtgtgtttttcctttgagcagatcatgacaagatgttcaagatgagtgaaaaaatcttactcctgtgtgttggagaggctggagacactgtacagtttgcagaatatattcagaaaaacgtgcagctctataagatgcgaaatggtgggtaatacttagaatgtggctctggtggttttgtctttaaagtgtactgaaagagaatattctatactggcagttctatacatgtgctcttatttttatttgagtcttactatttttaaagctttagttagatcctccttctggtcctaaggattttctacaaaaatcccagagcagaaaagagaactattataacacagatacctggggaataaaaataaccccaccttgaaaaatgagcatgatgatatgagatttttaagtgttagagaatgtgacttgagctacagtatgtacgaaatctcagaactaaaagacctaagttaaacttggttatactgtttttttatgtgacaaatcacttatcctctctggacctttactttccttatcactaaaatggcattattgggaattccctgggcagtcccatggttgggattctgtacttcattgtagagggggattgggttcagtcccttgttggggaactaagatcccacaagctgtgcagcgtagtcaaaaaataaataaatgggtattgttataataatattaatgaatagtatgtatgaaaatgctttgtaaactttagactctgtgtaattataggagacttactatgt

SEQ ID NO: 27738 - DNA, 1332 bp, Bovine  19866881717570
  misc_feature (1)..(1): n is a, c, g, or t
ntaaatttccttttattttaagtaggttgagtatcacttttgattttacttttttatacagtagcattttaaccagaggttgcctatgttggagtcgttggaaaactacacagtggaatattcatagagaggcagaatgacccaataatcctgggaaagaaacactctggagagatagtctgtagtgtcatcaagttttcctagtaattgccctggtttgtgtaagctggataagtgctgagacccagtgctctcatgttgtaactgatatttctttatgaccaagaaagcactgatgatgataaaatcgtccagtaccactgggaagaacttaagggacctctgagagaaaagaagatttctgaagatactgccatattaaaattaagtaagctcgttcctgggaactacactttcaggtaaatttggatccttcaggcttaccataggccatttttcccccccttgtgagttttacattattaaaagagtaactctgacagatatcaaaattccctgtagagttgattgataatatatatagtctttggttccattggttctttaagccatgtggtaattgtggtcaaaacagtgataactttttagggcaaaggtccttgcataatagatcaggatccacacagctaatccttctcagagtcatacttggcatatatccaaacctttttatggaatttctgtcaaaaactagaagggtctatcttcctttgccttttctctggaaaattctgtaaggaatctactgtcatctcttccctttgggaaatgcttcctcagcttctgatatctcaaaatccttacttttgactaattatttatttgaatataatttgtagggtctttctctattggagactttacagagaatatgattcaaagtcagttcttttgggaagtagcactgacatactagattgtgattagtgagtctgaggctgattctagagtaatcttccttgtatctgcattattccttgtattctgcaaagcacttgtacttgagtgtcacacaaataccatatgtacactatactgtccttattgtacagctgagaaaaatgaggctaactactaacttttctgaggtcacacagctagagctaaatgcagattttctaacccccaaggtcagggctcattctcctctgctccttgacttgacctatttatgttttgtctctgcttccttgaatgctcttctcagtctttcaggggttctgcctctctttaaggacctcctccgttttcagcgaggctcttggagattgcttcagaggggagcagtctctttattccccgttacactca

SEQ ID NO: 27739 - DNA, 1318 bp, Bovine  19866881744734
  misc_feature (1)..(1): n is a, c, g, or t
nctgtggtgtatcagttcccaaccagggactgaacctggcttgtggtagtgaaagcccaggatcctaaccactaggcccccagggaactcccacccatgggttatctttgaatgttgagcatgtgtcctgattcatctccttgaattaataagtaaatcgctggggaaaaaactacttagggctacatataattgtatgttttcagatgcccatagcaactagaaaatcctggggaaaagactatttagaagcccctgtactagaacacagcactccccaacagcagcccaggcccaacacaatggacatgaaagctcctcacgggtcttcctgcttccttctgtgctgtgtgctgtgctcagtcatgtctaactctagcttgccaggctcctctgtccgtgggatttttcaggcaagaatacttgcctgagtattacaaccctgagtgggttgctatttcatcctccaggtcttcccaacccagggatcaaacccacgtctcctgtgtctcctgcactgcaggtggatcctctaccactgagccactgctgccgtctactttccccaaatgatctaccaaagagtggccaatggtctaatcaaacctcatctgatcatgctatctccctcttagccaacaagcttccagagaggcccattgcttttagcacaagagctttttttttatcagtcttcatgacatggactaactttctagtttcaatcttttactattcccctaaaaccctgagccatatttaacaaactactttagattacagattttgtatatatcgtgtttagagtaaaaactatatgaagttatgtatttctatttgtttttccatcagaagagccctaattcgtatccagtacctgttgggggccagagtgaggtactccgcccatggcaaaggtcatgaggaaggaggctcgacatacgcaaaggcaggatcgagcctcaggagtccccctggaaatcctcgagcgtctacccccataaccagagcctgcctactttactactttgtgctctcacctacacctctgactttacagggggctgtcccccaccacctctttcggagaaggagttaacctagagctccagtcaataaaaactcttgggcatgacaagagtgttttaacctacaaactcctctgaaggttctctagcctgcctgacaggctcgtccggccacatgtgattgctcacagcctcccaaccgtgagaggcacgagatgctttaaaccctctaaaaacaggttctttaaagaagttagaaaactataagtataagtatagtgggctgattt

SEQ ID NO: 27740 - DNA, 1745 bp, Bovine  19866880279580
  misc_feature (1)..(1): n is a, c, g, or t
ntagcagaaagtgaagaggaaactaaagagcctcttgatgaaagaggagcatgaaaaagttggcttaaagctcaacattcagaaagctaagatcatggcatccggttgcatcacttcatggcaaatagacagggaaacagtggaaagtgtcagactttattttggggggctccaaaatcactgcagatggtgattgcagccatgaaattaaaagacacttactccttggatgggaagttatgaccaacctagacagcatgttaaaaagcagagacattactttgtcaacaaaggtccatctagtcaaggctatggttttttgagtagtcatgtatggatgtgagagttggactataaagaaagctgagcacagaagaattgatgcttttgaactgtggtgttggacaagactcttgagagtcccttggactgcaaggagatccaaccagtccaccctaaaggagatcagtcctgggtgttcattggaaggactgatgttgaagctgaaactccaatactttggccacctgatgtgaagagctgagtcatttgaaaagaccctgatgctgggaaagattgagggcaggagaaagggatgacagaggatgagatggttggatggcatcactgactcaatggacatgagtttggatggactccgggaattggtgatggacagggaggcctggtgtgctgcagttcatggggtcgcaaagagttggacacgactgaactgcactgcactgatgagactctaggcatgtgctcatttaccaagtgccacatcatgtctggtgttcacttctattggtgttggcagccactgatgttcaacacctacatctggtgaccagtgcactggaggttgcaatatggatatattctaagctattattttgttttcatttattagagggagtaattttataaggagatgctaccctctcatctatttgatttctgaatagagtttgtataggaaaggtaggataaatatttaattctttccttttatttactcaacttttaagataatgaactggactggttccctgttatcctcagaaggtggctatttaaaacaattgttaggaacttagaaattaaaacctacctgatgggtttcatttcatgacaattattgtctttattgtctcatcttggctgttgggagtcccttcaagttggttcctgagttgtttgccatgactcttgtggttgctctctggcatttgctaagttcctcttgtatgttttctatcctaaacttggaatcagctatttctctaagaagccctgggtttcacgtgtgctttgcccctacgtataaaggcagtcctgccgcaccctgctgttcaggctcagttatctccaccaagataatgactccttgtctatgggtcttcagacacatggaatgcaaagtgccctggtggcagctgggacctgtagttccatggacttggacctgtagaatgtagttctgtgtcccctggaaagcatgtgctccctttggagaacagtgcttccaaccacacagaacccagaaccacagaaacaggaagcacagtggccctcggtggactcttggaagtgagaagtgtggccacttcttatgcccttttgttcctggaaccaggtattcttccatagggacagagcagcacttgaacttctctgatttaatgcattttctggatcctgaaggatgacataccattcttgcagattgttgcctcagatgc

SEQ ID NO: 27741 - DNA, 2635 bp, Bovine  19866880401333
  misc_feature (1)..(1): n is a, c, g, or t
ncaataccagactaatcagctgaacttagatttttttacctagacattttgatgttatatagacttacccatagggcttccctggtaactcagagggtaaagaatctgcctacaatgcaggagaccgaggttcaatccctgggtagggaagatcccctagagaagggaatggcaacccattccagtattctggcctggagagttccatggtcagaggagtctggtgggctacagtctatggggtcacagagtcggacatgactgagcgactaacatacacgtacacacaggcttatgcttagtgttggatcccgtagactttggacaacttctttcattctttcagtttctctattaattttctaagaacagaactgtaagggggtctttggattccagggacttgccctatctagtgttcttttgcacaagcatgctgtattattcttttaaaactgaatattctcccacccctaaattttggtatattgtaaaaagtattaatgaagaggtctgagacatgtcagttcaaggagcagggcatcagaagttttgctatttattcaacattataatttttctgtgtgacttagtgaatttgtgagattttattactaaaatatgtaagagtcttcaattttttaaactgtttataacaccaaaacttcatcatttaatattagggcaatacagtttcttcagcgagaccaaccaatgtgttagaaatgatgaaagaatggaaaaataacccagaaagtgatgaggaaagcacaacagaccaaagagacagcaggtctggacaagaggagtcgaaagtttaccaacccagccgaaatgtccctgatgtcagtaactcttcagatgaagaggaaggaaaacaggtaggaagaaccaacaaaacatgtaggaaaaacaattgtttcatttctccaaactgtgaaataccttcacaacacttggaacatttttgcaactctttttttgttgttggattgtaatggtttgtaacaaaagagacctgcatgataaagaaagtaaagcttgaaactagcatgatttagtgatgtggcctagatgcttattttaagatccgtgattatataggggaggggtctgcaaacttttcctataacaaatagtgaatattttaggctttgtaggccataatagtctctgtcacaacttctcaacgctgatgttgtagcatgaacacaggcatagacagcaaatgagtgttccagcgaaactttacagagacaggtggtgtgccagagttggctaatgggtcacaatggattatgtatgtattttaccaggctatacaatttggaatgggtttatgtattacttcaaaaattactattacattagttagtcatttccaattttatgatacctaaaattgttttataggcttattattttactttattagatatagttttattctttttggtgaataaaatctagtaacatttggttaattctagattgcattctaccaactcaatatcctgacaatttacccacatcctcttttctcttgtttctgtgtttgaggaaaattttctgtgtgtttgttctcattctcgtcttgaagtctaatcagcatgtttgagctcttctttaatgatggaacatcttgccactgggggccagatttacgaccgggcaccccacttcttatgaggagttgctgcttttcagttctctgagacctagagacgggcagagaggggagagggcctggagggtaaatcctgacccacagtcaggaaggtacagcatggctgcctgtacctgtcctgccacgaattctgtcagaaacttgaggaaagaggcccagtagagtgatctggttgatttttatttactcattgggaatttcttcatctagttgatagcaaatgtctagataataggcttaacatttaattatttagacattttgaaatagccatatttttatgtaatgtaaacataaggttactgaatccctttcaccctctcccgtctgtcaacaactcctgcagtgcttagcagctgtgtgtatttggtattcttgttaaaaataatatcctaaaaacccatgtttgcatttcctcattgaacataatttgaaaaatttcttgttagctgacttggaattttatacatacatacatgtgcacacacatacataaacatactcacacatatatacatacacacgtacactcacacactctcatatgcatacattacgtattacacatgtgcatcaacaatatactcacacatggtagtgatgttttagttgctaagtcatgtctgactcttgtgaccccatggaaccaccaagctccgttgtccatgggataccccaaccaagattactggagtgggttgccttttccttctccagaggatcttcctgacccagggatcaaacccaggtctcttgcagacagtctcctgtattgcagatggattctttaccaactgagccaccagggaagcttgtatatgtgtatatatctacatatatgcatgtatacaagtggggggtatatatatatatatatatatggatatacacacacactcacatatatacaaacacaaatccatacatacacatgcatacacacattat

SEQ ID NO: 27742 - DNA, 1301 bp, Bovine  19866880421857
  misc_feature (1)..(1): n is a, c, g, or t
nacttcactttcacttttcactttcacacaatggagaaggcaatggcaacccactccagtgttcttgcctggagaatcccagggacagcagagcctggtgggctgctgtctatggggttgcacagagttggacatgactgaagcgacttagcagcagcagcaagtcaagagaactttgtcacctggggccttcttttaggcaaggcatcaactgactctgaacccaggtcctgggcatggccagtaggggctcatccaaaagaaatgtgaagccatggtgtggctttctctctgtgtcatcttctattatagggtcttgtgaacccagctcagggttgtcctgggtatttgtggtaccctgcttccttctcccttcaggcagtcgtgattggcctacgggagaccaacctcagggccctgatagcccaacaagtgctgcttctataattgacagctacaaagacataaccacctagcaaggatcactttccagagaacacacaaggattgaaatagatttaaaaactgaaaccactctaattcacaggcaggatgctctagtggaataaaacccatctgccataaacaatgatcataactcagcattacttgattttcagagtatctcattaggggcatgtgcctacagaccttagtttctaataattctttgttatgtatttgctcattcatttgtttatatatgtttactgagggcttagaaagcattaggtattgagaagctggtgatactgtagtgggaaagatgctcttgtgaagtttagattctagttgggggagaatatgcatatagtaaagtcaagggtgataacttgcagagaaaatttaaaagagtgaacatatagagagtgaggaggtggtgggagggagttgctactttagataggatgagctcatcattggaatcgtgaatccagttccctcccagggcgctggcttcttaaaccaagcctggcagcactggccctggcaagttcctcgacctacccagcaggagcttgacagttggtctcaggccaggctgaccacagcgccaagtagtgaacgaggtgttttgcaattcctagaacaggcgccacctagtgattataaatgggatccacctgcgtttcagtcatcccactgccttgaagcttaaatgacatgggggcttaaatgctcaaaattcaagacaaaatgttaccaatgggatgctgggggctagggctgtggtttgataacagattgattgcatgttgaatgtatctgtttagatcatttccttctctctgcctgtccca

SEQ ID NO: 27743 - DNA, 1368 bp, Bovine  19866880437584
  misc_feature (1)..(1): n is a, c, g, or t
ntgggagaaggaaagaacaggacataggggtcagggggcgtgcaggaggggagaggaaagtcagaggggaagggcctgggcagtcccagactccttcagcacactgaccttggaaaagtcgtttccctcccctggatttcagttctgtctttccatcacactccatgggaagcatgcaaggtcagacctcaccaagaactgggtgcctggtgtggccgccaaaggtcagggcattgcaaggccagcctggctcccaatcctgagctcccagctccacctcggggtggccgtacgtctgccactgggatcgatgggaagccattatcatcgccacattttaatgacaccaattaattccccatctgtgggtcccctgccgccttcagcgctgaaggttaaagggaggggcactggctcagtgtggctgttccccgggatgacaggtacaggctggtctgtgtgatgtgtgtgtacgactgtgtgtgttcatcatccttgtgctcctgtatataaaggcagtgctcactgttactggtttatgtgtgtacccgtgtgtactctgtatgtgtcatgtgtatacacaatgtgtgtacaagtctacatctatgtatgtgtaaagtacgtgtgtccttacatgcgtacaaagtgtgtacataaaaattatgcctctatatcatgtttgtacacaatgtaggcttatccgtgtacactgcatgtgtgagaaggttctgtgtgtgagtcctatgccaaggaacagtgaggacacagaatttgcatctctgtgggagtacgttctgtgtctgcctgcctcattgtatacacacctgtggatgtgtgctcacctgtgcattcgtgtgctgaccgtgtggagccctgaccagcagatcctgcttgctgcagtggtgtggggtgggcaggggtagaggctcctcttggcttccctggggctgggttttgcccttgagcgcagggttctgaggctaagtcttcttgccctctgacatggacctgaggctgcctgaccttcgtgtgtgtctcaaaggataaataggagttcaccaagcaaatggagtggtagagagggaagggggttcctaaatgttctaagtgtgaatcatacattcatatatctttacagaaaccccgtggagtaggcatcatcattagtcccattttacagatgaggaaaatgaagcacagaggtgtcgtccaaagacacatagcttgaaagtggtaaatcaggatttgaacagacacccacactggctcatacacacaatgcacttgtagacaaggcaatggacacacactcatgatcacacaggcatgctgggcacacacttgtgcacccacacacgtatacacaca

SEQ ID NO: 27744 - DNA, 2032 bp, Bovine  19866880489009
  misc_feature (1)..(1): n is a, c, g, or t
ntacaaatttgaggaccactgccatagagtgagtatcccttcccactgtggctgagcctgatagatcggcccctatatctcagcagctgagaaagacaggctcaccagtcttaaagaggctccaacaagttaagaaagattctgagtgcagttgttatgtatttcccctctggcagagaagagaaaagggcagatgcccaacagacagaagggtatcctgaccccgggtccctggaggacacaacttgcctcccctaaatcccagcttcacagaaagacccaacagcagacttagggtgaagcctgagatctggcactacaaccactgctgctgcctagagagcacgacaagcccagaacttagcgaggtagcaaggaaggtgggccaagagtgggtagtctacctcagatatgaagggcagtgccaaggcaacctgggcatggggccgggatgggagagaattcccaaagaggtctcagaaaactagcactgggtcagcccggcccaacaggcacgtgcacataagcctgagctcagtgctaagcaacactctgagggttaaaaaagcccatcattctaaagctcttggccagggctccctgaaactttgcagctgggacccacgctctgactccaacagagcagtggcatcgtctggagaagactgatgctctactgccagctctcacctgtagaaccaaagttgcacaaacctagcttccagacctagctttttccactgttcacctaatcaattccctcaccataaagatggtgacacagaggcccagagagagggagggacacagctaaaaaacaccacaggtccctgtaaaccatagacggtaccctgaaccattgagcggtccctgattacatctgcagccacaagtaagacattctacctctctatacctctaccacatgttatacaaggaagaaaaaactctccagttgtatcctctggcaggctggccctcctcactaaccattcctgctctcccaaccaaggcagccccagggtactgggcatcagctaaggcccccaccacatgagccccccaaagccttcctctagcccaaagctcagaacagcagcatcacctttaagaaacatgttgcacccactccccagatgccccctccctgctagaaagacagatttcgatcctaaggtgattcttctcctgcccctggctgccagcaggcttacctgtggcgcctgctgccctgtgactacagcaacacctggggggagaagtcagaagagcgacaggtgagcccaccacaggtcccaaaggatggtgcttaccaagtgcccaggaacacccaaccctgcacgctgcagccagctgggctacagggcctaagcctcggggagctgggtactgggtggggaaaagggagcagcctgagtcctttcctcctttccctgatgcatcctcagccagggctgcgtttctccagctcacctgagacgcttctgcaagaaagggcttggttgactcctcctgttcctgtttatctcgaaggctctgcagtatttttcccaaactgaacagcgagagggagaccctcagagaggcgactctcttcctagctgcatctccttcctaatcctctgggtgccttggaacagaagctcagaaggaagaaaacgagattttcaactttcaggaactagctctgtcgccctctgcatagctcaggaggccatcactcccagccttttaggactcgatccaaaaatccttcagccctccatgttccccaaaatgacagtgctcatgtgtggctggaacctgccccgatccggcagctcatttaaatagagctcatcacaacaacagtgttggtggagaagtgagtagctgcagggccctggggaccccctgtttatacgtaggaagaatgatgcaatctgggtatcaaaatagcaatccagaatggaataacaggctcacgcagcagcggtgccggcacagccagagctcaagttacacactctgtcagccccacactactgcagca

SEQ ID NO: 27745 - DNA, 1253 bp, Bovine  19866880493388
  misc_feature (1)..(1): n is a, c, g, or t
ncatatctttctaatgggattaggcttcacacaggtcagggaacaatttattattctgctggctagagccaagtttccctttgaaaaatggttactcccggagtcggcaattacttcaaaaataaatttaccaaagacaaaattgtgcctcttgggtcagtaaacgacttgcctgtttggggctgaggagacaaggtgtttattaaggaccgccttcgtttcctgtgcaggtttttcagtttgaataattgtccaattaaatataatttggaagtcagtgctaacccagtgcctgtatcgcaggaggaagaatcactcggaggcgtgcattaataaatccctgggagccccaccactccccaaacccctcctttggtttaattttgagaaatttttttgtcttcccatggcctgtatgcctctcgtttggaaatgagcttcttccccctatagaattcttcggcctccctcccttccatctgtctgtctgctcctctccagcaagcagatgcgtgatgcctctcggtgggatggttccttcatgggtctgtggacttgtggttcttttttcattcatccagcctttcattccacaaacgcctactgagaacttactctgggacttgccctaagctggagaaaaagcagatgttgttcaggccctcaaagatgactcaaccatcaagacagagggacccaaaatggacctgagcagtgccatgtggttactctaagtctcctacatacaaaccttcaaggtgtgagctttcaaagatacaaatgtgtgtttcatcatcaggcatgagtgaaattgcagcttgccatccatctcctattgctgatgatccttcagctctaccatctcccacctcgtctccgtcctccagtcagtaaatcttcttgccttttcactcgatgccagcccctgtatgccagtggttattccgtactactgtacttttcaaggtgctgtactgtgagattaaaaatgtttatttttgtgtttgttttttatgttttatttgtgtgaaaagtattagaaacttattacagtacagtactatatagccagttgtgttagttgggtacctgggctaactttgttggagttacaaacaaattggacttaagaatgtgctctcagaacataacttgtttatgcgtaggggacttcccgtatctatgctctcagcaatgtgctttgtagttctattcatcaagaggtagagtccagttttggtttcctcagggta

SEQ ID NO: 27746 - DNA, 1467 bp, Bovine  19866880496754
  misc_feature (1)..(1): n is a, c, g, or t
nactgagtgactttactttctttcttttacctgagtcgttgaagatgagggctgattatcagtatatgtagatgtagggttgtgggctagcattgtcttcttagtgagtagtaggtcctgatagtctctcctgatgtggttctgatatactttgccctgtccaaccagtccatcctaaaggagatcagtcctgggtgttcattggaaggactgatgctgaagctgaaactccaatactttggccacctcatgtgaagagttgactcattggaaaagaccctgatgctgggagggattgggggccggaggagaaggggacgacagaggatgagatggctggatggcatcaccggctctatggacatgagttcgggtgaactccgggaattggtgatggacagagaggcctggcgtgctgcgattcatggggtcgcaaagaatcggacacgactgagctactgaactgaactgatcctctcctttcctttcattcattatttcctcattgatagccagctctgtttattcatcctaccagctctttccatttgaatcactttctctccagctctcttctgtactgtttaccttgtatccactgtatttctcactttagattgcactggagtgaagaatggagtgggcttctctttaagggagaatctaagtcctcaaactttataactgatcatttcatcaacttgaaaacaatttctgtgcttgaggaaaaataaaaggcaacattaccatggtgtttttttcttgggtctgtggtattatatttacaaaatgaaatagtaggttatatgtattctttatttttctataggaaattacacatcatttccccctaaagtttaataaagtaacattaaatcttaataaggggagatccagagtccttccagaaatccctaggattaactaaatgggaattcctttgtttctttggtgtcagatagggttaggcttaggtttcagggttatatagtcagttgcttgcaactctaggaattcataatcttgcacatagatattgatgctgagacttttcaggacaacaagatagtaaaataaaattatatagtcagtatatgaattggacaatatattactgcattaaatatagataaaccatttgtggtgggaagtaggaataggcttgagatgaattattaggagaaattgtgacatctgtccatgtctagtctcgacaggaatttattcctcgaagtcactatttctcttgataactataaagttatttctcctctacgattcatcctctatgggtggagcacagtagtgggcagtttcctatcactcttgagatggtaatgtttaaagggtaaagatacttagaagcagggatgacagtaggtaaaattttaactaggtaaaatttgccttacgatcaatctctttccaagtccttcaggaactattgtgtctcttctaactttgggg

SEQ ID NO: 27747 - DNA, 2256 bp, Bovine  19866880527038
  misc_feature (1)..(1): n is a, c, g, or t
nttatagaatctgacaatatcacaatagaaactctactaaattcaataaggagagaacaaagattgaaaaaaaatgaatagagaatcagtaagctttggaaaatatcaaacaatctcatgtgtacttgaaagcccttcaaggcaaaaaaaaataatggccaaaatgttcctaaattttatgaaaaccataaactcacagatccaagaagctccatgaaccccaagccaagaaacatgaacacagctacactaaggcacaacacaatcaaactagttaaaaccagtgataaagggcaaaactattctaagaagatgtgaggataaaataagtcacaactctaagactaaaaaaccagagaaggcttttggcatcattgccatttatgacctcctgtaaaggtaactgtcatctctaatagttatcaagcactcctaatgaatcaagcacaatgcataacccaaattgactactgctgccttagaaactggcaaaggaaacaaagaacaatagctaacattcaatgagacatatgctttatactcattttcccacttaatccctccacaactaaatgtggttgatactattaaccctgaatattcattggaaggactgatgctgaagctgaagctccattactttggccaccttatgtgaagagccaactcactgaaaaaggccctgatcctgggaaagactgaaggcaggaggagaagggggcaacacaggatgagacagttgaatggcaccaccaactcaatggacgtgactttgagcaaactccaggaaatagtgaaggagaggcaagcctggcatgcctgcagtccatggggtttcaaagagttggacatgacttaactgaaaaacaactatcgttaaacctatcttacagatgaggaaactcaattagagaggttgagtaatttgtccatggtctcacaactaaaaagtggtagatccaggattaaattgtacaggcactctgacctaacacacctaaccgctatatcataccacctcctagcagagaaacacccaagctcatgggcaataaacaacttttgcagaatggcaaacaaccataccaactctactatgaacttaaccttgcagaattatgacactattccaagggactctaatacagagccaagggccatagcaaaaaggaaagccacttctaaggaagctctgatcactctgggttatatctgaagttgtttcattttttccccaacatgccaccagaaatatcactgaagatgtcaatctaatcatcagacacctaactatacaatcaacaataaaacgtcctccagaatgcttttcatcaatctccactagcagagtggtgtaacagagtcatgccaaagacatgagccactgtgtcccaaagagactacttctcaaggagacgatattaattttgtaaaaataacaactttcagaatgcagcacctgataaagctttgcctttaactatagtctgccaggctcctctgttcatggaattctccaggtaagaatattgcaatgggttgccatttgcttctccaggagatcttcccaacccagggattgaacccgggtctcccacattccagacagattctttaccctctgagccaccaaggaagcccagctttaccttaggtgtctcaaacacttgttccaaatgtatgatgtgttcatgtttcacactttttaggatgtccacttcccgttcaagtaacttcacagcagagcttccagccttagatgatgaggaaatacagatttcatgtaagaatttcattaccgcaaaagttagagttattttatatttttataaatatattttatttataaatataaaaatatttatattttttcctatattttttcagaaagttccttttccaaaagataatatgcaacctatctgcatgataagattaatgtataccctttctttcctttgcccaattttaagagataattcagcctcaaatcatatctgtttcttggacggtttctataaattagctaacaacatggtctctgtcatatcacaaaattattgcagctcttaatatgctttttggtatttccttcaaaattatgttgatcttttgatggtagcataataaaaacaaaatctactttctagggatgtcaattagaaaatggatataaggcatctgtctcattaaatgtcagttattgataaaatgcttttatcttgctttgtctccattacatttatatacatatca

SEQ ID NO: 27748 - DNA, 906 bp, Bovine  19866880563098
  misc_feature (1)..(1): n is a, c, g, or t
naatgcatgcttactttcttctacgtattgtgttttactaggcattttcacttgcatcattttagcaaattgtcacgacgactgtgagtgaatttgttgatgctctggtgtctccagttgaggaacgtagactggcgaacttgcttaaaatccagatctaagtctgtaccattccaaaggatgtgctctttctatgccctcttatctaaaacagttaatgagcattttccccctgaattgttctgtgttgtttcccatcctgttctcctttctatccactggaaattaggataagattttggatatttgtgggtttcatctttttctgaaaggtgtatctggttgaatgttgagaataccagtccatatcaaaaattgggcagggtaagggtgtgtggcaagacttggaaacagatagtctgaatcacctctctttatctggttaggaggagtgatcatctttctcattaaactcattaactacttgtggagacaagtagttaattaaatgttatattatgattccctgtcattttacggtaagaagatggaatttgtttttggaagatttaagtaatatgtcagtaaattagcatttgtaagtaaattctgattttttagtccacaggtctcttttggagtcttcaagtttgttggcaatgtttgaggaaagaaatttattaggccataactttcactccctggaaatggaacattggctagtttctgttgatagatacttcttttttgtgggactgatcctgtttggattctgtaagtcaggggtgagggttctgaaatgaaaatgtacagggtgttgataaacttccagtccttggtgttcatgagatctgtgttcagccttggtccgccggctagatggaatggtctgtgaagggcagagaa

SEQ ID NO: 27749 - DNA, 2542 bp, Bovine  19866880583521
  misc_feature (1)..(1): n is a, c, g, or t
nggatttaagttttggtggtgacgtctgtctgggaggggtttggacttagtccaccgctgttgccgttagttaggtcttaattatttttcccccagagagtagttttcagtttctttttagtaatggaaaaacattttttttttcaaaacagtatttatacccatctccaaatgatataaaacataggatggctttttaaagcaaatgtgtattttcagtaagcatagtgagctgcacagtggaggtgagagaaagcatttttgggcttgaatggagctgacccgagagaaccttctcctctgtgggtgctgggccgttcccgaatcctgcacggtctggcagtgactgcggtggtggagtgcctgtgagtgggctctctgggaatgggaaagactgtaaaaccctggagtgcgtccccagaagactgaccttacgagagaagttctgggaaacaaaccgcagggagactttacaggaattttttgttgagcccacaagcaaggcacatgaggaaaagagatgtaattatagtttgtaagtctatgaaaagatgcaatgagtgacatgaaatagccattctaagtttcttcttcctgttggacagggaggaatgggggttttatgcattcattcagcagatttttactgcgtgccagctgtaagctgggccctatactaaatgcagagaataggtggctagcaaaacagtcaaggttcctgctcctaaggaacctggggggaagcacatgatggcacaagggagcaattacagattatggtgagtgccatggagggtaagtcctcattcagactgaagggtcgcagacttctcttaggaagtgagaggcaagttgagccaagtaagattcagccaggcaaagactatggcgtaggggggcatccaaggcaaaggggaacagcctggagaaactctgacactttggggaactaaaaggaggcccacggagctggcacccagagggggagggtaggagaggaggctggagaagagtcatacagggccttatagggacatgggaagattttagattttaccctgaatgttggggagccattgaagtgtgttaagcaggaaatgacatgatctagtgtaaaagggtgattcagacacctccgtggagaatggagctgtgagggcaagagtgaaagctggggtggtcaggaggtttttgtcacagttaaggggagagattagggtggcgatgaggtgcagaaaaatgaacagatgaaagatatatctaggaagtagcattgtctggagtcggtaagtggattggctgcgggccagaaagaggtagggatgcacaaaggtatctccttgtcagtacaagcctgcacggggactcccagcagaccacacaggttacaggttcctgtctttcgggaaaggtcaggtaggattgatctgaatccagccttgcagaggcagcaggattcagctgacctcttgctctgcccagttcaaggaacttacacacaatagcagcacccagcagagattccagttctcccagtagtagggcacttactgtgtccctatctgggcccctcccccgactcagggcaaggctctaaggaaccagtataaccccagtgtgccactagggggcgcatggcctgcattctgtgtcaggtctggtctggagggctttttgaagtttgcattagagagagactgaattgtatcagctttagtagtccacctgccctgacccttcatgctccttagaagaatgcctggtatatggtatttgttgtttagtcgctaagttgcgtctgactctttgccacctcatggactgtagcccgccaggctcctctgtccataggatttcccaggcaagaatactggagtgggttgccatttccttctccacgggatcttcctgacccagagatcaaacccaagtctgctgcattgcaggtggattctttactgctgagccaccaaggaagcccactcaataaacatgagttggtattataactgtgattagtgtcttattgtagaaatgaatgggtattgcctcttgtttctcagtatggagactgggcaggtggaatgtgcattttagggatcaggagaagaacagaaaactgcctgttgggaacgggacaagagaggaggtgagtgatttgatggtgttgcccttgctctttcatcctgtcctccacggacggggaacactagggacactaggaattcctttgaggaattcctgagttggtacttgggtcggggtgttggattgggtatttttagtggctggttgagtgtgccctctttgacactccggttgctccactgaagcagcagtgtcccccccttagggttggtgccaccctgttatttcctgctggattttgtgatgctcctcctaccttatctcctgcatatatataccttttaaactagagtgaattaaaatcttgttttaagaaatttgctataatactgaaggttagtcaaaaacacaaagattctgcatggggtctcgcattaaagattccatcaggatc

SEQ ID NO: 27750 - DNA, 1133 bp, Bovine  19866880593994
  misc_feature (1)..(1): n is a, c, g, or t
ncagagacattactttgctgacaaagatccatctagtcaaagctatgatttttccagtagtcatgtatggatgtaagagttggaccataaagaaggctgagctctgaagaactgatgcttttgaactgatgcttgagtctcctagactgcaagcagatcaaaccagtcaatcctgaaggaaatcaatcctgaatattcattggaaggactaatgttgaagctgaagctccaatactttggcctcctgatgggaagagctgactcactgggaaagaccctgaggagggtcttgaggagacatgggaagaagggcatgaggagaaggggacgacagaggatgagatggttggatggcatcactgactcaatggatataagtttgaacaagctccaggagatggtgaagaacagggaagcttagtgtgctgcagtccatggatttgcaaagaatcagacatgactgatctactgaacaacaacaaaatctcagaagttttctcagataatggttcaatttcacatgtacagaatatttcaaatgaaatttgtttgcccttggtaatcagaaagaacctgagctttactgttagaccaaggttcaaattcctcaccagtgacttaacctatgtggtctcaacttccttatatgcaaaatatatagatggtgtctatatacctacatggcagaattgttacaagaataggattaatgtatgtaaagtcctgacatattgtaagcttttaataagttgaagtttttattattatgaaattctgccaaaactcaatagatggtagcatcagaaaattattttatcagtcataatttctcaatctaatgctccaaatattgttctacacagtttccaatatacaaatggtcatctaattagctcatagctagtttagaatataaccttatgggagtttgctctagatgtgttcagctttattgtagaggaaatggcttgctgaactagcccacaagcagcttgttaaatgttaaattctgaatgctacaggcactcaaatattgcatttataagaatttttttaatattataatgttggacatcaagaacattttagcctagccacgaccacagtctctcaaagtattactgctctgttat

SEQ ID NO: 27751 - DNA, 1082 bp, Bovine  19866880672003
  misc_feature (1)..(1): n is a, c, g, or t
nattcctactattgtggtgttaggatcattcccttgagcccactgaagtccctacttcccttgctggctgtctgccagggctgctctcagcttctggaggctgcccacattccttgtcacatggcctccctggtccttaatatagcaaggttgcagcaaattcatcttgtactttgaaactttctgactttgctttctgctgctggccagagaaattgctctgcttttaaggggcttatttgactgggtcgggcccacctggataatctctgattgtaagatcagctgacctgggactttaattacgtctgcagagtcccttcacagcagcacctagattcgaattttattgaataacttggggtcgggaaacttggaggttggagggcatctttagaattctgcttaatgggtgggaaaccatgtaccttcccagagagggaagtgaaatgttcccaaaccattattatatctctcacgtgttcctgaaaaaccttctctaaatccactcctgtgaccacagacagtcttcagcagtacctgggcagaacctaagagaaaaggagggccccagacctgttcccaaggagctccatcactgtcctcttcctaggatggccctggacctaggatctgagctccacccaggccccagggaccctcctgaaccccctgcctttggttccttatcctgtcccactctgggtggtggtccagccttcacttctctcgctctttgtcacgggctctgggacccccacccacaatggttgagtgtctgggctgcctctgtttccctaggggtgacatgctttggaagagttgtctctacctcctgggactcaggaccccgactcagtttaaacagagagggtgagctggctccctgggctctggctctgagcgttctctagccggcagccttgggcctggccgagcagctgaggggctttgagaacaaggtcacgacttggcaactgaaagccagtcgagctccttccatcaagtttttaactagaaaaatagtgtgcccatttctctgtaatacactctgggctttttttattagacttcatttcccc

SEQ ID NO: 27752 - DNA, 825 bp, Bovine  19866880757283
  misc_feature (1)..(1): n is a, c, g, or t
nttagtttctttcagccttaccttcccccatggtaaattgacaatgttcaagtcctttccagcccttttagtctgtttcttcagtttccactgagagatgaacaccaggaaattgctataaactgtagcatagaggacctacatgagatttttcggtcccattcattaaaatgggtgaacaaaggttttaaagatactcttctcaaaagcatacactaaggtcatctctaagtactttaagggaaagttgaaggtggaccagccaacattgaagaaaatcacctgcgtggaaggtactctgtgtcttctaggacttaaaacagactctgtggtcttgtccagcctaacattttatgattcttatgtgggtgtaagggtgctggtctctatggcagaaggaagaaaatgccttatttctgtcctgcttttcaatttcataatgaatattaaaattaaaaaaaaaccctctgtttctacatcttttataaaatccttatgactccaagaataggattccaaccaacaagatacggttcagagagtatttttatgttcttattctgtgaaatggttttacaaaactccctaactttggctctacaataaagtgatgaagttaaacactttggttcatggttcagtaaaaggaataatatttgcctttggtttgaggtttagcaaattggtattcttcactttggttttcagttcatgcttcagttcaagtctccattaaagaatggagcctcagaactccttggctctctagagatagaatcaagaacagggttcgagttcattttcagaactttaagcagcccctaa

SEQ ID NO: 27753 - DNA, 2977 bp, Bovine  19866880761058
  misc_feature (1)..(1): n is a, c, g, or t
ngagacgcagacagattctaagacaagagaaatacacacagctcactggactctgctatgttgtcaaaatgtaaggaaaacagggtaaccctaggcacaggtccccgaaggaaggaatatgctatctctaactgaggcacatctttgagcctggaacaaggttattctctcttattcaatataaggccctggactagaaggtagggaggctcacctctttttcaggcttatggaagtgcttcacgatgccattgactgcctcaccgatggactcttggatctgcccagtgttcagctctgattaaaaattaagcagatatccaatctcagagcttaatagtgcttgtttaatagagcaaaagactcaggacatgggggaagtcccacaggagaggtggggcagcctggaccctgggaagagttgtgttgctcttggcttacccaactttgtggagctagctcttcttaaaatcttaggacaaaaagtaacagctaatacctttggagtctagtctctaatagatgctagtaaaatttattctttgccctggaattctggcaaccaaaagagtgccaagccttgacagtgaagccaggaacttgatagtgaaaacagggaaggccagaaagcagacccctctcctccatagggtcacatacaaatagcacagatgatcgggcctggctccaggagctctcccctctcctcccagtcctctaacgggagtgccaaatccctgcactgcttcatgagaggagggtggcaacacctgatgctgctttgcagaggtggttcctgaggcagctgtgtaggcgcggatctgggctccctcatcagggctccccgaaatctgcccactctccaggctgggcagcgtgagggcccagccccaccttccacttactgggtctgttgttgggtgagatggtaacaagcctccggatgacgctgggagactgctgcaggggcggagtccggcacggcctctcatccacctcaggctgggatgtgagcagctccccgaccagaacccgctccaggctcccgtcatccatgcccttccccaaccagcggccacatggaaacctgaggttcaggcaatagcctgtcagagctgtcagctccttcagtgtctttccctttgtcgatctacaaaggccatcaacaaagccaatccctggggacaggctctgaaactggcccgggaccccttgtggcccagctcctcatcccactgtgtcgcatcaaggaagccacccgagtgatgggtggcctggacagtggtagcagacacttccacttggaaaaccctcctttttttctcttccaacaagaagcctcagcctatcacacctaaaaggtctccctgagaagtccacatacccaggcatcaaacacagcctctggtagtacaccaggccccactgtctcaggacaaagctgaagaacacttacttgtaggtatgtccggtgatctcattcctaaccatcacatattccaccaaccatttggcgtagagtccagagttatcatggcctatctgcacagtagtgagtttccccaagttttggcactgtaagagaacagagaaacagggatgacaggaaggtcaagaaataggagaaaagtgccacactgctcagaggcacagatctgactggctgcctgcaagctgccccactatctgcaggggcagagctcagagctccacctgccaccaaagctggcagtacagtactatctcatgaggaatgatgctgagaaagaaagatactacaacctagaagaagaactagggccagggaacagaaagctctgaaagtggcagagcagtctgaggtctctgtgaatccttgggttcagcagctgaaagaattcttgagaattcctcaacacaccatggcagggaggtttgcaagtcccgatgggtaccttccagccagagaccatttacacagggcaggctccctctcctcaggtcaacctttgactctggcctctggtcatcctgggacaggtcagctgtgctgaaacataatactgtatagagcaaggcctccataaaatcctggaggaaggtgccaaagtagtcctgccagctgaaactcagacccccagagccttgggatatggtccctgggtaacacatacctcgaaggtcatctctaacaggttcctgggaatctgcaggatctgtgtctcacccagttctcctgagatgcagatccatgggttggcggtgaacatagagccccccagcttcttgcttggtacaatcaggatgtggtaaggaatcactgtttaggagaaggcataaggcattgcaggagatcaggaatccctcccgtacctgaccctgacctgccccaggtgtgctggcatgtctgtggcgcctggagcagcagggcctgaggccagtttagaatactagccaatcttctcaatctcactcctcccaaggttatcacccaaacatccaacacacaagcccatctgtgagctcagagctaagaaaaactgtcccttaaacatgatcgccaactcaacaatgtactaaatggcttttcagagcacttttctatctgtcatcccaaggactctggtaataatctccagagagggcaggcaggtatcacaatcctctcctgaggcaccaagagggaaacagtttccctcaggcctcctactttccagtccagtgctgcttccaccaaagcctatgaccctcttccctggggaggagaatgagtgtcatatgaaaacaagagtccacaatgctgagtcactagccgaacaactgctgctgctgctgctgctgctgctaagtcacttcagtcaggtccgactctgtgtgaccccatagacggcagcccaccaggctcccccgtccctgggattctccaggcaagtacactagagtgggttgccatttccttctccaatgcagaaagtaaaagtgaaagtgaagtcgctca

SEQ ID NO: 27754 - DNA, 1395 bp, Bovine  19866880787996
  misc_feature (1)..(1): n is a, c, g, or t
ntataggagatgtcacttgtattaataagacagggatgtgtatataatttgtggagcatttagaaaagggcacgggtaaccttcagagctgtcatgtggaaagtgttcttcctggcgccagaggacaaacatttccagtaggtggaggttgtagagaggcatttcctgatacagttgcagggaagcatctactttaaaccagagactaccaactcctgcaaagaaactagtattgttcacagttttgcagaaggaaaagcttagctgtacagagacataactatttagcacaattaaatgaactgcctgtaaattctttttcactggaagtgaaaggtggggtgatcatttcctagcaatattagaaagagacttatgttaaattaggagacttccaaagtcatttctaatggctaatggcagaattttctttgattctaggacatctttgttaaatggcattgtgaatcaaatgtagcttctttttgactcattgccatcactacaaacgtagactcattaatttggactgaaattattagctttttagccagttttgaagagttgcaggctactactgttctcaagaaatcagaaaacagagccatactactctgtgtgttatactagtctggtctgtgtgctattagcttggactcctctgttagcttctacttctttccattatcactgtatcctgagctaagctagtgtcttattttatccttacttgtctggtcagtgacctactggcagctatttttaaaaagatgtcaagcacgtgggcattgtgacaactgttttctcagagacctttttactcaagagttgtggtatgtttcagaagactggggctgccagatgcctgaccagaatggagaaaaatctgggtctttacctgcttttaggtagacttgtctaaaggttctagtagcctggtaactgttctttctttccagcaaatactagccaccaaaatcagagaggggaattcaatcctagcattgtttttgctagaggcaaagtagcctccccatttgtggttgatatgaaaacataacttttcaggaaacctacatactccagtgctgacatactcaacccctccagttgccctgaacaggagaaataggttgggaagagggagtatggctggtctagtagacctgtttcctggaggagagactttgaggacaaagggaatggagatataaaatcttctgcactgtgagcctggatgacaggaatttaactttgctttcatcatttggcaaactaatatgggatatattgggattctgttatgaaatgctgaactccttggatacattggatgaccttgtacttggtggggatgctacagcggttttcgtcttatttgaaaatgggtaaaga

SEQ ID NO: 27755 - DNA, 985 bp, Bovine  19866880790168
  misc_feature (1)..(1): n is a, c, g, or t
nagtggagaaacctggagaagactctgcagggcctggatgggaggtaggaaacctggcagatctgaagaccttcacccactctcttgcccacacagctccctcaagggtgctccaggctgccctgggagacagagaagaggtggggcctccatccccaaggcctggcccggagcagccccatctcatcaagcccagctgcagaagccagaggtctcaccctttcccagctttgctgatgacacaaaggacaggggcatcgccaagaatttctgctttgcacttttttttatatggggcttggtcagagcccaaacctatcacggggatcctcttgaaggaagaatccagtcccactgagccctgcccccccatgcctccccacgtctcctgtggccattaaccacggatgccaaacaccccagcccccaacacacacacaagtggaagaaccagttagagaagggatgcgtgtctgtgtcaacaactgagaatttctccaaatcttaagcttcccagaccacacccatggtgagggccctgggtctgcagcttccctccccaaccctctctcatgtccagccagctgtttctctggttctcggcctcttcccctcccttgcactgaggagacagggccagatgaagggcccagcgccccggcaatgcacagcacagatgaggagctctcaggggccagccattccccaccctccaaagctggacaccatttcccaattgcccgggcactgttccttggatgacacctctgggcagcagcctccatgctactaggtgcctctaatcctcactgtcccccagccttgcgatgcaagacagaagaagacagaaagagcagacgctcgaaaagctttacagtaaggctgactggctctgtccccagctcccaccccactcaagttcctggaaacgctccctcagccccagcgagctgagggaggggaatctctgcaggaatgcagcctg

SEQ ID NO: 27756 - DNA, 1301 bp, Bovine  19866880802653
  misc_feature (1)..(1): n is a, c, g, or t
natgcaaagaactgactcattagaaaagaccctgatctgggaaagattgaaggcaggagaaggggaccacagaagatgagatggctggatagcatcaccgactcaatggacatgagtttgaataaactccgggagatggtgatgaacagggaggcctgcgtgctgcagtccatggggttacaaagggccagacacgactgagcgactgaactgaactgaaacatttaatacatgttaattctcacatgtatgaaatgatattatgtacaaagctattcatcacagcattgtttgtagcagcaaaagattaaaaacaactaaatggccaaaaatcccaggcagaaatataaattatatgacatatataaaatagaacattaacatagctataaaaagaaaggaggaaaatctatctgtttgcatatgaaaagatctccaagatattcttttaaatgaaaaaaaaacaaaaacaaactacagaacaatgtacatatatttttaccttttgtgggggaaaacagaaagacaagaatctgtatttgtttattcttgtatatacataaagaatttatagaaagatatataagaaattaggaagatggctgggtaggtggaggtaaaggatggaagggaagtttcagtgattgtctttatactttttagttgttgaaccatttaactattaatatattgcaatagaaggaggaggaggaagaggaggactggagcagaagtagtttttattgtcatgaccacaaaagtaacttaaaattgaatgaaatctagaccccagccatttttgaagatcataggacttttcaatgggagtcttctttgtagttcatttttaagccacagagtatacatgcattttttatgctgcctgcgaaatgtggacccctgattatagtgagttatcatcctggaccaatttagggtagacaggcaacagataacatcttctaaattcttgtggccacacttttaactattgccttaagcctgtgggacgagaatgggcaaccaaaacacacacacacacacacacacactagtgagtcgttaaaatcgtcatgtaagattactgatatgagagatgctataatccttttaaattagctcatagagcctattaataagataataagttaagatgtgacctgtgattcctttcaattatctattttgcaattttactgcagataaatatctcagccctttcattaattaagaggtcaacacaagccagtttgtcaattatttctcatttctgaaatatttttcatgccattcaatttttt

SEQ ID NO: 27757 - DNA, 1170 bp, Bovine  19866880816323
  misc_feature (1)..(1): n is a, c, g, or t
naaatagggtaatcattttgttgggcttttttttttttagtgcagtgtgaagcatgtcattttcctggtttgttagtagtgcagatattaaaaaagaaaaataatggccagttaaagaagagcagagaaatatttagagagatttaagaggttaaaagagaccagtaaggaaaaatttttagggagaaagggaacgttaatatgggggagaaaaagagatgaagggagaatgagagtctgaccttggtgctttgcattatcattttcttgttgccttcccaaattccttctttcctgacccttgggataactagtgccttttcttctattgctgtttctctgcctgtaatgagtttctctccactttcattgagttgctggttcctgcaagtggaacaccctcatttatctcttcttcatgtcagaattcctttctttttttcccccccattttttctcttttgaatgactcttgtggggaaaaaaggatgagttgcctttctttgggataaaaagaaaaacttgggtgttctcaactgttttattttgttttgtttttgtagttggaagtgcgtgaagaccccagtagcaataaggatctcaaagttcagtgtgatgaagaagaactcaggatttaccagctaaacattcagatccgggaagtttttgcaaatcgtttcactcagatgtttgcagattatgaggtgtttgtcattcagcccagccaggataaggagtcctggtttaccaacagagagcagatgcaaaattttgataaagtaagtattaatatagtcctgctggggaggtggtaagaaatgagaacatttaaagatgtgactgaagatgagtttttcttccataaaatgtgctggaaacaagttctcggtccttctgatgttggtaaagtgttgggttgctttagagcagggtgcgggttagtgctatcaggtgatttaccttcagtcggagctctctcaggcacagatgcacatgcaggttgaacaccaggattctgggaacgttgattgccacagtaggttacctgagtaagtttaggccggtgtgtcaaagtttcaggatatttgaaatacataaattttttaaaatgatgagggtttgcgctttgctttttgtaaagaccctaggaagcttcagagaacaattagc

SEQ ID NO: 27758 - DNA, 2180 bp, Bovine  19866880824316
  misc_feature (1)..(1): n is a, c, g, or t
nttccccctctacaggggtccccctttgatcagaggactcccaggggccaatgggacctgaccaggcagagctggtggtgggctggaacaggggcctgtggagggttggactgaggaagctcctgagaagttcagttgtgggattgtggatgagcttgacttagcagtcgggccagaggaatgtggcccatccgagacccagggatgtggttcttgctctagacccttcagtaatgagcccaagattccctatgtgcgcctggagcggctcaagatctgtgctgcctcctcgggcgagatgccagtgttcaagctgaagccacagaagaatgatcaggatgggagcttcctgctgatcatcgaatgtggtgctgagtcctccagcatgtccattaaggtaccgcttttctctgctttctccttgaaacttgccccagtccaggagcctctctttcctctctgctcctggcagaatcctagctccagccttgttccaagtctcagagtggggctgctgctcagccacaccttgtcccatgctgcctggggtctgtgaggggcaccctaggactgagctgtcctggtgttcctagggctggctggtttggggtcctgaaataagttggtgccaagggcttgttatctttcttctccctccctcaacaacgtggtacctcgctctaaccactcagactcacttcttccccaaggtcagccaggaccacctgcctgatgccatccaggccccaaatctggggggaagaaaggtcactgtcacatctctggctgggcagcagcccccagaggtggagagtgcatctcctgaagaacacaggctcattcctcgaacccctggagccaagaaggggcccccagtgcccatagagaatgaggatttctgtgctgtctgcctcaacgggggggagctgctgtgctgtgaccgctgccccaaagtgtaccacctttcctgccacttgccagccctgctcagcttcccagggtgagtcatgcaacctgggccctgacctggatggcacagtgatcttccaagggaggttattccaggccagcccacagggctctctctgggggacttcctcccctctctggcctgcataaactgcaggtctgtgactcagtggctctctctgtgctccttctgcacacagacaggcagatgcttcccttcctcctctgttcccagcttcctcctctgttcccagcttcctcttgtgcagatatatcccttgacatctctcccagccccttgctaactcctgtttttctggattcactaatcctgagttaactgagtttctttcaagcccgttgctaagaagccattctctgtagggctggggacttagtttctcatgccacccccactccaatcctgtctcagggtagagggacaagggagggggctgtggacatgtgctgaggcctcacgtggcctcacttgcctctgcaggggagactgggtgtgtactttgtgccgcagcctgacccagcccgaggtggagtacgattgtgaaaatgcccgcttcagccagcctggagtgcgggcccctcctggcctgagcatatatgaccagaaggtagggaggggtctctgggaacaaggttcccacctggggtagcctgcctgtgcctatggaggctgagacttttctgaggggatgagaagcctctctggtacctctcttttgggctatgcctggacattggcccctggggtttcgctattatttttcttctgccagctgtcttcctttggcctgggagtctgaactgtgccctggtatggctggcggctcgtaccctgtgggccaaagccatcgggatcaccatggttaattcctactgaggtggggccagagcagactgacacggctgcccattttggtttctgcagaagtgtgagaagctggtgctgtccttgtgctgcaacagcctcagcctgcccttccatgaacctgtcagcccgctggtaaggaagccctcgctggttctgcagaaggcctgggcctcgagcggattgcggtggggcccggggtgggctcggagcgtggccggtggaagttggggtaattgtgcatgatcttgggacctgggggcctggccaccacagcgctgcacagctgctgttgcgtcagaccttcatgacatggaaaccactc

SEQ ID NO: 27759 - DNA, 937 bp, Bovine  19866880858472
  misc_feature (1)..(1): n is a, c, g, or t
nttgtttggttgaggggatactactgtcctctgtgtagtgaatggaggccagggttgttactgaacatccttacaaatgcacagtccagtccaccacaacaagaattatccagccccaactggagcaactctgatctaaagcagttgagacagggtcgtcctgtaggctgggggaagatgataaggactctggctggtcatccaagcccaaagcagtttagatttgatgagcctggaatacatgttctccctgcccccatctgctctgtcctgtgtcacaggataaggaagattgtatcctgactcaacaatctttggtcccctagcctcaccgctacaggacctatgttggcgagggaccaggaaatacagagtctatcctgattcctccctgagtgcccgcgatggggtgggctatagaaaacatgcaagggatgtcaggtttcatatttggcttcttgaggcagggcttctgggtcagctctgcttagtcagggctctggaatggagaaaagtcattttcatggcatgactgtgttacaggaaagtctgtgcagttgctggggactctgcctggtgttgagaattacttaatccagtcccaaatccttccttgccccgtctttgactcattcgtttacagagatctgtacggctcccatggcagtctaattagccgtgactgaaatcccccttcacagcccctctgcccccacacctcggcaaagacatttcctaaattcatggtggtttctcatgatagtgataaaaatgagatctggtagagatcttggttttggcaattgaaaactctgacggcatagaggatttggtagctctcctgtgtccactctcaggggccttgtgttgagtctgttgctttttctgtctgctccctgagagggggcagctgaactcctctatggtgggaggcaca

SEQ ID NO: 27760 - DNA, 800 bp, Bovine  19866880872992
  misc_feature (1)..(1): n is a, c, g, or t
ntgctcgaggcattagtgtaatgggggaaagcaatatgcaaatgaataatgactcaagatttcaagccaggcaacagccactgttagaagaccttggcttttctgagtccctgtagattctctgcatccaaagagctgaaagagaagtagacagttccagggctttacatcactaaactatacagactgcgtcaacagtccacatctttaacaaaggaaacttctcagctctattctactggacttgatacaatagaaaagttcatttaaacctctataaacacatataaacaactgtggtagtaattttaacagtttgaaaatacccatttcagaaatgtgtcagcactcaataacttttttaacttgtcagaagatgaaactaaatgactgttttaagactatatatagactataaggccagatgaaaagaaataagcaatggtagcgtgccaacattttttaaaaaaggcagtagtattgaaacttactgttaaccactggttatctagtagttccttagctgtgattctgtgagcagggtctactttcataagttgtttcaaaacacttttagctgcaaataaaggaaaaaatcctatcttatatatcttaactataattaatatcacatattttccaattttaggattaagtctgtatgacacgaaggaaacatatcagttatagaataaatatcatcagtacatatggctaatactaaacaaagtttaaggctgaaagtgagggttttattgcctggataaccctggtttatagtcttcagtaaaaattagcta

SEQ ID NO: 27761 - DNA, 2059 bp, Bovine  19866880906693
  misc_feature (1)..(1): n is a, c, g, or t
nggaatttatttctgaagcgtagttgcagaggaggagggttgagaaatctgtgtgtgtgtgtgtgtgtgttagtcacactcagttgtgtctgactctttgtgcttctatggattgtagcccatcaggctactctgtctatgagattctccaggcaagaatactggagtgggttgccattctcttctccagagggatcgtcccgatccagggatcgaacccaggtctcctgcattgaaggcagattctttactgtctgatctaccagggaaacctggtaatccatacttccctgctagtcccatatctctcacttaaggatgtagaaagtgtgattcagagaaaaggggtcactgatttcaggttgcacagttagtgacagtcttgaacctggaacctacatctcccaattcacagcctttcctagggccgacacctctgctctgaatcagacctgattcctttattttcctgggctggttttttccaccacccagaaaacttccagatggcttttttctactttcattggctgcgagtgcaaggaatacacatggaatactcaaactggaaagaaacataattgttgaatatgctaaaaatcatgcaatattttttagtgtcaattgtggattatttttgtatgtagacatatgaacagatagttaaaatgcaatgtgatatatgttatattagaaggatgttcagggtactgtgggaaccctgaagagggaataattaattcttcctaagggaaatcaaccttgcttctcaaagctagaacattcaaaccagtttggaaggatgaataggaaggagtttatctgaaaaagagtggggtagcaaggaagagtattttagggagaggaaacaaacactttcacaaacacaagagttatgcaaagatttggtgcatttaggggatagcagaggtatttggcatggcaaggatgtaggatgtgtggcaggtgaagctagagatgagactagaaagagttgaagccagtgtggaaagggccttgagccacaagctaaggattttggcctttggggccatgggaggtacaggatgtgatgaggccttgtctgatctattcagttatttctctttttctcatcatgctaatgagactgtgttactatgactaatgtttgagcatctgctaccagggagttggaagccttatggaaattattttcaacaattagaacagcatttctgacctggggggaaatgaggagggtcttccctgaccagccaagtggaagggagggacagttgcatgatgcccctggatgatgctccctgtgcaaaacatccttttcacgtctgttgacgggcagaaaagtatccaggagattgcagatccagctctgtcattaagtccgtggctctgcggaggctaggggaaggatttttttttttttttttggcagggaggagtggtaggtgaggagaagagcagtagtaaactattgctttgcatgattttgtagatttgatttttccgggatatatcagttaccttttgctgcatcgaaagccactccaaatcttagtggttaaaacaataaccaagctttatttatgattctgcaggctgagagtttgggctggcatactctgggtggttctgctgggctgcgctgggcctgctaatctctgctgtgcacagttggtgggtgtgttggggctccctggcttgttttggcttcaggtggcttacctgagacaactaaggcctcgctgcccatagtttcttatctcccagctatctaacctgttgttgttcgtgtggcagtattcgcgttctgagacggagagcagaatcatataaagccacttgaggtctaggcttcgaacttattcagtatcctttttgctgcattctgatggccaaaacaggtcatgagggcagcctagcttcaaaagagagagaatagactacagttttttttgaagactccacttttaatggataggattgcaagggcatggacacaaggaggggaagaatttgtggccactttttcagtctctcagactatctactttcatca

SEQ ID NO: 27762 - DNA, 1686 bp, Bovine  19866880908707
  misc_feature (1)..(1): n is a, c, g, or t
ntttaatctttttttttttcaagtgagtcagctggaatgagagttacaactatttgagaacagccccctggtagacagttaccacctgattttacacatgatttccagtatgttttggcaaagcaacagaatagggatgtggagctattgctgacaacttttctgaacaagtgcctctggacttagctttgcttcttttgaaacactgatttattactccttagctcaagcttcatttctcaggccttgctcctctaatgacactttagaaaggacatcactttactctggaggggtctgcttattgaaattcacctttctttgggaccagagcacagggtttggagtaggaccatccatgtgaccttgagcaagaacacttacccctctgaactccagtttgctcttctgtaaaatgcagataataacactgcctggtcagatgactataaggattgaatgaagtaatgcagataaagtgcttagtgttatgactgtcacaggtaaagcctcaaatcattacattactataaagtgagaccctacttttccccccatctaagactccttcagtagagtctcccataattgcccagaacaatctctcacaacaaacacacctcaagactgaccaccttggaacctcctgcccagattcctcttgcctagaacttcatcagaaacttgggccatagttcagggatcttataaagcagctgaggatctctagcctctcccctccacaaaattatggacaagagtttgttaactgccatcatgggtcaaaccatagggagatgataggggaactgttgagagtggaatgtcgagaaggctcagtgatgccttatatttgcagtcttgccccagctgggggaaccacagtgctttgaagaccacgggtccttcagacccttaaaggacaaccctctctcttctcatcagccctgcctcttccatcccatccctcaactgacatttactaagtgccaggcactactccttgtgttcaggggctcctgatccaggaggcaagggcaataccaagtgtagatctcaaatgagggtggggatcccaggtgttctctggaaggagcctggggagaaaggatgggccagacttgcttatggctgcctttagtgcttttggagctcaagagagttctattagtaaaaatgtcccggctagcaggccactcaccacactggtttcctccatggtcctgggccattgcacaggactctatctggcgttcagatgttcggggagactttttagccacttcaaggttcacgcctgagagctggaggtgcagctgctccctgtgggcagcctttcggagagtgcggatggccttccggagccgcttctctgttcgctttacaatgcaactgagatcacaagacactgcagaaaccagagagtgcggtggagggggagttcaggctgctgtacatatctgctggactatgtctagaccgactgcagggcctaccaacactcacagccccctgcagacagcatggggagagacatggagctgggcacctagcaggctgggcagcatttgattcaaacagaaatttgttggccaaaatggtagctttgagttttgatgaggcagataaaatcatcaggttccaaacaaattcagtgtagtttggggggtaaacaaacaaacaaaa

SEQ ID NO: 27763 - DNA, 899 bp, Bovine  19866880927170
  misc_feature (1)..(1): n is a, c, g, or t
nggagatttctttacggtgtgcagagcgggcagtgaacttcaccatccccaccccattccatcttaggcccccagagctgtgagcaaaaccacagtgataacacaatggccaaaagtatgagcatcctagttcaaaacaagaagaaacttcagagaaaaaacaacctccaaggagggctagtaaagacctctctccccacagaagaaaagacaagtgatcatcttctttatttaaaaaggggatagtaagttagcctcggacaggttcacgaagactggcaatgggaaggctagtggggagcacagggccactcacggatagtcgtgaagacattggtgaagcagaagtaatcgacggcattgaaagagaggaggtgatagaggaactgctccttctcgtcgtcacagcgcaggaaggcgtagcgcttgtagagttttctgtcggagaggaggtaacacatcagtctctcagcccaaagcaggggaaagaggctagaagtattcagttctggagggagatggctaaggaaagaacatgagggcaagcctcaaagttctgtagccacctaaaaaaggaacaaagccagcaactccatctgagggctagagcgaaagtggcttaacctacagaggaacaacacaagccaagctctactcgtgtccgagagctgacgttattataaagtgtcagaggttgtgggacctcgttcctaacctgaaggcttctacagggcatcatcccagtgtgtagtgtgcaagtagcaatggcaggaggtcgtggtcagcattcttactagggctagtctcagaccctcagcaggcctgagaccccagaggtcagaacactgctctgaacatgtcagaggcaaggaatgggaatgatccaggtcacagataag

SEQ ID NO: 27764 - DNA, 1171 bp, Bovine  19866880929817
  misc_feature (1)..(1): n is a, c, g, or t
nagagattctttaaaatgtgacatttagaggagatcttggaaattcttttttaaagaatgaagtttcacaaattttggtatcttgtgttttcctttttattcagctcaaaatactttatttccttttttgatttccttttcgaccgctggttttatttagaaatgtgttatttagtgttaaggtattaatgattattgttggtcacaggacttaactgtctgattcaagttatttcagatttattgagacttgttatatggcccagaatttgatatattttttaaagtactgcactttctttttcattcttatccagagaaagcaattgagctgcgattggcaaaaattgatcatactgcggttcatccccatttacttgacatgaagattggacaagggaagtatgaaccaggcttcttccctaagctacagtctgatgtgctttccactgggccagccagcaacaagtgagtcaaccccagagattccctggtgcagctcccaggtcacagtgataatatagtatctggacctagactgtcatttccagaagaccttgacttttataaagcaaatgtggagaagatacaaactgtccaggttgttcacttgtttaaacaaggaaacaggtgacagagcatcatcagctcccgtctccactgtgcaaattgggatagctccatgtatcaggacctgtaaaaggccagactgcagatgggttgaaatcatctgcaaatctcataactggacagcacctagctagcactgtaagtggtggagtagagtaagtagtggttgaaataattggagtctgacctgaaactcagtaacttggcagaattgtttttcctttgttaacttttggagatgagtttatcgaaggccaggcagagatgagtgaaaatagttttggatctgcaagtgaagtttctgtagatgtttcaagagagagaacgtcttggttccctggaaaaatatctctttattgcccagtcactgatctttaacctgcccttatatcaaggtttctgagctacctctgatgacttcttggtagcttaccattggtccctagatgtttaagttttctcctataagttgaccttactttcttagcagaatattcttaattgtctgcttgattctgtcaggggacaaaaagaaatgctc

SEQ ID NO: 27765 - DNA, 1060 bp, Bovine  19866880949878
  misc_feature (1)..(1): n is a, c, g, or t
ntgggctccgttgaggaatttacagccacaaaaacagggtaaatagccgtctttgtctcttacctgaagggactaatcatggcaaggacaaagtaaggaaaaaatcctgtctgataagggagatactacacatgcacagaaaggctccttggaatcaaaagtcagaggataatttcaggccataatcagtcttgctcctcccagaagccatcactttcagatccatcttggctatggtatgcgtgcacaccccaagtgagggtcctgagacaaattaaccgggggtgggggtgggccaacaaagcaaggtggctggccgagggaagaagacccggaaaactgcccctttacaaaggatttaaatttcccaaaagctcgactctctgagcttgcccatgagcctttccgcatgtacttttcttttcaataaactttttactttactctttaccttctgcctccttgcctgctttcgttcttgactagacaggtatgactagggaccctagccctaactgttggctcctgttgtccagtggttaggactccccatctgtgaaactaagatctggcttccagccactgctgctgccgcttactgccatgagcgtcagaaaccaaggggatgagaagggccaagaaatggagcagagaagaaggccacaacttcacctctcctatagtttggatcctcccttacccactaaattatcaagaaaagagaaggcaaaaaaggggctaggagatcctggagggagtgaggtgaggatatgaggccggtgagagactctgtaggtccttccttttgagaaagaaggctgccaggagaggcaagttcctacagtgggaagggaatctgttcagggatgagttgagaggagttagttcctaagaggtaagacacctgtgagctgggggcttcctatacgggcttggggaatttcagagggtggtccgtgaggctggtgaagggggacagtagactgtcagagcttaagtgtaaagctcaagttaaaagctcctcagtagtggaaaggctgtaaagtggaggtgggtcctg

SEQ ID NO: 27766 - DNA, 1079 bp, Bovine  19866880956707
  misc_feature (1)..(1): n is a, c, g, or t
ncctttgatggaattggagaaggaaatggcaacccattccatatccttgcctgggaaatcccacagacagaggaggctgggcactacagcccatgaggtcgcaaagagttggacacaacttatcaactaagcagcaacattttattgaatattacacagctattaattatgggttttcttgatggaatattatgcagctgttaattatgggttttcaaagaatgtttaatgacattagaaaatgttataataaagatgaaaaaaagagtcacattttgtatatctaatataacctaaactgtgtaaaaaaaaaaaaaaagcataagtagaagaaaaacaaagaaaactcaccatgtccttattagtgggttaaatctaggtggaaggatgttgagtgattttaatttttttgctgaattttccaaattccccaatagtgagcatttatacttttaatcagagggtgaaagcattatttaaagatagatttggtctttagtttatttaatgatattatactaatgttaatttcttagttttgataaagatacatgtaaatataagatgttaatattagagaacactggatgaagagtatgtgagaactctgaataccctctcagaaactttcctatacatctaagcttacttcaaaataaaaaaaattttttaaatagatatgagaaaatagaaagtgaaagaggttcaaaatgaacatctatccagtttgagatttgaagtgagccttttgagagctaagatggatctttagggaaaaattaattgccttctccttcctttgaccctgatgccctgctgatttgaacatccttataatgttaagagaagaatatgatacagataattcatcagttcagttgagattagttcattgtatggatagtatgtggatctgctctttggttctggttaacaatcattagtcaaaagattcactggaagtcatggaatgaggagtgagggtcagaaacgagcatgtccaaagccttacataacaccttcactcccgtcctgtgtgccttcatgactgtttggatctgttgatctttgtgccattt

SEQ ID NO: 27767 - DNA, 1807 bp, Bovine  19866881014759
  misc_feature (1)..(1): n is a, c, g, or t
ncgtctggtgcccacaaaaatcggctttgtggccaacaagtgatatggacccaaagggacgtacttaaaaactacattatcagggacttggaaaagagattaaaatctaatggagggattttgcttcaatttttgctttgaaaacagactaagttccaatttagagtgattctacagattaaaaaatttttagtttagttcaaagttttaaaaactccttatgtttggtcttactttggaattcagcaaataagcaccgacctccccatctaaaaatagtgagggcagaacttttctgccttgttcattgctgtaatctcctaacagctaaagctgctgctgctgcgtcacttcagtcgtgtccgactctgtgcgaccccatagacggcagcccaccaggctcccccgtccctgggattctccaggcaagaacactggagtgagttgccatttccttctccaatgcatgaaagtgaaaagtaaaagtttagtcgctcagtcgtgtctgactcttagcgaccccatggactgcagcctaccaggatcctccatccatgggattttccaggcaagagtactggagtggggtgccattgccttctccgacagctaaagctaggcggtctgtatttgttgaatgaactgtaacctggatttatcacctgttgtaaacccttggctaattacaacctgcccacgaaggcaggaccgggtgagcagatagtgtgcagattcttcctaaattccacaaaaatccactttgtgatccatcagcaggcagatcaggagcatgctttggcttacaccaacttaccccacactgacttgaagtatagttcatgtattcagccattgttctgaaggaagcactgagggtcgggtgtctgtcttctctctatttgaataaacggcaaatcacaggtgagatctgtattccctactggagaaggaagtcattttggaaataccttcctttttactttttgaaaggcctctgcaagtttaaattagtaaaatgatcttattgagaaagaattccatctctaaaaggaatacacagacatgcaatttttccaggacaaacgtttgttggctttcctcgagtatcagatgatagcctctaagaattgcgttaaaaagtaaccaatcagggccgagcacgagcggtacctagcggtgtcctaaagctacccagtaagaatctgtcaaatgtcaagttttcaagactttccggttcactgtccggatacacagcagcttccgccaagcacaggatccctcgggtcccggtgtgtggcgtgccctggttctcagcaagccgctgctgagggaatgaatgggctggtccacagcagaggccctcctcacctttcctggcagaaggcgctgggggctggctgccggccctctttctccatagtgccgcacccgggaaacgatccccacgctgcctttgggaagctccaccgaaggccagtccaccgccctcctcttggcccgctccagcacttcctgacccagcctagccgaacgctgcagggaacgtcggtccaccccgttcagcgccgcggccaccaaacagttctccatgtctccctgagagggaacatacacacaaacacgggcgagtcagcggagcgccggaccccgctccatttcggtcggacccagagcctcaacctccctgccgaccactgcccccggctagcccaacgcgctctccagccggcgcccagtcagggcctaaggcgtgcgctctcagcccctccatttccgtggccccctcccctcgctagagagccctcac

SEQ ID NO: 27768 - DNA, 1940 bp, Bovine  19866881070281
  misc_feature (1)..(1): n is a, c, g, or t
ncctcccagtacctggaggacaattctccatggtattctacatttccaacctgagcaagagaaattaatcattcttttcaaagatgtttatagagcaaacagccttgggggatagagtctccctctaggacagaggcagatctgtttcctgaccagaataataaggattatgtctgcttacggggcaaaggttgaacaggtttgccagcagccccttgaaaagcttggggtttcctaagcttgaggttcctcggctggacataatagacccacgatgtgtacagcctctacctggacctcctccacactgccccatggggctgcggagcaaggggaacctatgtgaacagcaagctcatgtggcccgttgtgcatgagtagtaaagtcctctgtgatccaagctcctctgtcttctgccagtatctgtggacccgagcaggctagtgctaacttgcaaacagagtgaaatctcagacacttcacacttactttaagggaagagtaggagagatacatattaaggaccaggtatcatgctagatactttgatatatattttatctcatttaatcctaacagtaatcttgcatattactactattattgttgttaccataaaactatcatcaccatttctgtcaaacatcaacatgaatcagccataggcatacctatgtcccctccctcgtgacctccctcccccctccccaagtatttcggccagtgtcaattgtatgtttccatcatttgctagttagtgactcttcttttttaaatataaacttaataggtattaaaaattttttaaatcatcatttcataagagaaaaggtcgcaaaaaagttaaaagtgatttgcctgaggatacacagctacgaaagggcacctattggactccagagactttcaaaaataaagggacagtgtggttccccctttttgtggtcccaggagccctttgggttccaattcattcaaagcccggctttaatctctcagctgcccagtctttggtaagcctctttctctgatgccctttccttgagaagttccagaagttgggccacaactgcccagagagaatgaagtggagcgccggagcgccggtcctgcagcaccacagatgagccagcccaccgctcggcccctgctcacccacgatgtcttcataggcattctcttctaaagtgcttttggatccaaacttgggttggctctcagtaccgttctcagtgggagaagaggggtacagggactggagactggatgcatcctcaaactcaaaggattttctgtggatgacaaagagtatgagtcattctggctgaaccacacccttgctgccctggaagggaatggccaagggcaacagccaagactggaggtcctcctcgctaaaccagccactgagcaaagcatcaagatggatccaaacttaccatccaaatgaagagataaatggtccaaaaggccccagcctgggtgcctgcaactaataccagtaggaagtcatgtgtcagacgctgtgtctgatgctctacacatgttcgcccattcgtcttcagcttgctgctgctaggtatcgtgccactttaagatggactagcccatggaggagcctggaaggctgcagtccatggggtcgctgagggtcggacatgactgagcgatttcactttcacgcattggagaaggaaatggcaactgactccagtgttcttgcctggagaatcccagggatggggcatcctggtgggctgccgtctatggggtcgcacagagtcagacacgactgaagtgactcagcagcagcctgaggctcaaggagataaagtgacagaggtaagactcgcacaggctgtcagacggcagggtctgaggttttgacctgggcctccaagccctggagaatataatttttgagaagcaactgccatga

SEQ ID NO: 27769 - DNA, 1071 bp, Bovine  19866881074968
  misc_feature (1)..(1): n is a, c, g, or t
ntgctcttaggttaaaagaccctttaataaaacaaggaaaaaagtcctaccagcttctccagctacccctggggcaccaagcacctgtctctcttcagcctttcagtcagtgccctccatcaaatcagtgcaccttagctggactttctgatttgaatacacacaatgggcttcccaggtggctctaacggtaaagaaccctcctgcagaggcaggagccatagagacactggttccatccctgggttgggaagattccctggaataggaaatggaaaccacttcagtgagaatcccatggacagaggagcctggcaggctatagtctatagggtagcaaagagtcggacacaactgaagtgacttagcacagcacagcacatataaatataaacaccacaaagaaatgaaaaaaaaaaagaaagttaaaaaaaatcaactgagatttcaccactgagaaataactgttaacattctgggagctttaaaacatccatctcttgaggctttttcctttctcttgctctcaacaaatatgattttatgtaaatgtcataaatgcattttagtaacctacggctttgccaaaacagtgtataacggacattttccatggcagtaactacagatttatgtccctgtgtcactgcccagcagaactgtttgcaccataagaagccctccctcccccgtggaccccaggtggttgtgactttggctgtgaccatcagcactgtgaaggtgctcatttgtgtgatcagctcctttccatcaattcccagatatggaatggaaggtggaagggcatgtatatttcatgtctcgatcagactgcccgacatcttggggtggctggggccctcccttggggcctaaaatgaatgggaagctgctgttaaacagggaatcaagacctaggctccttgagggcaggggccagtctcccatccaaggggaggctgggcttcggaactgggaggggttaattaaagagggctttgagaaatctataaacaccagaaatgactggacaggtgctaatttctttttttagtattcacaatcgctttt

SEQ ID NO: 27770 - DNA, 1070 bp, Bovine  19866881112872
  misc_feature (1)..(1): n is a, c, g, or t
ncctgaggctctattcattttttttttctattttctttctctctgttgtacagattaggtgatttctactattgtaattttcaactttttgatttttcttctgtccttttctttctgctgttgaaccatctactgagttttttttttttattgatgttatatattggttatagaatttcaatttgttttttcttcatatcttctgtttcttttctatgactttctatttttcatttggttcaaacatgtccatatgctcactgaagcattttttaagatggctgctttaaaatccatgtcagataattccaacatttgtgtcatattggttgattttcttttctcatttgatttgagatcttttctgttcttggtatcaaatgattttcagttgaaacttggacttgtgatgttataagactttatcttatttaaatagcttattttagaagaattttttttgtttgttttgttaataatatggagactagaggctcttagcaggcaaaaacaaaagctgttagtcctcttagagtctaaagccattatttgtacaatgtcactccgccacgttttgttggcaaacaagctgtgatgtcaggttcaaggggagggaaaatcaaactccatctctagatgagaggggtggcaaaatcacattccaaaagtgcatgcaggagggaggagtggttgtggccatctctgaaaatgatttgccacattcatagctattttgccttatgaaattatgatttactcttgtttcatcaattatttttttctgtgtgtatttccttgttttctgtattagaacaatgctccctttacagttgatccttgaacaacacacatctgtacccacgtgtgggtacacttacatgcaaatttttatactacacagtctgccattggtttaatccctggatgtggaactatggatatagagggctgaatatagttattcatggatttttgactgcttgagggggtgggtttggtatccctaacctctgtgttgttcaagggtcaactgtagtaaaaagaaacacatatcaaaaaccaccaaaaaa

SEQ ID NO: 27771 - DNA, 1555 bp, Bovine  19866881115178
  misc_feature (1)..(1): n is a, c, g, or t
ngaggaggagggggttgacggtgagttgtcctgccccagagcacctgcacacacgcactcaagagatgtcctttacctgccccagctcagggccaagtgaagagcttggtggatggctctgtgtgttaaacagaaagaagggaaaggagaggcagccctggaagctttcccaggccagttctcggggtcctcagggaactcagtgcaataaggaatcaactcaggaagcataagctttcaactgtgcccatggtaacgacggtcacaataaccatcagaacccatcataacagcactggaagtgctctaccagcttcagggcaggccctcagggggaggacagaaggtttgtgggaagaacagaaactacaatacattaaaagaacatgattaaaaatatattctttccttccctgaatttctgatctaagaagggtggacccactgctctgaaaagctataacaggagaaccaagagccaactagaaaaaaggtaaaatgtagataactgtggtatttgctggagccaaaaagaaaaattctatgaagatgcaaccaagaaaggagtggatcacaactgccaccaggcccgtggcagtgccccttggtcacatacctgcagaagcacagctgctgttcccagcagtggcccaggaggtgaggcattgtgggcaggtaccgctgagagaaaacccggagagcccactcagtcagaggtgcctgctcacggtgctcccgccacctgctctctccagccaagtctctcagactcagggaataatccagcggcttgagaagctgaggaccaggctaaccctttacatgtgaaacatagacttgaacagtctgcgtggctggcttcctggggccttctcccaaggccctgagagccaccccagactcccatcgacgctctctgcctgactcttttggctggtctggctacaaggagaggagacactcccaagcaaacgaaacgcccactgggaataagagcagagaagccagggggatgagaggctgtctcactaaaattcagccaaaaactacgtttggaaaatgaaattgttcaggtaggatcaaccaccaatcacgaattgctcaaaaacccagctctgacaagttatagacaactatctgaagagttacaacccaaagacaggaatacaacaaggcaccactagaacctttctacaatctctgccctgagacagaaatcacagttctgggatctcaaggtgtagtgggaagaacacctgacttggagtctagctaatgctagtcaagggtcattgcacacctcagttttgaagactcaactttctcaccataagagcaataataataacatgacctactcatataattgtaattcagacaaactgaagcttgataaatcactttttcttccagatcatgcttctctgggtacttggaagtcgctttctccattcccaagctagattcatcatttttcagactccccgatactgccattcatcccagtgactctacgccaggcactgtgcgaggtactaggatataaaaatggggg

SEQ ID NO: 27772 - DNA, 1290 bp, Bovine  19866881214971
  misc_feature (1)..(1): n is a, c, g, or t
nttttgattatagccatctctgtaggtgtgaggtgatacctcattatactttgggtttgcatttcccttatgactaatgatgttggacatcattggctatttgtatatcttctttggagaagtagctatttaactcctttgtttatttttaaattttgaattgtttttttttttattcttgagttgtaatagttctttatatattctgaatattagacccttatcagatgtatgatttacaaacttttcctcccattctgtatgttgtctttttcttgttgcctggtagcgtcttttgaggaacaaaaggttttaattttatgaaattcaatatatatgtttttactttgattgcttggctttagtggagaagggaatggcaactcactccagtattcttgcctggagaatcccatggacagaggagcctggtgggctacagtccatggatcacaaagagtcggacacaactgagtgactaacacttgcttggctttagatgtcatgtgtaaaaaattgttgcctgattcatggtcgtgacgatttacttgtatttttttttcctaagagttttgtggttttagctcttgtatttaggcctttgatccattttgagttaatttttatatatgtgtagagtaagtgtccagattcatccttttgcatgaggatagcctgttgtcccaagaccatctgttgtaggcctcacattatttgtttaagtcaacttgtaagtcctgttgttttgatgaaacatttggctgataccttgtcacttcaattagatgccaccatcctacacagaagacattccagacaaaggaacatctgtattgctaattagtactttggttaccatctctatgtaggcttacaacctggtgagtaggtttgcaggggatgcaagaagcttcagggctgcttccccttctaatttaaggcctttcatgtgacccgtggtgttgcctccttgccgtctttcctctgaattataacttgattgccccttgacctagagaacaggaaaagtaaaagaggcattgcttttctctaagctggagagaccctaaaatcatccttccagactcatgggaggaacgtgggaagagttgtgaacctttcaacaaagaaaaggggatgttttcaagggaaggcagagctctttcgtttcttcatgcttcccattgaaagctccaccttctggaatcataacccagatgagccttggcttgtttcagaactctttttcctggagggaggatagggaagggagactggttcctcccaggg

SEQ ID NO: 27773 - DNA, 1376 bp, Bovine  19866881253067
  misc_feature (1)..(1): n is a, c, g, or t
natgggtgattcatgtgtatgtcataaaccagcacaatattgtaaagcaattatccccaattaaaaatgagtcaatttttaattagttagaaaataggaactggattaaactattgggttggacaaaaagttcattgggtttttaggaaaaactcaaataatttgtccagttacttgagaaatgtgtgaatttttcaatgagcatattatttaaaaactgaccccaatttattaatgaaagaataagaagcttttcatctctccttttccatggcgggtttttccctagtttccagtttcttgactcacttgttcagttgctcagttgtgtccaactctttgtgatcccatggacttccgccttgactcagtagtataatatgacttacatttcctttatcttgctgaagcaaggtaactcagtagctattgtccaagtagattttcatttcacccagacctatagttttatacaaagtaaatttcctaacttcagagaacttcacaactattctcaataagaaactctttaggcaatcccaggaataaaccccatgaaagaaattctgctctattactaaatagccttattcacaaatttcagcactgtagatatgctccatgcatatctttctatcattgtatattttgaaatatatatatataatgaaaaatcttaatgaaatatatttttcaagggtaataattagattttttggcattatctttggattctggcactattcatttatctagtatcttactgtattgttcttcatcctgtttgtgacgccagttgtcttgcttttcacactgttcacaatatttggtgaacccagggtaggcaaggcgtgagctaagaggctggaagaagacaggaggagtcataggaactgcagacacatttattcttttctggctggcacagcagccacagaagcagatatagcacaatacaacataatggcacacaacctctctcctggctgacacagcagccataacagtagagctgtgttctctcctctcgtggctgacccaatggacacagccatgaggcagcagtaatgccaccactttttatgtggcactcacatatccctgcagcacaaagtagctcgtgagcaggggagtacctcatgacacacaggggcagtactgtaagtgatctcagctgttacataaaccttgtgatgtgcatgagctgtgctataaatgatctcagctgttacatggttattatttacaaaacttggggtaagagagcctgaacacgccatcttggctaatttgctctctccccatgcttgctcttatttttaaactatgttttgtcctctgtaacagtgtaggattcccttagaggcctccaatta

SEQ ID NO: 27774 - DNA, 2399 bp, Bovine  19866881337811
  misc_feature (1)..(1): n is a, c, g, or t
ntgtgggtttttctttagtgctccccagtacactttgagatttctgtgtatgatgggagacagtcttttttaacttgatgaggctgttcagaacccaaatgtctcaaatttatggaaggacgaggcagaaagaaaaaatgttttaattttacccacaggtgtaaattactaaattgttttaaatcatcagtaacttgagaagagcttctttatatctgaaaacaaagattagaagccagtaatatgtcagacaaaaagtcatgaaaattctaaccatattaagcagtctaatctcatgcaaccaatccctttgttttgccagccctgcctgacaaccgaggatgccagtgaaagcaatagtctctaagaagctcgtgaagctctttgccaatgtctgtatgacctgtccagcaaagtgggtgccccaatcactggagatctcagaaaacacattttaaccatgttttctccattgtgagatattaaccctacagccaggaaaggctttatcctattaaataaaagtgaagtctgtcagggagccaggaaaagccaagcggctatcttggatttcccatagccccaactatttggtttatagccactgtttatccatttaaaattccctgatggtttaattttgtagaagcagagtgagctttgtctatgtgtgccacagtctattatcaaaagccatgtttcaagaaggaaatggcaacccactccagtgttcttgcctggagaatcccagggacgggggagcctggtgggctgccgtctctggggtcgggcacgactgaagcgacttagcagcagcagcagcagcagtgtgtccctggtagctcagctggtaaagaatccacctgcaatgcaggagaccctggttcaattcctgggtcaggaaaatccctggagaagggtatggcaacccactccagtattcttgcctggagaatcctcatggacagaggagcctggtggcctatagtccactgggtcacaaagagtcaggcacaactgagctaccgagcaaagtgcttctatacctttccccagcctagcaccaggccagaccaactgtccttctacatacgatgcattctattagttctcctctgcccagatcttcattttgaagggaacttagctcattcctcttaaggggaattttcaaattatttttgtcatttatttttatgtaacacacttgggccagaccatgtctgtgttttgttttccaactgcttacctctttaatatctggggatctgtggcctcggtttctccatctgctttcatagctgtgaaaatagtcactcttctgtttcggaggcattttcagtggtgataggcctattccaagacattgataatcactctgacacctcctgtgcaccacagcatggacgcgtgggcttcattacaacccacagggacatactctgcccaggacagtgcagagcaggtgtgatttccaaggaatgcaaatgccaatcagcactctgacttgaatgacagacaagtcaagacatgagaaatatgataaaaaataaatgcaggctgggggcctggggaggagttcggcggaggagaacaagatgatgtcagagagggacttagaaaagaaaggaaaatgggttgggatcaggggagcaaaaaagagaacaaagtgcaattaataaagaatactgactagataacaacacgtggatctgccagacccagaagcaggagtcagaggatggaagtgctcgtagggtcgttaacgtggtccttgttctaggccggtctgcagtaggaccagcccctctcgtggcctgaacaccagcacactaagatgaggacacagactgaagaaacaaagaccttggggagactgaagctgagagaggctctggttgtaagaggtggccgcagaatggtccttacattttgaataggagtgctctgtggtgttggggggtggggaggagaaaaaatacaaaacattttgtgcttatcactgaaatgctttgtttaaataattctatttgactccaaaatgtaagttccaggttagaaagatcaaaagcagtcagtcttgaaaatgaagctttttaaattccagtgctgctgttggaatagagaataaaaggctttgttcaaacatgcattcccagcagtgagcagagctttgaaattggtcagggaagttgtgttccgtaatggctgcgcttgcctggagaccaaagagctgtggactctgggaaatgactctgggctggatattttccatctgccccttcagaaccactctgccctccccacccaaaagaggtgatctttcaggattgcattaataggttctcttggcatctgggttcattgggattctgtcagtggggaataccagcaaccac

SEQ ID NO: 27775 - DNA, 1077 bp, Bovine  19866881354267
  misc_feature (1)..(1): n is a, c, g, or t
ntactgggtgtggctcggatctgtgttctgcctcgctccatctagactgacatccttcgccacagggcaccttactcagtggaatcactgcttgctaaaaagggagcagctctgcacacctggcatgccttccacctgccacctgcatctggcatcgccgctcatcactcttcagcaagtcctccttcctttccctcccccaacttcctcttcctacccaatcggtcggaaaacacacattcagtggacgtttatttgaacagagcacattagaaaggtaaaccttttataaaaacaatcaagtcactccaaggccagaagaaataatttttatattctctggccagtgttctaaaatctctaggagaatcagcattgctttggtaggttcaagataggatctccatcctccagcctcctgtccatcgtggacaaagccagaacaagctacagcctcagagctcctttgcctcttcacctttctccccattctgcctccatcagtccattgctcagagattcatccactcagccatttatccaatgggagcacttccaggtcctggagatatctatgtggctctccaaatccagttactgggcctatccctggcccctaaatgccagggctaagatcagttctgcagaattttaagacaccaacccaggccctgtcttcctgcttccaggaaggggaggagaaatcttgattagacaggagactacaggagctcctaccttagtttcacagcttagagctccagcagtaaagggaagaaggtgggactgggtggcccctaagagcacgtctcgactgtccacaaaggatgtcaacatggcagaggtccctgaacacagagctcctccctgacgtcacctctgccaagcactagtgagggaaaaagcctgagcagaagctggccctggcctcaagctgaccctacaggcgcgcttcagggctgccattacctgagtgggtggggtttgttgtacttcctgtcctgaggactccacatcctgtgcaaagagtccaaggagttctcagacagctgctggggttttcgtcctgctcttcgg

SEQ ID NO: 27776 - DNA, 1333 bp, Bovine  19866881383856
  misc_feature (1)..(1): n is a, c, g, or t
ncctggtgcacataccctgagtttaatataaatttcagtttgtacagcaagataatattgctggggataaagtagcacagatagagtagtgtttcacagaaatcaattttccagatatctgaaacatacctctttcaataacaaaatgcaattgactttaaaatattattttgaaggatagtacttctaaaatgctttgcacactaccctgtcttactaaacagagtacctgaggccaaatgagaccatttcttagtgatgtaaaagaattctgatgaacctctattgctggggtattctgtagttcatcggtgctttagggaacttctaagaatgtagtagggtttagctagtcctttccgtgaatgacatcacatcatggcacttttccaggtggtttcttgtcttctctcctgttgttagctgccattatagaagtcctaattccctgcttctactctgcttactgctatatatagaaaaactaaaaatttccaaagaaaaccatataactaagcttgctagatcaagttgactaaattgggcttatagtctcatacagagtataatgtgtgaggtttgtgacaactattcttgctgctgttttgaagctttgcttgcttacttctggtttcaggttttgatcctaggagttaaatttgtcaaagactgaccaccacgtacaggtacagtaggagaagagaccaacgacttgtgagttgtcttttggaaacacattgaaggccttcaccttggctgaaggaaataggtaaggagacaaggatgcatgtaaatagatttgtgaactaaatctttggaatatttgagtgtttcaacagcttcagattaagtagactgctttaacagcggtagatcttgacacaactgaatcagatagctgagtggggaactaacttttcctgccagtggtttcacaagttgatttttaataggaaagttgctcttgctgatagtaagtgtcctgccagcttaatgaaaaattcttttatgaagtaaggttgttgctacagatgtaactttgttgatatccgctaaccaatgggtgtcaaatgggaaaacaattatggatggtgaagagagaagaactgaagagtacccagtgccctgatgatccaagaagatggaaaaaaacaaataaacaaaacaaagaggatcagggtctgaggctgaaggaagagcaaaggaaaaagcggagtccagtgaatcagaagtgaaggctagaatgagtggaacctttaaaacccaaattttggagatgggaagaactaggccagaggtatttttcttgggcgggttaaggaaatttaaaggt

SEQ ID NO: 27777 - DNA, 1238 bp, Bovine  19866881400508
  misc_feature (1)..(1): n is a, c, g, or t
naaatacttctgcatcatttgctgacaatatatcccagactccaatgaagccgtaagctgtaacttggtggcctcaaagtcctctgaagatctggggccccactatgagcagaacagaggcccctcttgcaggtgaactggggttcagctagagctctctgtgatacctacagccttgattccatgagggctgacaaaaggagtgtgtgtctttttcagcagtcgactagttcagaagtatgaaatgaagccactgaaatgtcttccagtttcccttggtatttaaagggttctgttataaagttgtctttcttcatcaccttttttcaaagtggctgaaccaagattagaaatcttagacaacagcagctgacagacaaatgtccaagttcacacaaaaacattctgctggcggcacggaaggtggtgggataaaatgctccagagactgcagaacccattctagaactttcacatctcatgtgcagcagcaatctgttttcaccatcagctcatttaggaccatctcccaggtacgtgtgcacagctgctcggctgtaacaaaagtcctccttgtagtgacacgaagcggctccgagcaggagtgggtctctgtggaacacacagagctgtgcccgctgccaccgtttcctctcgtctgtgcactcagatggacttcagacttcccctggcgcttgccagccagtacagaccgagaagtgggctgggggctaagtgccgttaccaaataaagattagtcaagacccaactaggatgggtcctaagacttctccccagcaaggcctcaggctacttcagggagtatgaagataggaaaatccagcagcgagtactgctcccactgcagtgcacagagaggcaatttaacctagtcattgaacccagggctgaggcaggaactgtgctctgggcctaaccctgccaatagttagctgtttaacttttaggcggtcacttaatctctctgtgtctcagtttccacatctttcaaaggggaataagaaagtggcttcctcatagtattgctaggataaacaaagaaataaaatagaaaaatacatataaaaatctatggaaaaaaaagtataaaatgctatacaaagtattataaatcaatgataagatgcttagaatgttgttgggtaaacttgaccttcatatcccacaccgtgcccagtcccagattcaagacaatgaattccctcaaaaagaaagc

SEQ ID NO: 27778 - DNA, 1626 bp, Bovine  19866881410553
  misc_feature (1)..(1): n is a, c, g, or t
ngcaaaaaatcttattacagtgaataaaaaaattctatcaaacaagctgctgtttccctaataaaagggttgcctacaggcaaccaatattgttttatttcagtaacaaactaactccacacacaatcagctctctacaccaaagtaccaaaaaaatgatcaacaaatgtttctgaagaaaacgaagattatttcattgttgaattcactttttacctctgtgatttttttatatataagcaatattgacttttttaaagcccttcatcaaagttttttaatttacttgaatggtcctaaatacccttctaagtctctcatgaaaaacgtgaacatcttcatttttaaaggtatcattaatacaagtccttgtaatttataatgccggaacttggcctacatttctgagtctgactataacatgaaaattcagatgtaacataacatgagttagtgacctgaccgatggggtgagctgaactgcaccattctgtccaagcatgttagtaactatatgctcaggactgtctggttctgtactgctgatttcataagaaggcagctgatggcagtacctgggggttggagggatgctgcataaacctggtctctgtgaaacatcctccaggagccggaccatgcacaagccactgaggccctcgtgaaacttcctgtctgtacccatcaaccattctgagagactctgtggtcccgttggaaggctggtgggcaggggctactgatactatctgctaaatcaataaatagttaactaatatcacctctttgccgtagggttgcacagtgacaagacagacaaggtcttgtcattttagagcttactattttagagggaggagacagagaatgaacaaatcaacaggaaaagtatcagctaggagtaagtgctgttgaaaattaaaataggttaatataacggatgatggtgtggctgttttaggtttgggaatcgtgaggatccttctgggtaaatgatttttcaactgaaaaaaaaaatggcaagaaagaatcagccttgggccaatcagggggaggaacattccagagagaggaaagtcaggtgcaaaggctatccaggcaggaaaaagcatgtgtgtggatcacagactagtgagaagtcgagtggtatgagatgaggccaagaaaccagatagggccagagcacactgggctttggaatccagaatgaggggtgtgggcttaattctaaatatgctgtgaaacttttggaaggggtttaaacagaaaagcggggtgatctgatttatgtttttaaaagagagctctggttactatatgaagaataggttttagaaagtaggcacggaggcagagagcagttaacaaattattgccaccaaccaagcagccatccagcgagaggtaaggctctctgggctaagacagtcgtagtggagaggacagaacagaatgattgtggacatgttttgggagagagtccccagaacttcctgatgattggatggaagttaaagggaaagacagcaactagttgcccaaataactggtagatgaagattgcagaaggagcaggtttgggacatgtgacaattcaaaaacctgtctacaaattctctgatgctt

SEQ ID NO: 27779 - DNA, 902 bp, Bovine  19866881485305
  misc_feature (1)..(1): n is a, c, g, or t
nttggaggaaagggccccattattgggatcttattagacctgaatcctactctgcagaaaacctggaaaagttattatcagaactttacctggcaagaaaccaaaaatcatgtcatcatcctcagacttctttcagcccctcagacttggcctgattgaatttgttggtcttggaggcccaagggacacgactgcttcggagcttagataggttggtttccatgaggcgcctctgcagaatgttatgaggttgcttggggaacagaaagcagaggcttcttagtgacaggccatgttccccctcccctattgtctcccaggtgccatggaaataatgaaggagcctcacataactgagctccacctttgcctcttatttattcttccctcaagtacggatttcatgagtattatcagagcaggaactatcagaacagtagttcctcaaatgaaaaagcaatatgggattctgggaaatgtgaacaaggccagtattccatggctaaagaaaagtaagagactcttgtgatttgtactacctgggcttgctgccttcccttcccttacaaggacatttcaggagaaaagtggctttagtctatgtgggataaatgtatctttccagagaacttataagtaagggcagctaattctcacaggccaaagaaaccttcttagcactggttttcaggagttctgtatacttctatttcaagtctcacttcctcacagtctttatcttttggactcaaatgcatatgccttagtgacttggctctctcctgttggttgagtcatccaatggggtggatgaggtgggaagacaagttatacctgctgaataaccctcttaggagatacacattagaaccggcagaagccatagaatcatccttaccatt

SEQ ID NO: 27780 - DNA, 925 bp, Bovine  19866881542933
  misc_feature (1)..(1): n is a, c, g, or t
ntgataagaataaggaaaatactctgagaatagagtaagtacatatacataatggagtaaataggctgctcctgagtccatatgcttacttttatttttaaaagtctgataaaaatttactcaattacattttatacagtaatatttagtaagctttgtccaaaaaggctatgttttaagtttgcttgtaaaaataacgaaagctttatcagtctctggtcaataagaaaggaagaaaaccttgctagaaataacaataaataatttcacacaaaaggccaggtgacataagaatagtatattaatgaatatattttcttcgtatttacaataagtccatttgttaatactgtaatagaaaaaataatcagtccacattatacagtagaaacaggctttgaggctgatcatacctgtcacaataaaaacatacaaggatttcttccacagctaaagtacttttcaacatgacagtcttgggtgaaggcaaaactgaccgagtatttcacgtcttagaatcgaggaatcgagggtgttaccattaagcaagcagcaaaaagctgtttgggttttccaggactatttaaatatagtagttaccatatgagaatttaattttactttgagatataaaaagtaaaaaccctcaatagggaaactgcattaatcaaaagcagccccaaacaataaagccatcaatagagaaatgaaacaaggcattcttatgtatcatgcataaaaaggataattacatcatacatactttaatgaccagattaataaataaatgtgataaatgttacagtcattggaacaaataaactatgttcaactacttaagtgttatgctgccactgcttctgtttcaaaatattaagtaatataactaatctaacatctaaaaactgcatactttggaatgttt

SEQ ID NO: 27781 - DNA, 974 bp, Bovine  19866881628577
  misc_feature (1)..(1): n is a, c, g, or t
ngccctgcctgaaatggattgtgcctgtagaagctgaccttctctacagttgtaattaagtcggttctaattaagcttactcaattataaccttctactagcctagggaagaaacgcttccttttgatcaatatgaatcataagcaaatctggagttgctcaggaggcatggagggggagaactgcctttactcccccaggtgagctgcatggagaggcacaggctacctttacaggtctttccatccatctggagcgtgaagccgacgggacaactgcaatgaacccctgttgaagtatccttgcaggtgcggtcacagcctccattgttgacagcacacgtttctgccaaggaggtaagaaagaggcagttagcttcgtagagaagtgctgacacagctgggaggaaagggacatccgtgcagtggtaatacttgacaaaaattcatgaacatcagggagtgtgtggggtactcacagccataccccaagtctctgccacccacaggtgagttagaggaagagcaagtgcagctcttccccatcccctctctgcataagtgacatcgggacttccctagtggtccagtggctaagactctgcactcccaatgcaggggacccaggttcagtccctggttggggaactagatccccgcatgcttcagctaaagatcacacgtgctgcaactaaaagacctcacatgccacagccgagatccagagcagccaaataaataagtgacatctccccaggaaacctgacaggatgccagggagacagacgcccttgccaacctgctttcctctctactggcagatgtgaaaacactaaaagttcctggcaggtgtgaagacactaaagatgtgaagacactaaagaaccaaatgttctttagtgaagacactaaagaggctgagtatgacaacctcttccagcaggctagatgtgaatgcagaacagagccaagggg

SEQ ID NO: 27782 - DNA, 633 bp, Bovine  19866881641069
  misc_feature (1)..(1): n is a, c, g, or t
ngacccatgcgtctatgcttgactggaatgattgttttaatacaaacagatgtcatttctattccaaaagagagggcaacagctaatacatctcacattctcttaaaaccttcttgttttttatctgacagttatgagctgtttgagctccagcactcaatctgctggaggtggttgggatccattcatccgtgccaaggcctgctgtcaattaacacagaaagaagcttgcactgggtcaggggggagctctctcttggcttgggccggtgatttctgaagacattattttctcccagtactaagatggcacaggaggtgggagatgcctccaggaagcatcctgtcctccaaagaaggcccacccagcatgacagttgttcttggatcagcagggcatttacactaacaggctccaggagcatctagtggtaaatgtaaagtgcccaagaaaaggcagcagtagaaacatcattttccttccctccgggagactatcctcaatatctcatgccggctgcttcccaatgtttctgatgctgggccgcacaagatggttcccagggtcgggagtagggggaaagtacccccaaagcacattcccatacaaatcagctgcttcttcctcttttt

SEQ ID NO: 27783 - DNA, 1553 bp, Bovine  19866880584041
  misc_feature (1)..(1): n is a, c, g, or t
nggaggcataatttactgggcagacacaaacagcagaatccattctacctatttttttttctcctgaaaatctagcaattgagcctcataaagttgttggaataattaaaataagtgactgcaaattatctcactcagtaggtagcacagagtaggtgttcaaaaagtccattctctttcctttctttaaaaatgaaatgcaaaaaaaaaaaaaaaagaaaaagaaatgcattgtttcatgctttcctgtctctttaaacaggaagcagaaggcttttgatgaggtgccaactcatgtttatagctttgtcaagatcaatcagtcctgtggcttacactgaatgataggtgtgtatttttaaaggaaaagtgtttatgcaagcacagattgaaatttctagagaagtctagagagatttcttggagaagatcactcatgctgctatagctgacttaactggtcctcttcatcaccacatcatggcccaagaaggattcaccttgaactctaactgagagggagcttaagttcccatgataggaatgatactacgattggaaagaaaatattcaggagtcatatctgacccaaacaaaagtcatgcaagacacaggggcttccctgaggccttgacaaacaaaagttgtgatgaaggatcacatagtcatttgttctttcaacaagccaagaaggaatttgtcctggaaacacatcttgcttcatctacataaacatcaccagtcaagtagaacagtctgtgactaagataaaagaaaaagcatctgactgtctagaacagccctagctggactttaagacattttcttaagacctgggcttggtaatcaaagcttctggctttaggatctcctgcaagaactaacaacccattctgcttctggtcctcccctgtgttatgattggccaatgcctcttttacagagactttataggaacccactaattcccctcccttggacaataatattatacccagaaagatagatcaggaggggaaccctatggcttgagggattctcagagagcctgactaattaggaggcagtaaatagaggaaagctgaggatataagttaaagcagctcaataatccagactctgcacactcaatctagtttccacctgccgacccccatctttggacactgaaaatcacgacccaaatgccctccgtctcactgagaatgaacatgtctctgcaaacatttttgtcagttcctctctgtgctaatcttcctgcctgtcacgcctaggtagcaagtcattgcaaagttatgatctgtaagtccagaaatgtataatgcagtttgagcaaagaaaatactgaaaactatttgctacttactgggcaggattatggtgtgcagaaggaatttgaaatatttagatgtctcagaattacaggtggagattcatcaaggtcacggtggcttttcttttcccagaattaagcaaagcaagccatagaatttcaccgggcggcagcttctttgacaggatattaaaatcactagctctgtagtctccactgc

SEQ ID NO: 27784 - DNA, 2442 bp, Bovine  19866881168135
  misc_feature (1)..(1): n is a, c, g, or t
ntttactggataggatcagtccatgtgccctcatcacattgacggaaagctgaaagtggttgcccttacactcaagcacagaagactgatgcagtgtgtgatgaacatacgggcatcgtccttgccacatcgttccaacatttttctagacttatggtgcctcctggtttctttgaacatgcccagggcttactgtgctttttatccacttggcatgttccctgagaactcccacaagatacttttggtgggttaatctgcttcttgaaatgcttagtcatcctgtaagacccctgctccagcactacccaccctgaaaccttccctcaccctcttggaaaaattgttcattctaatttttgacacaatctgttagaccatgtaacctatggtgtttgtattatttctatcttgtcgtacatgtccttcttatcagtttagctgttttggggtgagtaagcagagataattttttgtcctatccttatttatttctccaatttttaaagttctgcacttgcagaatctctcaaaataataatgcttaatcattgttgagtgagctgaatgtttaccagaaattttaaaaaatgagaatatatttcatttttaaacaatctattcattcccttctttaggaatagttcaactggatcctaattcccatcatccatacatattggaagtgcctaattctctatagaacaagaaaacattatggtcattttcccacttgagcaatatctcacactaacagttattaatggagtgagatagggaaactcaattaggataagaaggagatgatatctccagctagagagaaacatcaagaatagctaaattgggttaaacttttattctcatgtctctgagctataaagagctccactcgatatattttttctattcttagcttgagaaattacacttaatttcaatacctaatttagtttcatttcaaattttcattaaaatgctgcagattctcttcctctgttaatgcaaatagtaagtctggacccagaattatccccaccagcacctacttcctgccagacattcttttcaactatttaaatagacattttataacaaatcatttagtagaaatatatgatttatgtaggcagaacacagtgtttcgttaaaataaattagaaaagtttagaacttgggttcaaaccagagtaattactttgtcattaccttgcctatagttctttcatttccagttgtacattgattggttaattctctgttccattttctttgaagaatttacaatggtccgtaaaatagtctttgtctatcttctgcatgtatattctgtatccttcagttgaataccataccagaaccattttgaaaatgtaaaggggcacgtttaaaaattatcccaggataagaggcatacacagaaatgttcctagcatggtcagacatgcgagaccctaagaataacctcctacccacggctttgtgttttttgtttttatttctgtttttttttttttacacctttaaggcaagcatctggatcaagtaatttgctgcttattcatttcttgctctgtgtgtgtgtgtgtgagggaattttttttacctggtcaagtcaagttaaaagaaaaaaaaaaaaacctgtataaaaggtattcttcagaaagcatcaataggagggcaattgcagggttcagaaaaacaattaatgtaagaaggtgctacagattcaggcttgtgaagtcaggttatcttttaaagaattgtggcataaaaataaaataaacccttgggctggatggtagagaatcctgagaaattaagaactttaccaatagctgaaagttaaaaccctccacctctatcacccaaccctttaacactcaagataatctgaactaccatttgcagatctcactacagctcgagtcccagatagtgccacgtggactcgccactggacatgcagacggacagagggcacaggctcaaaacacaactccgccactttctctcaagctgtgactgggacacttacttcatttcttgtccttttccctaaataggagtcataatatcacctctggctcagagctgtggggtgggaatttatagtaacagcaacaacttgtaaaataaaactaatgattgttctcattccttgagggattactgtatgcgtgctctgtgctaagtacttggcatatattaacacatttagtccttacaacaaccttgtgaaataggtcatatttctttttagatttatgggtaatgaagatcattctcaaaaggttatgctaagttttccaaatccacctagacatgaactggtagaagcagaaatcatatccagtgtttttacactctgaagtccatgttctagctgtggatgagaaataatttaaaatcaaaagacagcattgcctgggttattatcaa

SEQ ID NO: 27785 - DNA, 1244 bp, Bovine  19866881179336
  misc_feature (1)..(1): n is a, c, g, or t
ntttccagtagtcatgtatggatgtgagagttggactatgaagaaagttaagcaccaaagaattgatgcttttgaactatggtgttggagaaaactcttgagagtcccttggcctgcaaggagatccaaccagtccatcctaaaggaagtcagtcctgaatattcattgaaagaattgatgctgaagctgaaactccaatatttgggccacctgattcaaagaaccaactgatttgaaaagatcctgatgctgagaaagagtgaatgcaggaggggaaggggaagacaggatgacatggttggatggcatcacaaactcaatggacatgagtttaagtaaactccgggagttggtgatagacagggaggcctggcatggtgcattccatggagtcacaaaggacaggactgagtaactgaactgaactgaactgaaacaaaagtatttatttataacactagttacataggacatatctaataaatatcatgatttaagttggtcatgacaaagcagaccctcagcactcacgtggacaaatcccagggttgtgagcccctggaaaataggaatggtgagctctttctctctgttacccccaaagcccccaaagactgtttttccttaattggattattatcaaatatatttcctatttctgttgtctttaaaataagtggccctaaatatatgccacatcttttctttacaactttgatgatgttgtacctaagccaaattcatatgtgaatcttctcatttcatccacataacaggcatgattcatgtgttgttacaactctcacttttttcattttgtatttattgctgttataagattctggagtatttatgcattttctaaaccaaaaactcagtataatatttgaacacagcttataaaagatgaaggaaaaattgatatttgaatggagaaaatgatcaaacagatgaaatcaacagctgcacaaccaagatggcaaatgcatttatcaaagtgtgctattactttaaactctgtcaccgcaagccccaaagaaatatgcaaaacataatacacgctagttctctacagatggatcgtaaaagctttcaggtgacactacctggctgtctaagaatgacttgcctaatcaaaagagacatcttctattagaattaatgactcagcacgtggattagagattctatttaaattctctcccctcttcttatccattcaagagacatctttaattttagg

SEQ ID NO: 27786 - DNA, 789 bp, Bovine  19866881279401
  misc_feature (1)..(1): n is a, c, g, or t
nttaaaaaaaaaagtccaatttttaatactcattctgtgcaaacaaagactcaggcaaaagattaagcgtgttcaagaagatgttaacaacacaaagaggaactgtattttaaacaagttggtgcccatccttcttgcctgctttgaccagatgatctggctggtaattagacacttattaggagccaagagtcattttagtgtattttccttcaaaacacagtgagaaaatgcatctttggtaactttattatcaaggccctgtagtcatgtatcaggagccaatggctgcatcttgaatccaattatgaccttgtgtttagatttaaatgagaccaggcttcagtcttccaagtttatccctaggaatatctcacactattagttcttcctttcaatctgcttattaactgcagttaagatcagggagttataatgattacacttcacaattctggtccagattgtcactctgtgcaggttatttaatctttgagagctacattgtcccacctgaaatgtggaaataatagttcaatttactttctaatgctggtgggagaacggaatcaaatatgtgtagaaaagatctagcgctgaacctgcacacatatgcataggagctcctcagtaagggctcgacctgcctggagtggacagccttttccttctccaggggatcttcccgacccagggactgaactccggcctcctgctttgcaggcagattcttttccagctgagccacaagggaagcccaaggatgttgataatatgctaataatagaa

SEQ ID NO: 27787 - DNA, 954 bp, Bovine  19866881289077
  misc_feature (1)..(1): n is a, c, g, or t
ntgatcttattcttagcatctccctgtgagatatacaggaaccaattttatcccttcttatcccattttacagataaggaaactgtgacccaaaacatttatgtgactatttaaatttggagtctggtgtggaatcctacagacctcgcatgaagcccagtgcacttttaaaagtacgttcttgatgacttatccaggtttacctggtggcgctagtggtgaagaatcacctgccaattataggagatgagggttcaatccctgagtcagaaagaccccctggagaaggcaatggcaacacattccagtattcttgcctagagaatcccacagacagaggaacctggcaggctacaatccatgggatcacaaagaatcagacacgacttagcaacaaaacaacaacatttatggaatcccaaagttgtgccagaaatatctgaaaatcctgtaagatgtgttctactgttacaactattttccatatttggaaactgagcacctgagtgtgctataatacgtcccaggtaaaaaaaaaaaaactagtaactggtaaatgacaagattcatataccaggaatatatgaaccagctttatcattttaaggaaggcctaccttctatgactttaacaatgaaattaaaaaaaaaaaaatccacatagagcaatagggaaacagaagggttaaagaatcacctttgtcctaaatgaaaaattttcctagcacatccaccaaaggcattcagggtgagatcttgttcttgagttatttcgatcatcaatctggagaattcttttgtgtctgtctgctcgatcagtggcagttccttgtgagaaatttacagtgatgtcagcttgtttaaattgatgatgggaaaaaggagatggatctcaagtttccagacagtatctgatgacctaaattaactgtccctgattctgcattatggatg

SEQ ID NO: 27788 - DNA, 1153 bp, Bovine  19866881318345
  misc_feature (1)..(1): n is a, c, g, or t
ncagtcctgtggccactgctgagttttccaaatttgctggcatagtgagtgcagcactttcacagcatcatttttcaggatttgaaatagttcaactggaattccatcacctccactagctttgttcgtagtgatgctttctaaggcccacttgacttcacattccaggatgtctggctagtgaccacaccatcgtgattatctgggtcgtgaagatctttttttacagttcttctgtgtattcttgccatctcttcttaatatcttctgcttctgttaggtccataccatttctgtcctttatcgagctcatctttgcatgaaatgttcttttggtatctatgattttcttgaagagatccctagtctttcccattctgttgttttcctctatttctttgcattgatcgctgaggaagactttttttttatctcttcttgctattctttggaactctgcattcagatgtttagcatttttcaaaagcagaccttcgccaaggacacgttgccagaattatctttcaggttgcatccttaaggactgtcactccagcagccctgtgacctacccccaaacactgaccctcatgtctgtccttatttgtctccttcttctacttgaatcccagggctcatcattcaagtcattctaacatgagctacttcaacacatttgcccttttcttccttcttcacaaaatcccaattctagataaaataaacctctgtgtgcttgttccaggatggctgaacatccctggggaaaaatcacacagcctagaagagtggttttgttttcattttgtgatttcgctattaacaggctctctgagttgcccagaatacatatcaccctactctcatcattctggtctcttgttcttcaagatggatgcttcataccttctcttttctcttcaactgccccattgcaattcccttcactctcagcagctgatagaactctatgctttgaaaaccaaagcgaagcacctcatttttggtacagctgggagaatgtctttaaggctaagttgcagtgttgcaatcatcctaaatagtttacgggatttgcccatcccctctcttattttacctggcctctgacagtatggctgtgtagagttctgccaaggacaattttgtctat

SEQ ID NO: 27789 - DNA, 878 bp, Bovine  19866881436091
  misc_feature (1)..(1): n is a, c, g, or t
ngactgtagcctgcctggttccctagtcctgggattctccagccaagaatactggagtgggtatctgtgttatatttagtcctgtcaatatacgtgggtgtcaaagtgtgtgtgtgtggtcaactctcaaatactgtcaaggtaaaatatttattaaagttatttttcataaaatgtatcttggcaagttaggagatctggtgatactgggcatagatttctccatggaaaatctcatcttgggtgtaactgtttccttttgacttggcttgcacttcccaggttaccacatcccctgtccaacattcccactcatttatggtaactgctagcccctatggcttctgaatctctagcagctgacataatctgtaggatccttttcgacttttaagatgctgtgagtctaaagcatcaggcgtgacctttattctccagaatgtattttcaatcaagaaaattattgggaaaataaagaaaccaaggactccttaatgttgtcttcatgattatctgccaagttattttgttgttcttctgtgtattttgtgataaagaatgcctgcatcatgtccccttgacatgattctattattcatgtcaatgtgacaggtatgaaaactgccactacaaaatcattacaagggattcctttatcacagccaaagctaagacgtctgctaattgttaatgctaataaaaggagctgctattacttggcttttaaaatataattacatgacaggaattctctgcttcattttctcacacagcccactgtaatcaccatataacaaaattagaaatggatgagacttaaaggaaagcaaatttagccacttaggagatgggaagtcccccagattaaaaaaaaaaga

SEQ ID NO: 27790 - DNA, 1520 bp, Bovine  19866881531224
  misc_feature (1)..(1): n is a, c, g, or t
nggaactcacagacaggttgggcaactggtctaaagttagagtacagcacgatgcaatctccctgaggccagcagatcatggactaagagcccgtgttggtcaagggagagccctggagtcagatatgtttgagttccagctccaacagtcactacctgttcaagctttggaaagacgctgtgcctcctgtttaagcctgcttcctccagcgtttagagaaaacaaaacatatcagaccaaaacacgttctttttgtgctccgtgatttgaagtaagtcacgcaaaccccctttaacttaacatcttccagtgacatgttgatgtaaagacttaatgaaataatgtattgcaaaatgaaataatacattgcagaagagcttagactaaagttgatgacaagtcggtgcaggttattactgttgtgactgtaggtgcaggcctgtcttttcatcacgcagcctgacagtggttaaccagttcagttcagtggtcagaatgctttatggggcagtaggtcctagttggttttagcatgctattccatgaccctctgcacttagcatagtttttgacacattgaaggcactgaataaataattatcaataagcaagtgataatatattttcttcattaccttgcaactgcataatttaaataaattgctttaaaactcccaatgataccctgaagacaatgtaccatttattctggttttcaagaccttgagtggtttcatattagcactgacaaatactcattacatttgtctgtcaaattatgagacatgaacaccatttcttggagggaaatgaaaacttctgaaaatatgaatatgcccaacttccaggttttctgaatgacagcaagaattttatgtcaggttctgcttattcatctgggacttttatgacatttttttgttcctaggggaaaggggcctgaaaaataccagattctctcaataccatacctccctatatttcttatgagtcctgcaagaaactaactgaagaaatacatcttattggaaaacaacttaatatataactttaatgctactccatggaaaggaaatatgtaaaagcactgctcatttgattttcttccaagaaatgtgggtcgagagataagatcaaatacaaactgatatgatgatgataatgatgataatgtatgaacagaaggactaatagggacttgtccatcttatgtgaaaagggtgatatgaagagtaaaagctgcagcaatagacagagaggaggactcagaaactgaaatcctaacttgaagacttgactctgttgttctaactcgctgagcccatagtaagtaaccttcagagtacttaatatgatgatagacaattatataattttatatatgtgaggatgttttgtgaattaaaacaatttgtgttatcacagtgctagtgggtgggagtggattcccccatgcttggtgaggtggttacttatttttgcagaattcactgcattattatattacacccctccagat

SEQ ID NO: 27791 - DNA, 786 bp, Bovine  19866881947072
  misc_feature (1)..(1): n is a, c, g, or t
nttgaattacaagtttcttaggaagattaaaagagatggcacacagggtctgtgtgcttacagaaagcacttagaatgtggagactattattaatcttatgcttgtgaccaacacctagtctgatataaagaaaacattcattttgaattaattaattgattaagtaacagattaatgctgaacaggtcggtccatagattaaacctctttccatgaagtagcaaactctctgtcagtactaggagaaagagtgggcacccatttgataagcatgtaacaaaatagtcatataccagaagatagtttgtgaaagtatagattcaattctgcccaaactttagtgtctatgattccataaactgcaaattaaattcagcatcatttgagattctttagaaaggtgattccatttgtctctgaagtaataaaacagtataatattgatataatttacacatcagcaagagggttatttataaacaatggcatatgcatgtagaaattgatgttctcatgtttgctgtttaaaaggattacgttaggagctatttctcaactgcttattttgctaagaaggtggttgcaaaactaatattctctgcttaattattgatggtgccctgatttgttttttcatagtccaagtgacaaaaattgatttagaaatataactggcaaagttgcatataaaacttatggtttaactcaagaggaaaaaaaaatgtagccaaatcttgttaaatctttcaaatttatttcctttctttaaaagggaggatataaga

SEQ ID NO: 27792 - DNA, 2944 bp, Bovine  19866880426032
  misc_feature (1)..(1): n is a, c, g, or t
natgcttccttgacatctcctagtcacctaattctaagtaggactgttccttttttcacagttaatcatttgggaaatgggtgtgccttctaaagttgctgaagtgcttgagattctgctgccccaattggaataaagaataataatatgcctgttgcagaattcttgggacagcaacacggctagttgtctcccctactttttgtgtaccattcttagtcataggatctctaactttcagatagacacatgtctactagaataatgactatattttccagcctctcctgcagctatgtgtgatcatgtgtttaaattctgactgatccaatgcaggtagaagattatatgcaatgtctaggacatgtacatagagggagaaggaggctatattcctgttgcttagaatacagccatgatgattgaagcttgagcagccattctgcatcagaaggcagaaaccatgtcctatcctaggacatagaccagaaaatgcttttcttttagagtcagataataagtactttcggctttgtgggcgatatattctctgtggcagctactcaactctgttgtagtacaaaagcaggccaaaacaatatgtaaatcaatatgcaaatgaatgagcatggctgtgttccaataaaactttatgtacaagaacaggcagtgggctgcaggtcacagtttgctaagatggaagagcagtgagttaaagggatcagggtccctaatgacatcatggcaccctttacctggctggtcatgaaccgccttctcctagacttatgcaagaaaaaagacaattgtgaagtgattgctttagaatttctgtcattataagccaaatctaattctaactaaaatagttgtttaagaaatgagtaaatgatacatgtaaaatagcccacataacattaaagacaaatgaatattgaataaagtgagtatttcataataataagcagggagctgtattttaaaaaaaaattttaacctctctccaaactgaggacctagtggccagcagatatcaagtccacctggaagacagggaaagagtctgcgccacagagagagtatatggattgaccctctgccctctgcgtgcacttcttattctgcacagggtcagggaatccactctcctctgttttatcaggctggtattcctttccagcctgctgagatgctgccaccaggatgacaataaaccactcagaggagaaaaagtgcaagactttattaaacgtcataaaaaagatgtgactgctgaggtccatgtaagctcactcgggtttgagcgcccaggcttggccgtaagtcaccctctggcaaccgaaaccacatgaagcatggtgttgaaaacttgctaaatcatttgtcactcaaaggcttttaaaataaaatactttaaaaaataatcatttgatttcagactctaaactgcgggctgcactgagagggatgtaaatactctgttcacaggcacattcaatagcagctgaaatcagggccagtcaaaagactttggctgtcaagcttcaaatcccaagctacacttctctcaaattccaaacttcttcctctttatgtgcctcaaatgaaattgttacatctgggcagaggcggagatctctaaacctgggggaaaatttcctggctactgagttttctgactctggattgaagtagacttaacattcattctatgttattccttttctgaacttcctaatgtttgtcaaggacatctgctctactctgactgtgtggattcaaatgctggcttcaccacttaccaaatgtgggccttcgggcaaacatgtaatttctcatctgcaaaacgggttacatgaagaattcattcattgatacatcatgaaaaaattatttctgagcacctactgggcaccaggtattgttcagtgtgcagggaataaagtggacaagtaccatgcatgtatcatacccagtgcaaaataattactcaaagattgttgatattatgcttttcatacacacacacacacacacacacacacacacaagactacattataggtgctggaaatccagaggaaaacgaaataaggcattcttcccatagcacttgcatatgagtggagaaggcaggcaaatatatatataatatatatataagatcctttcatatagctataaatgccatgaaaacaactagctggagttatatgataaagcgtaatcagtgataataggggtcatggtggtcaggggaacattgcctgaactcccatgggcagatctgggagagagcactccaggcagtgggatggactggtgcaaaggccttgaggccagaaagtccttgatgtgtttgaggaacagacagaagatccatgaagcaaagggaagagtggcgtaaagtatggttggagaggtgggaaagtcagtctctcattatacagaacttagaagctctggtaagtcttttggatattatccaaatgcaatgagatctcagtggaaggttttaaggattttcagtttaaaacccgatcctgatgaatgtatagacactagggtggaagcaggatgagcagcttggaggctgctgtggtccagctgggagatgatggactgagtgttcagaaatggacagtgggagggcaaacgtattaggtggaggaggtgagaaagaaggaagaggtgatgatgatttcaaggtccttcaggagaaggaccagatctggaaagacagtgagaagacactgggaagatgatttcccagtggggatagaaacaggggtctgataccctgcttcaggcttcagagtcatcaaccatggatagaagatgaagccaggggatagatgaggtcactctggtgattaggggagcaagagacagcagcctggaaactctccttcctgccttttccctcacaactgttttatcgcta

SEQ ID NO: 27793 - DNA, 1824 bp, Bovine  19866880538694
  misc_feature (1)..(1): n is a, c, g, or t
naaattatttcagcagagcttaatcaatggggattttaccaaagcctgactaatctgggggcgggggagggaaatactcagctccaggtcaatggaagactgacaccctaatcatgggatggaggaggcgtcccttcaaaggattttgtacaacaggggattcaactgaaagaactgaaagccttaactcctgtttaagaagtctctaggaaaagccagccactcagggacaaaaagaaggtcactggatactacaccacagatactgcacacagtaacacagcctaattcctagccagataaacaaaaaaatctcacactaaaaccctatttcctcagttcctgttacccagtacatcatgtccacctctcaacaaaaaattatggaatatgtcaaaaaagcaaaaaataccatcttaaaagaaaaagcaagcatcagaaccagactcagatatgagagagatgttggagttatcagactggctatttaaaataattacaattgatgtgctaaggacttgaatagaaaaagtaaacaacatgcaagaacatagggatgttataagcagagagatgggaagtctaagaaagaatgagaagaaacagacggaagtcagaaacactgtaacagatgaagaatgcctttgattggctcatcactagactggacatggctaaggaaagaatcactgaactttaagacatattgatggcagtctccccgaactgaaatgtgaaaagattgcaacagagtatctgggaactgtgggacaattataaatggtgtaagttgtgtgtaatggggataccaaaaggagaaggaaggagaaaaaggagggaaggcgggaaagagcaaaagagggtaggcaggagagaagaaggaacaaacagtagaaatatgtgaagaaataatgactgaaagagatgtttctaaaattaaagacagacacccaaccactggatctaggaagttcagagagcaagcactaagcaggataaatagcaaaaaatctattgttgagcgtatcatattcacctggaaaaaagtcaaagacaaaacgaaaatcttgaaagcaaccaaagagtgaggggaaaaaaaaaaccttaccctgtagagaagtgaggataagaatcacaccaggtatacggggtttcctcttaagaaacacatcagcaagaagaaagtggagtaaactatcataaatgttgaaagaaaaatccacagacttgaattctgtactcatgtaaaatatcatgtatgaaacgagacgccagtccaggttcgatgcacgatactggatgcttggggctagggcgctgggacgacccagagggatggtatggggatggaggagggaggagggttcaggatggggaacacatgtatacctgtggcggattcattttgatattggcaaaactaatacaattatgtaaagtttaaaaataaaataaaaaaaaagtgaaggggaaataaagactttcttagacaaacaaaaattgaagaaatttgtcaccggtagatctgcctggcaagaaatgacagaaatgctttacggagaaggaaaatggcacaggttggaaactcagatctacacaaagaaagaatattagagaatgaataaatgaaggtaaaataaaaccttcaacttttattattcctaattgatctaatagacaacaactgacttgcaataataatagcaaaaataaaattggtgattatagcttatggaggtatgaaatgaatgacagtgatgtcataagggacaaggaggagtaagtgggaatattagcacagcaccatgaaatagtacagtgtta

SEQ ID NO: 27794 - DNA, 3047 bp, Bovine  19866880584110
  misc_feature (1)..(1): n is a, c, g, or t
ntcttttagcatagtattgggtgtgtgtgtcaactgtatttcaataaaaaaggaaacggtgaattcttctgcagttatgtcagaataaattaacttgccagattataaaatttccctttctgctgacaaataattcattagaaaaaagttttcgcctgacatatatttgacaaacaaaatcgtaagtttatattgatttgatacatttatattgcaatatgattgccattttcatattagctaacacttctattgtgtcatgtaattataatttcttttagtttcagtaacaattaaaatctagttacttagaaagtttaatgtttataatatagttttattatctatttgaaaaataaagaagcagcccctgctcctaaggaggttttaatctacttaaaagcacactggtcctatggctgtggcttagctcagccactgctactctggattgctagcactggcagcagaaaacctgtgtgactcttggaatcactggatatatttattaccacaatatgtgattaggtaaaacaatttagaggcaaatcaacttatttctcctgtaaatatgtcaacacattttggtggtgggtttgtttgtgcagaggtttttgtggcccatttcctacctggtttcactgagctcactccttcgccaatactctccacaagtccagctccttcatggcctgggatgaagggatacttcagtgggattattccttttatagcatgatcgtcagaaccacagatccctgtagatatcatccgggtaagaattaaggggcaaggataaattagtttggaatttttcttctgtctgagacttattatgaataatttttttacatgaatgacctcatttgatccctataataatattcagagaaacacagggcaggtctgctgctaagtcgcttcagtcgtgtccgactctgtgcgaccccagagacggcagcccaccaggttcccccgtccctgggattctccaggcaagaacattggagtgggttgccgtttccttctccaatgcatgaaagtgaaaagtggaagtgaactcgttcagtcatgtctgactcctagcgaccccatggactgcagcccaccaggctcctctgtccattggatttgccaggcaagagtacctggagtgggttgccattgccttctaattacccctaatttaaagatgtggagaggaagactcaaagacttaaaatgactcacccactctcatgggggcatgttcagatctggaaataaactaggctttttgaaatctactctgtacaccttatgtcatcaactagttttgcaatacgagagtctgttctatccaatgaaggatttttgaccacgtatccatagcaccaccattgagaaacccaaaattttaaaccctgtattgtggaatgttttcccagtcctctgggaaaatagattttaaactagcatattgaaaacattaagttaataatataaaatgtgtttaactgttgcaaaatttaattggcattgagaagttttaaaccttctcagttaatagcctaagttttcttgtctgtggatagactcaatccacttacattgatcatagaagtgaaacatttcctgtaccatagcctctgtattactcctctgccaggaattcatccagaaagcatacaggcagggatactgactagttgtttcagtatcagtagtgggagtgcgggaacactgggaacagctttgatacatgaaataagatttccttacacttgccttcacaagttcaaagatttaaatttaccttaatacgaacttccccagcctttggtggctcaacctgcacttcctcaagtgaaagagaagagtttgttttccaggcaatggctgccaggcatgtgattgtctgttgatacaaggacaataagatgacatcatttagcgataacatttaacttctgatcatacaaatgacacttacttgctataatttgtaacaataagaaaatcacacacaaaaagaaaagagatcattgcaatttcagacataagctggtaaaattttagcatatttcttttgagtctcttaaaatatttttatacagtagagatcatgtcatataagcagttttgcattttagggttttttgtttgttttgttttagccagtgaaagccaccatatattgaacatttactgtttgcttcttctaaaatgttttctcgtgatttcaaaatgctttataattttaaatagctgttttatatttcatcatttgaatatatccaaatattcttaatcagcaactaaatcatttccattgttttgactattataatatatattgtttataattttgacttgcctggttcccttaagcaagaattactaggggaaggatagagacatggttagagtgaaactgatttctaagtaattctacagaaaatttgaatgattttgcacaactcctagaactgtaaaacagtatctgtcatcatttttcccactcattagcattgactgtactcattaaaaacaaagtgactgtcagaaaaagctatttctttttattagtattttttaattttaagaatgttgaaactttttatgtttatgtgagttatacatattttcttctttttgtggaatgtttggtcctatattttatgtaagtatccactggcatcttggtatttttttactatcatttgacctattggtgcattaaatgagtgactggttgtccactatcttgtcatacatgatttttccttcttgattttcgacctttaattttttatgaagctatatgtgcatatacacgactgagcaactgaactgaactgaacacacattaacattttgattcataaaagtatgttttcctttattatttagtccatttccatggtttgagaattctctccattgttgatgttgttcagtcactcagtcgtgtctggctctttgcgaccatgtgaacggcagtgcaccaggcttccctgtccttcactttctctccatataaagaccaaataaatatttgttaccct

SEQ ID NO: 27795 - DNA, 1564 bp, Bovine  19866880585027
  misc_feature (1)..(1): n is a, c, g, or t
natgctaactatatcctttttataaactggttactttagaaattggggtgctactcacaatatgtgtgggtgagaaaagtgtattgtgtaaattcagcaacactgctaaaaaaaagaaaacaatttaaaacagttttagtagccaactgaaaaagtgagctaacaatatgtacagtcccaatttaattaacataattactattgcataattatgtaactgcataattactatattgaaggttcaacattccatatctctaaataggggtagaatatatgcatttttatacatacttgcggagttctcgttgttcttcccattgtttctgtttcattagcttcttcatttgccgtttagatattggttgaaacctttcacttgatccgggcttctgattttgctctccatcttcacttaagtttttctgtctttcaacattacaagtctcactaaatgctggcaacatttcagatgacattatttgatgcctctgaaaaattgaaaagcaactctgacatgaacagatgatttacaaccaaaaaaaaaaagtaaaaaaaaaagaccaaaggatgcaattaaaatgaaaccatattagtaatgaaaaaagtgcaaatttaggcaatcaatcgtcatttagtggcaaagatcatttgatgaaatgggctattttcatacactattggcagcacagaacaattttcccagaagactactcagacctgtacgtttgaagagatttaaaatgttgatactctttcttacaataatttatttccttagaattcctgtaaattaattagaaatataaacaaaattaatagaaaagaatacatgtattactgctatttttaacaattaaaaattagaatatcaccaaatggggactaaatataaattacagttcacctataacactggattggaatactaagcagccaagaaaaatgtttctcaatattatttagtgataaagggaaataattatgttaaataagaaaatcaaaacaaaaaatgttcaattttctttatatatatatatgtgtatatatatatacacacacacacacacacacacacacacatatacacacatgttttaattctgacccacccatggctttctgcattttccaaattttatataatgaaaatatagttttataaaagaaaaacatattattttttttaaagatatggaaggcacatttttgtacttgtttttaatactgtcatacaggaaaagtgctaatttcactatctgggtggacactcaacaattgatttttgacacaaggtgtgctatacatttctaaattttggacagtacagaaaacaaattgagttgccccccaacatatttcattataaatatgtaattataaatttttcacttaagtcacagctgaaaaacaaaatatgtaaactgactctgtaatcagtttacataatatgtaaactgactctgtaactcagggccatctaaaacatcttatttagatttaaccacccactctggtagctcagttggcaaagaatctacctgcagtgtaggagacccaggtt

SEQ ID NO: 27796 - DNA, 922 bp, Bovine  19866880664356
  misc_feature (1)..(1): n is a, c, g, or t
naatctgtctacagcaatgcaatgtcttaatctgattaaaccgtcctcttttgactggcggaagtctcatatcttggacacagtaacctggtctatggtgatactttcaagaatcccagagacctcagctttgtctgtggttaagcttcatttagtcaaccttccctcattcagagccctttctcttgagttagttgatctaaagcgcagggcagaaactgatcaaatgtcaatttttaaaataaaaagagaatttacttagcattttaattgataaaaaagggcccaacaagatctagatatgtacatgcatgcataaaattttgatggaggtagatatattctccagcaagcacactgcacattcacagtgctgtttactgaagtctgctatatttagaaaaggcctgtctgatggagctgggctttgagaaaactgcttgatcctccctttcatcactacgtggtggagtggaccttggcaagccctgggtggggagaaatcaccacgagggctttcactgcacgaacctccactcttgtgaccaaacatagccctgttgcttcaggaaggtttgcataaaagggattgattttcatttgattctgcaaatggattcactgagtgagcctggcagaaaggaagagaataagaaggaaaaacaaaatcttaggcagttctggccagcttccaaatgcttcaagctgacagcacaactggtttaatctgcttctttgtagctgaagacatgcttcacctttcagaccagaaacttgggacttaatgagcgatcacctgaaattcttatctttttttcctggcaaaataacaaaaccaaaacacaaactattatgcttaaactattatacattaaattttttttaaattgtagtccctctcattcgattaaaaaattatttt

SEQ ID NO: 27797 - DNA, 1094 bp, Bovine  19866880669084
  misc_feature (1)..(1): n is a, c, g, or t
ntaggacatttggttgatttcaattagaacccacacgtcttctctacctcccacattctctcttcatctcagagcctcttctctctaccctcaagtgtggtttcagtatgactggggaatagacactaaaaatatttttggaatgacgtgacccactcttaccccatccaggaaagggacaaggctccacaagaaacagcacatgctttcctttcatttctggaagtcccggagtcgacctacagatgctgcttcttccctggtcgatggcattcagactcctagctgccgacagcgtcaggccaacaactggacagaacagcttggctgctggaagctggccacagtctcggccacagcagcagccccctggccacagaccacctctgccacccaacccaggagccttcctacctccctcaggttggcctgggccccgccacaggggctgaagaactgggaggtggtggcggcagtggcaagggtgcctgcagccttggggccagtccaggcacgtgggaccctgcttcaggctactctgcagcccctccagggccagggagggaccgaggacagtcccgtcgctcaccactgtctcctcctgtcgctgacacctaggcaagggctcagaatggaaggcacccctcctgaactgaatctgcaggccagatccaaggaggtgggggacggggcgagcggagctcaagatagccaggagctaaagcagcagctgcagccgcttcccaagccatcagcctcctccctgcgagaagcaaaatatgtggagatgtgcgcttcagctggagtccccagggacagtccccggaccatgagactcactcaggagcagcgccagggggatcagaggggcttgaagagtccccaggagaaagcccaagacgaagtcagcagtcaagagcgcgaagctctggcccccctgaagaattctgtcccctcggaactctccagatcccagctctccggtaccgatgagggcagcaaccccttctcttcctcctcttcctcctccccggtggacggagcagaagaaagtggcctgtccaagatggagggcaccaccacatccacagggg

SEQ ID NO: 27798 - DNA, 1249 bp, Bovine  19866880766832
  misc_feature (1)..(1): n is a, c, g, or t
nttatatgtaaattagcattgggcagacctctcaaaacctagggagttttataaactgatactccaaatgtagcaaaaacaattcatataaaaacagtgtcagtcaagtctccactaccattcacagccagcatcacagtttgtccattctctgtagcctttaacacttgggctcatgcttccttgtttaatacatagattcttaaaggtatctgattattaaagaaaccaagttcatcactattaaaaatatcatcgaggggagtctaactcatcaatttattttttaattacagagggaaccgtcttggcagcttctttctctgcacccgcagtttcccaaaatagctgaacacagtggtccctaaagccacttttgaaacttaacatcaaggacagtacttctgcagaattttgagccttttttcttaaggtcttcgcatattactatcctcttcacatattacatattctctttatctgtaatagtggactaaaaggagtaagaaaacaatcccacttgaatcaattattagttccacatttcactgacactcttcatttaccagtcacatattaaagctctgcattaaagaacttgtaacaaacacattatactagaagtgtcttgaaagcagttaactgaaaaccacaaaataggtttccagagattttaaatttaagttttaaatatgaaaaaaataagttaaagacaagtgaagaagatgcaagtcactatcagactcccaaaatcttgtttcttagttcacagcaacaaaagccacacatttcttaccattaacaatatcaccttcttgcaaaggccgtctgtctggaattccatggcaaatcacttcattcactgaagtacaacaagacttcgggaaattataataattcaggggtgaaggatagcaatttcttgcaatgcatgcctataataaattaaaaataaagtaatttggaatgtgcaaaagaaaaagctagtatgcatgcaattaatcagattttaaaatctgaaaaatgtggaaaaacctattgtacagatgttcctaatgaaaaacctatttaatattttactttagaaataatagtagatactacttttagtatcaaacagtagggtttctaacagtcagcaaaccagtttaccaataattgcaaaagaaaagcaaattcacgcattacaaatatttacaaacatatacaaatgtcactatatgaagatttattttagaattaccaactc

SEQ ID NO: 27799 - DNA, 1735 bp, Bovine  19866880769189
  misc_feature (1)..(1): n is a, c, g, or t
nccctagtacttttggtatctagcctgaaagctatttattgataaagtgaatgaattgaacattttattttatgtaagtccagtgttgtttttttttttgctttaaatctactcaacaaactactatttgttttctttttttccctactctataacattcacagagaaatggttcttctctctcttctctctctctcacatgtagaggcatgtatgttctgattgactctttttttttttaaagacaactcactgaacacattttatttacagttttgtacactgtcttaatatgagtgggattgcttttctacttgaggcaatttttaaagcaaaataacctaagtaatacaaagtgttaaagtacagcgtaaagatacaaaaacagacatactaattctaattaggaatgtaattatgatactatattttttataatacacaattaagtttaggaaatcacacaaacatagatcagtgatttgaatgaaaagcataaatttgtagcaaagcattgtagttacaaaaaaaattaccaaagaatgcacaaaactaatgtttattctacctttatgtcatattcctagattcttcaccaatgttacatgagaaagaaaaactaaaccaaaacacatgaaaaactgaaatcggaatcactaatgttatcaagtagggaagcaaataaaatctagcagccatcagcaagagtacaggacagataatgctgtaaaaagaaacaaagaaaattgccagaaaactatgcattatactctttcaaaccagcaaaatacgctccttcatataaaggaatgtaagcaaaatcattctcctgtaaggtatagaaatgcaagttctttttttaatattgtagatgggtcaaatgtttttgtaatggttaattctattaagctattacaaagtgggccaggaacacatgtatggattctggggatgatatgatgtgtactgtaattctttgattgggataatggacactctagctaaaaaaaaaaaagaaaatatgaatacagaagtacaagacaaaggctaatgaaacttccttttatcttagcaacatttagatggaactcaaatttaaatgcagtccattctgcttttgaagaggcattccttcagctcccaaatcttgattgcttgaggcagttgcctatgagaatactcagaaggtgtcttcttaaacaacaaacctatttttagtggtggagctgcttagtagctgtgtctgcatgggactgataaccagttactatttttggaggaagtcctaacttttccttgtataccctccctatatgtctaacagtttctctgttttcacattcagtagtccatattgctattttatcacctttcagttcagttcagtcatttagtcggtccgactcttttcaacaccatgaactgcagcacgccaggcctccctgatcatcactaccttgcagagtttactcaaactcgtgtccatgtcttatcaccgttagctctaatattaacaacaactccacatacatcatcactgtagtcatcaaaagattctccaataaggcacagcagtgtctctagccaaaaaacattcgaggtcacttcgtctctgctgtttgttcagtgtaattagccattgtcctcgtttgtttttctcatcttcccacataggctcaataccatccttaaaaagtgagtagtcacagccagtcattaaattactagataactg

SEQ ID NO: 27800 - DNA, 2429 bp, Bovine  19866880802820
  misc_feature (1)..(1): n is a, c, g, or t
nagttttggagatggatggtcgcaccacaatgtgaatgcacttaataccactgaactctaccactgaaaaatggttaagatgaggaatttctcggtttcctggtccagtggttaggactctgcttttgctgccgaggatgcaggtttgatccctagttggggatatctgaagttttcattatattctcaacatttaattttctagggatcataccttcccttcttcatgtgaattttttcttttaaaaaaatgtttctaagcatttcaatcagaagtactaatataccactgatagtcccttaatgctaatttttaaggtaaaggcattttaccaaacttaaaaaataggttgcaacctcattattgaaaagtatgatacaaaagaaaatagaacaaataggatggagcaatcctttatttttagacactctcacaaaggggtttttagtacgtagagtttccagcggagaagagagaacgtgagaatcagcctccagccactggcagctgctccgctcaggaccgaggttcctcctggcctgagtggtgaggtgggggtgtgtacttcccttccttgattagcttttcccgctgtctcctgatggcatgcagacgtttcatctgtcagaggaggaaaatatttaaactcggagggagatatgcaccagaaagtgagcactggagaagctgaatacaaaactggtttcatttttaaactatggaagcttttcatcctggagggcctctgagataaatcccatctttaaagaatcaatttctgctgtatgtatagtaatacctccttgaaaacggataactagtatgttcctattatatagaggaatataagcatttacaaaaataatagagatacagcagctttaagaggtatacttgtgcatactaaaatctttaaaaatatgaaaagctgtcatcacctcacagcatatgctggtgactgctcactaggtcagagaaggcaatggcgccccatgctagtactcttgcctggaaaaatcccatggacagaggagcctggtgggctgcagtccatggggtcgctaagagtcagacacgactgagcgacttcactttcacttctcactttcacgcattggagaaggaaatggcaacccactccagtgttcttgcctggagaatcccagggacgggggagcctggtgggctgccgtctatggggtggcacagagtcggacacgactgaagcgacttagcagcagcagctcactaggtatgaatgaagcagaaataggccaatgaggtctctgggccacactgaaaggcctgctatgtgctcagctcagccagtagtcgctcagacaggcagggccttgactgctgccttttcccctcagcaggacgttccctacggatgaaaatcaaggctatccaacactgtgcgagagccgcaattaacggattctgtgacatggaaaacagacttaccaatcctgaatgcactgttccttggctcaaaacccagtggctttcatcttagaggaaaagctgaatccttccctagaaggaaattacaagacccttctctctgacgttatgtctttttccttcctccagctctctctgctccagctcagagatccttccattcgctgcttcctcctccctcaaatgcacgtggttcactatctccaagtctctgctctcatgttttctatccttgagctctttcaggagcactccactgaagcacagagcaaccataccagtgcttcgcatccttctgtttattttccccactgcacgtaccaacacccgacacgctatttcttaccttgttcgtacattttctgtatcccacccccaacccttgccccaccagtgagttccattagggcagggacttttcgctgttttgcttactgctatattcccagtacctggaatagttcctgacataataggtgatctaaaaaatactttttgagtgaatgactaggttttcacaaaggcatgaagtggcagtatattcaattaaacatcccattaactttaaagaatgaggatgcaacttcagtagaaaaaaactttaggtattcccaatactaaacattaaccatttaaaaaactgtattcttaacatttctctagtaaagcatttcccaacataaaactagttatggttgaggcatcatacagcccgtatgtcaaatctctctcccagctagaaccaatcatgacttgggtgttctgaatacaagcacagggtctagaatcagcactgccaggttcaaatgctatttccacctcttactgggctatgtgaccttaggtaatggatttagtatttccttgcttcaatgttttaatcctacagtggggaaaataattctaaagtatctcataggagattattgcaagaaatatatgtactattacattctaagaa

SEQ ID NO: 27801 - DNA, 1594 bp, Bovine  19866880876375
  misc_feature (1)..(1): n is a, c, g, or t
naagggaaaccaagaaagtgtgatgtcctaaaaggcaagtaaaaaaagtgtttcaagaagtatggaaagaatcaactgtgcaaatgctgctgccagtgtgagtaagaggagaacttagaactggtcactgatacggtaatatagaggtcactggtcatattgtctctcacagtttcagtgatagagacctggcagtgagaaagaaatgctaaggagagatgggtgtttcttttgttttcgaggctgtggggaagaaatgaaagctaaattctcatcttccctgatgggaagtgaatagatgatatataactccattattttgattagatcaatattcagagtttaatttattatgactatgtaaactcttggagaaggaaatggtaacccactccagtattcttgcctggagaatcccatggatgggagaagcctggtaggctacagtctacggggtcgcgaagagtcggacacgactgagcgacttcacttcagttcacttcatgtaaactttatatgtagatgaaacaggtggtaaactatgattattttttctttgctgtgcaagtttttgcagaatgcaaaaggaattggtatctagtctacaagtggagaatttgaccctagaattagttttctaatgtacgttctactactgaaactctaaactctccaccactgtctaaatctcttttcaaaactttcataagggttagatagtcccacacattaacaaaattggttcatccattgaaataaaaaagaaggcagagtgcatgcctctatgtgaagttaagttggtagatttgttggaaggatcttgagaaagttattttctgattgcagctgttttctcagtggaataagaagcaagttcatcagtgagagtgagaaaggtcaaggggtgagaaatttaagaagagagaggaaagtgtgaaacagttgtggaggaaaccgggagagtaaatagacaagggaaatgaaatttggtttcccaggtatgctgggggccctcttgaggcttgtgatcaccagtttaaagtgatgcctctcagcatgccatgtgatttctttctaggcatgttcaagtgctcaaattttggaacagagtaggcagagcattagatcaggattgtattaataactttgccagacaagcacagcaaaaggcagaagggatgggagtggaggtgttatgcaagagaatggtgatcatgatgatgatgaaccatggatctaagctggataaggaaggaaatgcggatgtcaaggggtgactggaccatcaccatgtagtagagtggagggcatggacattctgggaaaggcaaagaattgttggagtgatgttgttaagggaatgaaatgacataaaatatttgaagataatttgaagttgttgggaatgacagtgtctagatataaccatgaatgaggtcggggggaaaagtggtgggatcctgcagtcgcttgatctgtagagcaaacaacagtgatgacatgtaaagaacactatactggtggtactaactccacctactttaatgaagaattttgttaggcttatcttaggagaagcaaggaacatagcaca

SEQ ID NO: 27802 - DNA, 1375 bp, Bovine  19866880886295
  misc_feature (1)..(1): n is a, c, g, or t
naccagacaagcagggacagccccagttgcccagagcccactattgggctaagccatttaaaccagtcaattctaggctgcataccctccttgcccattccttcccacagaaaccatgacaaaggctcttgtccactttcctccctggccccctcagcctctgaccctcatgcttccccatgtgccccatcctcttggaatctgtgagtgtaaggaacgatcttttcaatggcaattgtctcctgacccgtcagctcctccatacctggaaaataaaatccacagtttaaaaagtgaaagtgttagttgctcagtcttgtccgactctttgtgaccccatggactgtaggcttccaggctcctctgtccatgggattctccaggcaagaatactggagtgggttgccattcccctctccaggggatcttcacaacccaggggctgaacccaggtctcctgtattgcaggcagattctttaccacctgagtcaccagggaagctgcgtaagattgagggtaggaggataaggggatgacagaggatgagatggttggatgacatcaccaactcaatggaaataagtttgagcaattccaggagattgggaaggacaaagaaacctggcccactgcagtccatggggttgcaaagagtcatgacttagccactaaacagcaacagttttaaaagacatcatatggcgtacactcacagcctcaggggctttcttcagttcatcaagcatgctgaggcccttcctaccttgccattcctcctaccagagatgaccctgttgcttcagaaagaccttcccccagacctagccaacttctgcacatctaaatctcatctcaacgggatcttcctcagagaccttccgtgagccccagcctgggtcaagtccctttgccattattctcagggctctctgctttttcttcacggcactccacatagcatgtgttggattccctggtgattatacaattaaggtttggtttcctgcaaaagattgaaaacaccaacagagctgcagttatgcctgttttcctcactattgcatccttagggcattgcctggtacatgctatgtgttcagtatttgttgagtgaatgaatagatgaatcccttgaggcctcctagaaatgagacacggagtctttgaagagagcctaaagcccagcaaaagaaagttggaagagaggcagagaaacatattttattactgttaacatggcttcattttccccaggcaacatacagttggcagcataaggtgtcaaataaactgtggaatatcatacaaccattagaaatcatctttgtaatccaagtgtttcatacatatgtcatagtatattaaaaaaaaaaa

SEQ ID NO: 27803 - DNA, 1028 bp, Bovine  19866881022546
  misc_feature (1)..(1): n is a, c, g, or t
ntgacttgatctatatatatatcaaaaagattacataggaaagtcaggcattataaacaatgaaacgtcacccgatgtcttacaaaacagtatatgaaaaacagctcaaagaatgaatggagagtaagacttatggttgtaaggtagaaaaggcgtaaacattctagatttaattacctcttactgggagcttgattcacttttaaaatctaattttccacttgagttgtgtaaaattatgtgatactgaaaacctcctgtattataaatacaaataatttaggcaagagatgctttcttctcatctcaaacgtggaagaattataagccctttattagtgttggtcatttttaagagtaggaatgtcttaacatccctcgccatgcccacgaggataaatgaataaatgccggcaggtgtacgcctgccttgaattggaaaaacaggtattattactcaaacacctcccattccagaaacgctaaccccagaccccgccccacacaaaccccgcccctttctcccactgcgggtccggagttggcgcagtgggctgacgtaagacgtaacctccgtagccttctacgtgtagctaccggctctgcctctgggagttgaagtttccgaaagaggaccttctcgagtggtaaagaccactacaaaaagccttctgagaggttatcagatttcccgacaactcctctgttcggtaagtgtcttggcgcggaggcttgcgctcatctaccttttgatataatccgggagcaaaaggagcgcgtgccgatcccgccttccactagcaatagggcttccgggcaagaggtaagtgggataatggaaaatggtagcaaagacccagctccggaaggaagtgtcgtcagagagagcgcgccccttcggctcgccaaacagctttctgattcgtcggctgcaaattaaccccgcctctggaatgcgtccacgcatttgagacatggaggcgagagtcgggctcggctctggtcactagtataggacctcttgctgt

SEQ ID NO: 27804 - DNA, 787 bp, Bovine  19866881082397
  misc_feature (1)..(1): n is a, c, g, or t
ntctagagttctcttggacccagggtttaaaaacagaaagtgcacttattcacttatgatttaggggaataattcataatctttttggaaaataggcttgtttgaaaatccgatagcattagtgaagtccctcgttacccacacgtacaattttacagaccattttttcgattcactgatgcagtgaatataatccataaacctctcaggaattcacagatctatgttaaaaatacctagaaagactttaccaactcttccattcaaagctagatagtgaatttatgtgtccccaaagcaaaattcagagtttgaaatctagaaatatggaaacagtttctttaggctttggctactttgtttcttactgaaaaatattccatgaaaatgtttaaatgttttggttatctgttttatccctgtttggctaatagagtaagttcaaaggttcttttggaagcaatgacatcagagaatctgttatgatcatcatcggggcccttgtcaggaagttgtgtcagaaccaaggctgcaaactgaaagtaagtgcaaatccagtctaagtcactgtatatatagctccaaaccatcctgtttaacactcacatgctgtccacaactggtgttcctatttcccctcaccctactctattttcaccacctgcaacccactccagttttcttgcctggagaatcccagagacaggggagcctggtgggctgccgtctctggggtcgcacagagtggacacgactgaagcgacttagcagcagcagcagcagcagg

SEQ ID NO: 27805 - DNA, 780 bp, Bovine  19866881120698
  misc_feature (1)..(1): n is a, c, g, or t
nttttttcccatatatctagtggatttgagtaataattttcaaacaagtgtttcatggaggtgattcagaaattgtgcaaagattaagtttttttttccagtaaacaagtatcattgaaatatctatatactattattgccaatgagattttactggaaaagagttcactgctattcaatctgaaaataatgcaatagaaaactctcaatgacaagatgactttttaagacctaaaggaatgattttataatgcaggaatttcaggatgcatgagaactgaacaggatccatgaaaggtcccctgctgaatggaccccacagttatgccacttaaggtacttctgtccatgcagaggtcagacttcccaggatacccagctctgtgggcaccattctgcaggaggaagatttcataagcaaacagcctcttgtggcagaggtcactggctaaatcacatgctcaccaccccctgaggggagtatatctgtccatgcctttcccagaacatcagatgacacatatctactgaagaacatcttacaagaaaagaaataattctgcattaaatgttacatgtcagcagtgagctgcatcccaattccagaaaattaaaatgtgagagatgagtcatagaaattgaaaattgacagcagctttctttgctggagtccctgctgtgctatgagagaccagggaccatcttctgtggcatcttttctctgtactcaatcataaacccgagcctgggtcaggagctcacagccgctcataagtttca

SEQ ID NO: 27806 - DNA, 2190 bp, Bovine  19866881187751
  misc_feature (1)..(1): n is a, c, g, or t
naatctgaagagaagcaaaaaaatgggcacttgacatcactactaaacgattcctcactctgcaaggatctatttattgtattagcgctatctgacaggaagactgacaaagttcatttgtcttttctcttaagcacttcctccatttgccctcggccctgaagagtgttagttcctagagctgaaccagctctctgccacatcctgagtgctactctggctcttctcatccctggccagtgacttttcagtatcttctaacttgcaatttaggtctattctggagttccccctttctcaggatggtgctgctgctgctgctaagttgcttcagtcatgtccaactctgtgcgaccccatagacggcagcccacgaggctcccccgtccctgggattctccaggcaagaacactgaagtgagttgccatttccttctccaatgtggctatcctaaactcccaggggttatataaaatactgagtgggatccttaggggaggaaagtaggtcctctctgggatctttctatagcagccccacactaggtaacctgagttactttagttcttagtacactacccatgggtctcacttctgaaaatgctaaaagcccatctacatatgtgtttgcatcctgctgcccctcagcacgtggggctggtgatgcctccaagactgcagcagtgactgcctcccttcacgggcagcagcctcccacccccttctgctgcctggtccttcacttggactggagcagacctgctccttctctttcttctgaattaacttccttacctgaaaaatcttctggatccccttccatccccacaccagatggggtctctagtctcctcccgcttagctcttccatgtcactgtcctgctggctttcctccccacacacctcaaaacggggcaggagttgtctctagtcttggatccctcaaacatcaggaaacatttggtcacatcaccctccgcacagggctcatttcagcatataggggcacagttcaaggactttaggggcttccttgatggctcagtggagaagaatctacctgtatcgcaggagccacaggcgacatggattcagtccctaggttgagaagatgccctgaaggagggcacggcaactcactccagtatccttgcctggagaaatccatggacagaggagcctggtgggttacagtccctggggtcgcaaagagcccaacatgactgagcaagttggcactcacacgcgaggactttatgctacattttacacttctcctcaactgcgaactctcctccctctcttaggctcagagctgtttatcagggttagtggcagggctgatgaggtacctgctttacttataccctcttggtaaacctctccaggcttacaccagagtcctcggggtttgccctaaatgggtaaagttgcttttctctttgcctctctactctgtttcttgcaagtctccagaggagcaagtacaagccccacgtttctgagttagataggacagtagtccaggaacgaatattgatttctcattattattctgccacctataccttactcactagattttgctagtcagtaagtagcactgttaaatgttcaaataattactttttactcatgaacatagatcaacaaaggatcttttttcaaaaggaaaaggatccttagtagttcagggtgcagtcattgaggtcattttaactattctgacatcgtggcaggcataggatcgaggtccccaggccacaccaaagtaggacgcatgtgcacagtgcttggctgtggcccccctggtggagctgtagggcttgttgctttaataagccccgccaccactaagtcgttcagccatccaacccgatctggtctccctccaagtcttcttatcctcctcaccttgcaattgctctctgccaagctcagctacttccccaagcctttttcaaaggccctcttacatgtgcacccccctagtttttcacactgaggactacttcaaaggctggcagtcctgggaagggaggtctgacaataaaagaaatcccaactggagaaaggtttgctttggcagctgcctgattgttctgtaggtggggaggcgcctgctccaacctctgcagctcacttgccctcacagctcattacagatgttttcttttggtctggttcc

SEQ ID NO: 27807 - DNA, 1054 bp, Bovine  19866881370604
  misc_feature (1)..(1): n is a, c, g, or t
ntactgtaagttccctgaacatttcctggggttgtctataataaagtgtttctgggttgctgtttattaagcaggtaagatcccttttgaatcagctgcctcaccttcaaaccagttgttttgctatttcacatttgcattgaacagttatacctcagtgcagtaactcaatggttaattggccagaaagcaagttttcagcagtgactcagagtgaatattttattttgaacattttgttcttcatgagtgtaaatcaggtctagattggtacacagatagggggatggtgggactgtgatgtgataccacagtgcaggcgctgccacactctggtgaaattgtgttcccagagctattaattgacactcagaaagagttcagaattgattataaaaacaaacagacaaacaaaaacagttatgttttttctattaaaaatgagctttcattaaagatacagtgatgattgtcatagaagccttgttttgaagagaaaattgagaactgagattaacagcaaaaagaatccagagaaaagaaatatgtacatcatttgagtattcattggaagagtgccttattttacatccacaataaagagagttgacaattctcaaacttactttgtaaataccaatacaaatacactttctaaatagaagtgttttggtctgtaaaacaaaatttatctgcaactacaaattcaactgttttacactaattatcctaattgatggtatagaacatggctcaattagtttgacaaacagtggaaactagccattaaaatagtcaaaagtataaaatggccaagttacaccccttcccccacacatacaacacacacagcaacagtggtcactgagttcaaaggacttgattactcaagaataagagaatatagcttttttctggagaagattgtttattcttgattgtactgttattgacttgacttaggtcattaaaaaattgatatgaattccatatgactaactacaagttagttggatactctcttcaaaaataaacatttaaactgagttaaata

SEQ ID NO: 27808 - DNA, 1895 bp, Bovine  19866881490373
  misc_feature (1)..(1): n is a, c, g, or t
naaaagagagccaggtttgaaaggttcatttagatttatgacaagcccagacagcaattaaaaagcagacatcattttgccaacaaaggtctgtctagttaaagctatggttttaagtcccttgtactgcaaggagatcaaaccagtcaatcctaaaggaaatcaaccctgaattttcattggaaggactgatgctgaaattgaagctccaatactctttccacctgatgcaaagagccaacttactggaaaagagtctgatgctgggaaagattgagggcaggaggaaaaagggacaacagaggatgaaacagttggatgtcatcactgactcaatgggcatgaatttgagcaaagtccaggagatagtgaggagcagggaagcctggtgtgctgcagcacttggggccacaaagagtcagacacagcttagtcactgaacaacaatctttcatagataagtgtggtcctttcctccaggtataggaaaggtacctctcacgtgagagtcttacgatctactttggggaaaaatcagaaaatccttcctgcaccagccatttctcaaattccttagcttttttgggaatattgaaactcatcgataagaatgtggactcaagagccaggctggctggatttgaatccagtttcatctctttcattagttacattcttttgggaaagtgatgacctctttgtgcctcactttttctcatctgtaaagtaggattaataccgcttatcatatacagggttgtgtgaggatcaaatgagttaacatatgaatatgtgttattattgttaccagatgacttttgagatggacattcaggtatgagtaagattctgtggtgggggaggcatgtgagtggtggaagcagtatttaaaaaggatgtagatgggaaagtggctggtgcttagaaagctaaaagttttccagtttggtggggcggagggtacatgacagggataagagacacagaagctagaatatttggagactatcatataagatgcccagctgatgaatgtcttcctaaggagaatacagaatttctgaaggtttttgagcagggatataataagactagtgttctatttggggggaaaagtcatcttggcagtcactggtataaattgtcactgagaaaccttcttgctgaaaatttttttcttaaggagattctcatactggtaagcaagtacactgaccagctgacaaaatatgcctgtttatttagcagtcatatttctcagggtaaattaatataatctatggttcataaatcagttcactcaatgtattcatctattgacctgcttattactttaaaatgcatttccttcaagatggatctaagaccacttataaacatgtgcaatacagcagtaaataaatcagaaatgaacatcaaaaactatataggggaaacagaaaggcaattatctacgatcaggatctagaataaaatggtaaattcaactgatcattacattagctctagcttcctaaaagcccaggcataaagggaatctgaattgtgccgttcttaaggcctattaaaagaaattttattaggtttttaggtaagtcgagccttttcttcctggagtctaatagaaaattcacatatcttttgagtgaagagcaggttttaaatgatgaaaaagcagacttcatatagtcattctaatgacttcttggcatgaacaatccctcacacgccttataattcctctgaattgctggagaatattttctgaatttatacactcaaagacttgacaagaagcatcatgggtgtttgtcatacacagaaagatgctgaaggtagagtagcaatgggaaggatatgttttatatttcacaaaagatgaagtccagaaagtg

SEQ ID NO: 27809 - DNA, 2338 bp, Bovine  19866881660511
  misc_feature (1)..(1): n is a, c, g, or t
ntgtactctcaataaaatgcggagtacagccagaaagtataactgagatgtgccgtcttgggggaaattaaaactgggacatgaagtgaggctgcgcactatcaagccgccgggttaggatctcacagccagtgtccgtgaccagcagagtgtgctcgaactgggcagaccgcttcccgtctcttgtcaccgccgtccagccatccggccaggtttcatcctgccatccgccttaaacgaacaaacaccatctcttaattctaccactcagtcctttttctaagtacactctagggaagtgtacttgcccgtgcccctctatccttgggtagctcagaaaactaatcttacaattcattattaagattcctgtgtacacatcatctgtttaagctaaagccttcccaacttcattttggtctttagttcaatgaagcaataatatgtttaaattttacaacttcacgttttgtatacttctcaactactgaatgaagatgctgtttccaacaataaaggcactcagcttcctttttgtaaatgtactgattaccactcatcccaggattgcattaaagaatttagctctctcctgatataactttggcatctgactaaaccatagccagtgtatattgtgaaggaaataagataactttttatacttttatgataacatttaattcctgtgtaacttttaaatggcaggaacataaatggtgagaacagattatactgtgaaatttttgtaggccacacccctgtaaccagaaagagggcaaagagaaagaaacaggagtttaacaagagaatttaaaaattatgatgaggcagaatgggttagaaaggaaataacagtgaaagaagctgggagacgaaggaaaatgagaggagaaaatgggcgtgagatgtaaggcagggaagacagcagcagaattacaaggttctacaattccagacactactaaaaaagcatacagagatgttcctgtctccaaattagatgttaaaaaataatagtaatattctttattttgaatactctttaccaaacattagatcttactgcctcagacaaatcccagagtataaagtagtgagataacctacttctgcaacattaaatcccggtctaagaagaaaatatgaggcagcataaagaaagttaactcatgctttgtcaaccatctaacgatgagtgaatagatagttttcaatgtaatgaatgatcttttcacaaatggatttaagacattaatacttctttaattttactgttatctactaaaacagattctttactaaatgtcaagtcaaatatatctgactaccgttctgagaaaattcctcttcgaattaagacactttccactatggagctgagacttagcccagcttagttacactgaagtatatctggtataatttgatgattacctgaaccagctcaacacaatgttatttgcttactccaggaaacaccacttggaagtgaagaagtgaagtcgctcagtcatgtctgactgtttgcaacccccatggactgtaccctaccaggttcctccgtccatgggattttccaggcaagaatactggagtggattgccatttccttctccaggagactttcctgacccaggaactgaacctgggtctcccaaactgtaggcagacgattccaaaatacactttcctctccttgtccttgcctttctctgccatcatacttacttatcttgcaactgcttatgcggggtcatcattcttctggggagtgacaaaaacagtatcttacacttgtacagccctttaaaggtactctgcgttcatacaaaccatctcacttaattcttaccacagccccgggcattcagataaaagataaaggttgtaacttgcatcttacagaaaagggaactaaggatcaggttaagaaggcagcctctaaaacaacctccaatgcttcccttcagtgtggactgggtttagtgactcacttctaaggaagaaaacctggtagaagtgatggggtatctatcactctcaagattaggttataaaagactggaaggatcctgaggggactccattaacacaggggacaggacgcaagagccctacgactgccgcatccctctgcatcccctaatctcaacagacaactggtgaaggaggccccggttattactccgacagcctcagtgagagcgcgaatcgtgacacagatcacggctgtcatgcgcctgtcacagcgaccaacgactgcagggacataaaactgccagtgcaaagcatgtctgggctgggctttctccacagcagttgtctgatggcagca

SEQ ID NO: 27810 - DNA, 1205 bp, Bovine  19866881865325
  misc_feature (1)..(1): n is a, c, g, or t
ntgtttcccctatcttacaattttaagaaagtacacattcattaggcataatggaaaatatagaaaagtatatatatattaaaaaaaaacccatttgtcactgttctaccatcctaaggtaagtattgttcatatttggataagttacttccatacagaaacatacttttatatgcttctgttttgagttgtgtttgtttcttaaaaatttttaaaaattgtgtccttttcagttaacataatgtaatagcatttatctatgttaatacatatcttgacaaacaattttaaagggctgtacaattttctattagatgtaggctctaaaatttatttatctattatcaaatcattaggtatttaggttaatgtgaactttatcattaagtatgctactgtgaatatccttctgaatagaaaccattcttttaaaaaaaaaattatttatttggctgaaccaggtatatgtgctctttagttgcagcatgtgggatctagttccccgaccagggactgaatcccaggccccctgcatttggagtgtggagtcttaggcactggactaccagggaagtccctagaaaatattctaaattttgaattttagattatttatttaggctttcttctcagaagagaaatcagatttaaagatcttttataaaaaggccaccaccatcagaaatctatgagaatgctgtttcatgacacttttaccaacactgaatagtactgtacatatgacttcctgttaagcatggcagaataatcatttatttttccttctactcaaggcttccttaaaggggcagtaaaagaataaaatatatattaaaacccacaaggtcaaagaaaatgggaatgcaaacatgagatttggacaaaaggaagttgtgagtccaggagctgactgggagaataaagtgaaaatatgcacactcattcctggggttgaggcagtcagataaacacacctctttggcaggagacaggagaactattttcttgaatgatttaagatcaggaggaaaaaaccaccaaaataattacatttggagttcccagcattcagacagaaagttggagaagagaatgaatagaaaatatttttttaaatattaaaaattcttaatgaaaatattaagaatcatatgggacactgataagaaacaatatacatgtaactaaatttacttttaacatat

SEQ ID NO: 27811 - DNA, 1189 bp, Bovine  19866880557474
  misc_feature (1)..(1): n is a, c, g, or t
nttgctggtgctggagcagttcctggacgttctgcccagtcatatccagaactgggtgcagaagtatcatccacagaacgtcaaaagaggctgtggccctggtagaccgctttcacagagaatgtggtggaataagcaatgaggtgagcagaaagattccttatatgtacactgtgaaagagggtgaaagaggggtcaataactggagaatgagatggattaagtcactcttctgttgttcctttagaataactaagtgcaatctgaaatcacaggcttgcactgacagcttctcaggttggggagttcctgagagtcttttcctggccttagaaaaagaaatgcactttgccctctttagggccagggtgaattgaaggtggtgggcctggcctagcatggccaaggagacaggacttagcagccaagaaataaaaggcaagaaaatgctaggaagggaggaaaaaacctccaaatgcagggttttaaaggtcaaaggcaggagagtgtagcagccaaagtataaatcaaacctttctggggagactgcaaagaaagagaagaaatggaaagagaaaaggggaaaaaggatcagaaacaagatataagctcacagtaaaatggagaaaatcagaatgctgaggcgtggtgctctctgggctgggaacacacatcgcagggccaggataaaagcgtctccgtggcctgccttcatgctttgccttggctttgctggtgagtaggtaaccaggtctgccctggggagatggcagcctacttctccttgagagccccgccttgaggagcacaagtgtcttatacacctgaagtgtatggcggaaagttgaatccagctcttcccccattttttcctccgctgcatcccctttctccatgaaattgttccctggacgtgggaggattggaaaatccacctgacagaaaaccctcttttattcattttcttattctttagaggaaactagaaaatcaaagtccactaaagcaaggatccaagtctagaaagcaagagattggaggcagtgagagaacaggcagcctacccctaccctgctcttggcctgagctgtggctgtccaaggaggtgtggaggcaagcaagtcatagcttctctcattttaatctgattttcccagatcatgtgtacagttccttgtgagaaaatcat

SEQ ID NO: 27812 - DNA, 1825 bp, Bovine  19866880602904
  misc_feature (1)..(1): n is a, c, g, or t
ntcgcagctcctgctagccagcggggtggcgggcacgagccatgaggtgtctgtggtgctgtcgtcagtgctggcccccagccgcccctccacttcctgcggcagccgggcccggcttcctggtgggctttggggaggctcctgctccgcgtcgaggtcgatgatggaaaacggttcagaggacttggcactgacttccagaactttcttgtcttctaagggactgttcagaaatgactttgctttggtttgctccagctccagctcttcatctgaatccagtaacaggatcacctcgtcttctctgttcacactgcaggaagaggtctcaggcctggagctccggcggccaggtcctgaccgggttagatccatgggtggagatttttctgagaagatcaggacccctttacctctgcgttccagtgtggaactacattccttgtctttctggcctgggtcctcacacgataagggaaggcgcctggctctctttggcttcggtgatgagttctgggaggccatgctggaagctgtgccctgtaactggggtatcggtggggacaggtcactggggcaacgagggtggagacgtgtctggcgaggactccggccttgatggggctgcggtgggaagaagcgtgagcgtgaggggggtgcctgctggtagacagggggatggaagccctctacctccctttcttggatggtcctgtttccttcttcccaattgctcgtcacccgggagagttcagggtatccagcttgaggtgacgaaaaaggctgttgaatgttatcatcatcagctgagcacagaggggcgctttcctgcctctctgcccggccctgggtggggctggaggagcagggacgagccagtgctccctctggggcctctgctttctctcccccgttcaaagcccggttgctggggggcaggagtgtggactgtctcgtgtttccccatttggccggggtctcatctcttccttgcccggatgattccacctgctctgcattttctggctgttctttatcctgttcacttgtgaggatttcccccaaaactggaccgtcctccccgagcaggtcggcttctccctctggctctggagctttctccccctggagcagctttcgctgagtagccgcgaattcataaatttcttccatctcctcctcgttgaccttttctctgtcttcttcgtggccctcaggcatcagcaggtcctttgctccctccccctcacccagccacacaaagtgcaggagctctcggaaagtctccactctgctgtcagcgttgtcttcctgctcctttccctgtccaccttctgcatccatcacaaagggcacttgttcgcacaggtcaacaagctcactcaccccaaacctgcaacaggaaagccatgcgtcaccaccccctgcgcagaggcagcgccctggctcaggaggcttggggcaggagtcctcccaggcgggacggccatgactctccccggcccttccccactcccctgcagagacagtgcccacgtccatgcccatcaatgccccaggccactcagctctagaaacagcgtttggggagggcccgctagccccgctgtgcagcctgagcgtgggctgagaggggaccgcggggctgggtggttctatgaccggacccaaagcaccgggacacacacacggggacgcccaggccagtttgggttagcccggacacgtgcgccggcctgcctggtgctctgccatctcatcggcacctcggagacgccgggggccaagcccgcccttcccaggttccagcccaaaggtggaagca

SEQ ID NO: 27813 - DNA, 2467 bp, Bovine  19866880619442
  misc_feature (1)..(1): n is a, c, g, or t
natgttctcttacccttccttagtttcctttaaaacatttatcacttcctgacatttgtttgtctgttgatgttagagtgtctgactctgcatgagatgataagctctgtggtagccggggatttggcttattctccactatgtccctggtacatagagggtgcctggtgcaccataaccactcagtacgtatttatggaatgactgagtaatgaatactttccatacttggcagtacaatttggagtaagttcactaagtaattcttgcctgtttctgccacctggatgtgaaccagtgagctatgggagtggtagaaatcttttctagtccagtgtttggtgcttgagaactaaataaaaagttagtataatgatggcatgtatcatttgtgcatgatacatgcccatggaccttcacatcgactcacctaaacctggtcttatccagtataagtcttcctgaagacgtaatagcaccagtctatgtttcctgcaggctctggagtttggttactccttagttgaatatggagaagtggtgtcagaagatgtggaatttgcactggattcctgtcgatctagcttaggttcctttctcagtctttgcttttcatgcccagtcacaaatgcagtatagtgtaaacttaatattggatatgagagtatccatttaaccattcaggataacaaacggttaaagtatcttttgcttttcctgaagtagtctaaaattagtgaaccatttattagttctagtcgttgacctcagttttttatttcacagcattatttgtgctccccaaacctaaagtgatctatttagagcaaggggaagagccatatattcaaggatctccaatgttcaaagacaatcctggagagctgctttcaggtaaataataccatgggaagaggagaaatgtgcctagattaggaacctttccaagggcttaacattttaagattctacttccctatatatatattttaaaatcagtgaatgttgtgctttttttctattcccatagttatcttgctctgacatacagtagactgattcttatgtttattccaacagagataaaactgaaaaatgacatggaaaatcatcaactcatgtgtctttctgacttagaaatacaagcaccaggagacatagtatcaaaaaaagccagtgtgaatgttcatcagaaaacaacaggcaaagaaaatcatggtgatgtgcataggctggggaaatggcaccaagattttccagtgaaggaaagaaataaactttccaactggtgggaggaagagctgctgaaacttatggagcttcataagaaagaacgtgcaacagagaagccttttaaatgtcaggaatgtgggaaaagcttcagagttagttctgaccttattaagcaccaaagaattcacactgaggagaaaccgtataaatgtcagcagtgtgataagaggtttagatggaggtcagatcttaataagcacttaaccacacaccaaggagtaaaaccgtataaatgctcctggtgtgggaaaagcttcagtcaaaattcacatctccacacacatcaaagaattcacacaggagagaagccctttacatgtcatgaatgtggaaaaaaattcagtcaaaattcccaccttattaaacaccggagaacccatctataacacatgcaagcatcagtgaatgctcaagactttgacaccaggattgacaccaatgaagaaaagcttatccagtgttcttagtctaaaaaatttaccaaccagagtttaaccctaaagtttatgaaaaatttcaaaattaagaagcatgaagaattttttaccagtggaaaatttggtgatataaacatcatgtttcacagaaagaagttagggttgactgtgagaggaaacagtagtagttagttgtactacttactgtttttacttagaactatcactgaattccttaggaaaataggtgttctctaagaacccgagtaagggaaaaagcttttgggattgtagctgacagaatagcaataccagcttcaaatagcagatgcagtcatgatcaccagtcttctgtggtcacagaggtaaatattgtttttcattgatcttccagccactgttaagcacatatgatggaaacatttgtagcatagttttccaaaataaaaagcagtaatatacgtgtttgattacatacattgtctttcaggtagccgacttagcagtttcaatagtcttttgggacggaaatgaattttaacatgaagttttccagaaaccaagttgagttttcttactcttgtcattggacagtgtttgcaaaattgacatggttttgacttcctttatgaatctttatttctatacctctggaatcctttcagcacaatttttactgtgagaaataatttactttagtggggagaatctgccagggaactatgcaccatcttacc

SEQ ID NO: 27814 - DNA, 1829 bp, Bovine  19866880653179
  misc_feature (1)..(1): n is a, c, g, or t
ntggtcttgtgctgcaccccacagcccctttggtcttacactgaagttacttatgaagacgtccacacttggggggtgtctcagttgtcctctaccccagccaacatccactctgctgtctccacagaagtcaaggaatttgccattgttgccctgcactcggccccatcggacgcagtggctgagattaattctctctacgatgtctacctggatgtccagcagaagtggcacttgaacgtgagccctccccgctgcccccgccttgggctctgggggcctccatcgtgcatcgtgccctgggccaacccatggctgtctcctggcaggatgtcatgttgatgggcgatttcaatgctgactgcagctacgtgacctcctcgcagtggtcatccatccgcctgcgtacgagctccaccttccagtggctgattcctgacagtgccgacaccacggctacgtccacgaactgcgcctatgacaggtgagcggggtgcctctgcgactagcttcagaagtgcttcccaagaccggacactcaccctcctgacttaggaaaggcatttcttagttttgggttggagcacatttagggagaatacgacactggcagataatggaggttggtcagcggtgtgcagtttggggcaacattgagccggggcccaaccaactccacagtggcatttaagcgtggttggtgttgtgtgacaagtgcagattgtcacaccctgggctcttgtgtctgctactgtaggatcgtggtcgcagggtctctgctccagagttctgtggttcctggctcggccgctccctttgacttccaagctgcatacagactgagcaatgagatggtaagtatctttcctggacacactgctttttttgttgacttgagaaaaccaatggctctgggccagtcctgacccacctcaggcgcacgaccatagacgactaggtgtctggggtccctgcgctcactgctgtcttcccacaggccctggccatcagtgaccattacccggtggaggtgacgctgacataagtcccttctggggtccggaacctctgccccacgctgggagctgaagacaacaactgacccgtcacagttaagagcggagggcggagcttaaggaacccagtgccgttcgtccccgtgtgccctcaaccaccccacagcagctggaatttgaggagagggatggaaggtaggcttttcctcacctggcccacttccattgtaagtgtggcggtcgtgtcaccagagcaccccactttctcagtctggaaagaaagtctaaaactaagaaatgccttttaatttaaataaagctcaaaagggggtgttgtcattcacgcacccagtcgttcccgtgtgtgtccctactccctagtgactggctgcaggccgccttgccccacggttgcgtctgtccccttgtctgcggccatcagtgtcgctccagggccttgacaagcagctggttcaggcgtccaaccatgggtcgagggtcgtcgatgagtcccgctgtgatcatggcgttctcgtagatctgaaaggcagggcagcaccttgtcagtgggagggggagcaaggcctgggtccaacccagggacctcaaatgcaaagagaagaagggaagagagttgttctgtttaaaacagggttttagaggaaacctcaaagcctcagcctgctcttcacccgctccagcagcctcacctgatccaccagcagctgggccaggtcaggctcgctgtctctcagctgactgagcttctgatcagaacgtgtctgcaacacggaaaccacacgtagctcagag

SEQ ID NO: 27815 - DNA, 574 bp, Bovine  19866880713469
  misc_feature (1)..(1): n is a, c, g, or t
ngggctgtggggtgcagcacaagaccagcgtgtccggggtgggcgcactcactggtggagggggatgagaacttgaccacagcgggctcccggctgaagctgtcgttcccgcaggactcgcagccgtcgtcgtactggtaggtgtccagcacggacaccttgttgggtctgcagaaggccaggccggagggtggtcagcctgggctcaggcaccacgcagacccactggcacagagctcccaccaaggcctcctgcctctgcatgggctgaggcctcaaggggcacagcccagctcagacccctgctctgggggccccagttcttgccctcaaacctgaggggagggcccacgggctctaggcgacattgcagcctcccgtgtgctcgtgaggcggaagcctgcaatgttacctgaacagaaagaggtagcgctccttgtagctgttgcggcccagcggctcactgaccacatagtggtaggtgtttgggtcatccctggattgaggagacaaaggttccagtcagaagttggtggtatggcaagtcccagggacctacccaacacctgtgtcc

SEQ ID NO: 27816 - DNA, 1129 bp, Bovine  19866880722200
  misc_feature (1)..(1): n is a, c, g, or t
ntgaaggcaaccgtggcttcagttggcacacagaccccactaggaagccaccagccctcacccccgagagagaaaggatataagatagtccaaggggggtggccgccgttgatgtagaggacgtaggtaaagccatctttgaggaccccgcggatagagtagtagtaagggagatagtggtgctgcttgaagtctctgttctcgtagaagcttatggctgtgttgttggtggtaaggacgtgcaggtagatggctttgcagtggtcctgggcagtggttgatatgtgatcctttagactctcaagtaacagggaccctgaggggtgacaggaaaggggcggtggggggaagggagcgtgaggcaaaggctgatcttgcaaaaccacccattgccggagtccctaacgtccgaacccttggtggggcttgtcagctgaggctcgaacgtcccggacgaggatgtaagccagccacagtccctcccaagggctggacctacagtgaaactcactgcccttttagcccaggaaaacatggagtggaagggactggttacgagggaagatcccgacgctcgctggccgcgtgggacaggagtttggagctgtgtgggcggcagggcccccaagggtggcaggcatccgataaaccatggttgggactgttccttcaattacgcacgagaggcacggtcagaagggccgttctctgatgaggatgcccagcaggggttattcatctgatctcaccagatctgggaaggaggccacagcagaaagacccagcgaaacgtggaaagaagacaggctgaaggctgagagtgggtggggccggcagacttgtcgggggcagggaacgaaggaagggtgcgagtctggccccaacagagggccgaaggatacagcaagacagagaccgagcaggtcttctgagatagtcggcagggagcaggggcgagctggggggacttacaggccccccttacctatcccgtgcttcctgaactccttcaccactcccaggctgaggatgtacgcgacctgtgtgtccacggagaagctggaggccagaatatctccgtcctagagagaaagtcagagaccgccgggtcagcagtggaggccccggt

SEQ ID NO: 27817 - DNA, 676 bp, Bovine  19866880832988
  misc_feature (1)..(1): n is a, c, g, or t
natctttctcctcacccccattccttgtttggccagtttcctttttcaagtgttctaccaggaccacagcctcctcgatgctctgtggatgttgcttctttatgagagtctgggtgtccccgggcagaatggtcaggaactgctctagcaccacaagttccaagatctgctcttttgaatgaatctctggcctcagccactgacggcataattcttgaagctggtcaactacctcccggggtccagctgcttcatgatagaggaagttccggaagtgctggtgagacctctcaggactgagactgtccgtctgtggggcatgtttcttatgctgactggcgttctctgccacaggtcctttggtctcccaaagagctctgatctgagggttcgagaactcagccaccttcagatctactgtcatcattcttctccaggaacaattctgctcctgtattagacaccccaccagcggctacctctgacaactgaagcccgatctggttttgaataaaaccaataaaaggatcttcttcctaaggcactgagagcagaaacaagctcacgtcagtaagatattgtcacatgaactttattacttgctacttattatgagaaaaatgacctttaaaaatcaactgccaggcctgtgttttgctccttttctattaaccaa

SEQ ID NO: 27818 - DNA, 777 bp, Bovine  19866880837455
  misc_feature (1)..(1): n is a, c, g, or t
natcccccatccatgggcctaccattgccacggggcttcagcgggcattctggcgtcctgttggggggctgcggggcctgggggccctgaccgcctttcccggccagcaggtccaccagggctttcacctgctcggctggggagctggcggtgtggccctggccagtctccccacccgggcgcaattcctgcttcctcatggagtcggggactgcggccaggggctgtggagagaggcctgggcctgctgcctctgtcgtcccgcccagtggcctgggacaggtgaccgagcctcagggcccaggtgggatgaaggcccactctctccctccccggatggcgggcggctggccctcggtctggcctccaggacgggtttgggggggcgtggtttgttcctgggtggccacagtgggccctgctgccaggagcatcgccaggggcagggagccccgggctggaatctgagctttgccgcttaccgtctgtgcgacactggacgggccgcctgagctctctgtgccgtggtgtcctcatttgtaacctggaaacggggctaattaggaacaggtccaccggcgagaagggaagggtggaagaggcccacggagagaggctgcgtgcagtacagttccagccccatggccttctggaaacggcagagccacggagatagtgagcggacagtggccggcagggctctggggaggatgaactggtggagcgcagaggattgccgaggcacggaagcgactctgtgatactgcaatggtgtgt

SEQ ID NO: 27819 - DNA, 1203 bp, Bovine  19866880837787
  misc_feature (1)..(1): n is a, c, g, or t
naagatttaatgaaggaggtccttccaaaaaactcccccccattaataaagaaatatttagacttccctaatggtccattggttaagattctgagctcccactgcagggggtgtgggttcaacccctggtcaggggactaagatcccaaatgctatacagcacaacccaaaaaagaaagaaatattgactgttaccatctcacctggggaagcttgtgctgttgccatcaagtgtgcttcacctttgaggaactggccagggctcctctttattataaggtttggaaaggcttggaaggataggtaggtcctgagcaggtgaggagcagagtgttcatgacctcagctttctttgcaggaaggatgttttttggaggggggggcagggttggccagaaatggttacttacagtagcctccatggccattgggatcagattccctgagagccttattagagacaagcagaaaataattgtcccacctgtttcctggtccctatgagcccaacaatgaaaacaaagtatatgatctaacttcaggatcagaacttggagataaagcagtctgggtggagaggagttccagagaaaatcctttgaaatctccaatttcatcaccttgctaaactgggcttgtgcttatgtatttgacaattcagctattaaaaggtctttttcttagctcagaaagtggggttattgcagtgttatctgaatgagcctcttctttgtagagctagtgatgtatttgcggatagggaagctggagtgggggagagttgtgcttcttcctgtaaagcatctgatgtaaaggatcagcctggagggagagatgtagcagacagcacagcatctcccgattgagaaactccaggctcccagagcagacttctgtggggatgtcttcccagcacacagtgggtcacccttttctggggatggtcatcaatccatactcacaggagtgtgggctccagcagcccaatttagaacccaccatctcctcccagtgaggatttgtgatggatttggaactttgcactgatgctgaggacctgtgggttattcccagtatgacttggtctggatggggaaatccagaagcttgcaactctctcttgtctgcctcatagatggagaaggaacaatctatgcagaaaagcaaaaaaaaaaaaaaaaaaaaaaagcacagaaacaacaa

SEQ ID NO: 27820 - DNA, 982 bp, Bovine  19866880852301
  misc_feature (1)..(1): n is a, c, g, or t
natcgatgagaagacagacacggaggagacagccgtgtgacctcagaggcagagcctgggtctgcaagccaaggactgccggcagacaccgcaggctgggaaggccaggaatgacccaaggactgtccctacaggtttcccagggagcacggccctgctgacgacgtcctcttagactccagtctccacaaccgggagagaagaggtttctgtcgtttgaagccgcctgggttgtggtccttggtgacagcagccccaggacgggacacagaggggcatgggggcgggaggagcccgcccggtcctcactgtaccctcctcctgcacaccctgcccctgcccctagcgcccacctcaagctccggcagtagagcagctggggcagcaggctctggaggacgccggggctgaggcacaggggcaggggcgcctcccaggcgcagacgtcggacacctgcaggaggtaggccagggcggcgcggtgtggggggctggtcagcctggccaggcccccgctggccacggcctcctccacgctgcgggccagcttcggtgtgctgcagctcgcgcaggcagtgaaggacattgatggcccgggcgcagactgccacgtcggggcgcagacagccctgcaggagctcggccacctgggcctggtagccctggtgctcgccctgggtcagcagggagcccggccagcagtgcgttgacccttcggggacaagaggcctgagaggaatcgcaggaagacgtcgagcccgcccgtcctcagcctgcatggcccgctgggccgcactccggaagtgtgtgaggaagcccagccggggccaggacacgccaccctcggtgaaaaggtcgaagatggccctcttggaggcgctgcagtagtacgcggccgccaggaactcctgcagggacaggtgagtgaaagcagtaggcggccgcggaggccatcgtctcctcccgctgcaggaagcggccg

SEQ ID NO: 27821 - DNA, 863 bp, Bovine  19866880887937
  misc_feature (1)..(1): n is a, c, g, or t
ntagaaaagatattgtctgatgtctgagtagaaattttaatgaaatgcaaagcattaacgattgtactggatggttgtattcaagataaatgctgtcttaatctttgagaagtaatgaatgctgcaggtattgtccttccggtcagaagactagaaatctgcagggtggctctgattgctctgcaccgtcagatcttctcagtgggttggaattggtcaggccttggcgatctttttattaggttgaatcctatagaactgccaacgtttggtcatctggcttagagaaacaatagtttcatatggttcaacctaatataataacggcttttcctgcacttgtatgtattgtagtgtgataaattgccgatgaattaaaagaacctcaccagctgcattctcactgcggcctaaactatcactcagcttcacccttagtttgaaaaaatagttaatgaacatgaattggaactctgaaagcttattaaaatgtttgtgttaatttgttttattttagcctcagatgcaaacatcagtgggaattgtacccacccaggcgattgcaacgggccccaccgcagatcccgaaaaacgcaaactgatacagcagcagctggtcctactgcttcacgctcataaatgccagaggcgagaacaagccaatggagaggtccgggcctgcgcactcccacattgtcggaccatgaaaaacgtcttgaatcacatgacgcattgtcaggctgggaaggcttgtcaaggtaagtgccgtttgctcaggtcctggtggcagagccaggggtggacttgtctggtattctctggcacctctcctgttgagaaggttcccacttcccacgtcccca

SEQ ID NO: 27822 - DNA, 1204 bp, Bovine  19866880925569
  misc_feature (1)..(1): n is a, c, g, or t
nactgtcccgtactgacatgataggtgcagatgcccccgtgacggttagtggccagtgccggggcagggccgcgtggactcttctcactgggcacagttgtcagtgataagcagcttagagggccgtgagcataaggaagacagtgcaggctggcggaggactcagacaggaagttcagttgcacttggtttggggtctctgaatggaatgcaggtaaagaagcagatttggagagaaaagattctgagtggtgagttcagcttcccatggtgttggggtcctgggggcccatagctgaagagtggggccttgagctctggagagaggtcagattggcagagagtcatagacgatacttgtaggaggtgacggcaggagtgttgctgcataggagaccacgtcataatgaaactttgagaactagtccataagccatatctagagctgggaattggttttgagaattcctcttctaaaaaaaatttttttttcgtttcattgtttcttataggaactgagaacagaagcagttgccagacctctggaaataaatgagactgaaaaagtgatgagaattgcaataaaagatattctggtaagattacttgtatttaaagtttttgtgcctagaactggaaaatagtgagttcctggttttacaggacagaacaagctgggcctcataacaaagattgaacgtgttagtggggaagtgaaaaatttagagcatgttctggaatagctaggtgatttactgttatcttccccttgttattgttttcgtgttactaaaattttgtcagttttattaatttaataattctcttaaaattttcagtaaatactgttttatggactcttcacaacttatttaaccatttcctcactgttgggcatctagattatttctaggttatcttaattctaaacactgaataaatagaatgatcatcatcctttactaatcatccatggttagttattataagctcattgcatctgaatcattcatttggaaggcagatagtgacagaaactcagactacttgggcttgaaccctgccctgtgtgacgtcaggcaggtttcttaacctttctgtgccttactttcctcatccataaaacagtccctgccatgtggggtcctcatgggcattcattatgacagtctgtcatacagagactcggtacatagtaggtatt

SEQ ID NO: 27823 - DNA, 1502 bp, Bovine  19866880946405
  misc_feature (1)..(1): n is a, c, g, or t
nagaagctttccccgggctgcgtgctcagtcgtcctcaccatcctcacggcagagccttgtggcggcggctctgctgtgagcgctttgggccagtgagctcctctgaagcctcggtggcctgtggagtgccccctgaacatgttcagggtgaacacagggcctcagggctgcacaggactgtgtcctcaggctgcccctcctctgctcaccccgccgctgccagagcccctcattgtgggaggcgtgccagccttacacccccacacacctcctcttgcagagtgcatttgacttgacattggggttttcagagagacccagggggcctggaattgatataatttgtgcttagatcagtgtctcctaaactggtgtcttgggagctctcgtctatggggtgtaagtatgtctcggggaaaacacgttctatagttagataagtattctgactggaggaggcaatgataggaacagattggttctttctgcatgctgaaaacctgttaatgaagtttctgtttttgatatcttccttctagattgcagatttaaaagcagcaaggcagcttgcttctgaaatcacttccaaaggagcgtctctgtatgacttgctgggcaaggaggtggagctgagggtgagtggtgttcagatacctccgttacctccctaattacctcctcagctgagcagacttccagggtttcttttccaattagcttttttcctgttctcttggtttcattaaacagtacctgataaaatgagatacattgcaggaaagtacaatccatgagctgcagttcctcctcctggtgggctcgcgtctgtttctgatgcctttggcatctggttcaggaatggcaaacgtgtgccgtgttgcctcagctctccctcttgttcctgtagcagactttattgatcacaatgctttcgccccggtgccctcagcctcggcgtgcttcccaacaaaacgctcctccagcctgtggctcccgaatctcgttgcccagtggaatcacctggggatctttacaaactgctggtttctggcttccatgctgatgtcactggtacggaatgtgacttgggcatcaggagttttaagtctcctgggtggttctaacacttaatcagtttgggagccagttactaatctaggcagtcagttgaagttgatgttacgattgaaatttatttgcagtctttattttagcccctgtcagtcaaggtggatgctctgtcctctgtgtttaaggagctgttgaagagtgggttcctaaaacgcccttgaagctcctatagagcttttaaatcacccgacatccaggtcgtcccctggaccagtggattgaaatgtctgcaagtgagagccagatttttgaagctctgcaggtgatcccagtgtgcagcagagtttgggagctagctactggttgaagaagaaatgggagtgttggttcttacctgtgaggatttatggcattgcagcctatgggcgca

SEQ ID NO: 27824 - DNA, 1694 bp, Bovine  19866881020280
  misc_feature (1)..(1): n is a, c, g, or t
ncaaagccatgaccggaccaccatatacagtctcatttaaaagtttttaaaaataaattcatttattttaattggaggctaattaatttatgaaagtgaagtcgctcagtcatgtctgactctttgcgaccccgtggactgtagcctaccaggctcctctgtccgtgggattctccaggcaagaatactggagtgttctagtgttaataattagcctccaattaaaataaattaaaaaaataaaattattttttaaattcattacaaaaaataaataaaaataaattcatgcatacatatcatgggaagttcagcacatcctgactcacatattctccatgaaagtcatgataagatgactgaaccagtagaagactgcttaacatttttaccaaaacctgtgcctacaatagctctataatcataccacagctcactggagtatttctaagctttcagtccttttgttctataaagtcaccatttactttcactgtgatcttttttaaaaaggccaaattaggatttacttaacaaaaaatgtccttatttgctaccaaggatcagatgacatgacattaaaaagaaatgacatgaaaaagagaaaagcatcagacaaatgtacaggattatttctcttgctactaaatgttagaaattttcaattatcattccaaaataggaaaggcgggtcactcattcccaataaccaatttggctccattcctcccttagtgacaacatgctgctaatccatcccttcagcacgacagttctcggagtgcagtccctgaccagcaccaactacggtcacctgggagctggccccaccccaaacctactgtagaaggaactctggggagccccagcacgctgggttagcaagcccgcagtgactgtgctggacgccaagtgtgagaatcatcgctttatcctatctaaccaaaatgctggctgactgaccaggggatctagatctaaatcaaaaccttcacctataagacagctctagggaaagccaggcccctttttcctgactactttctaaaacaaaactaatattccaaaagccttatcaaaaacaagtcctaatctaaccctttgtgaagagggcttaccatacaaactatcttggtccctgatttcttttttttttaattacaaaactccctgacttcttatatattacttataagaaaggactgaacaagatttccgaggctgcaaaagcacttaacagccttggaactggaccccttgcccagatactctgcaataccttcctcttcctatcagtctgcttcctctgccacctctctacacggcaacaacacctccaggcaagagaacttgcgtatagcttccagtccccactttaaatatattttttgctgtcctcctaaaagacaagttttgattctctacagaaaagtagagcatgctaccaaaaaggtaacatacgaggtttcctactgttgaaacggagacacacagagtggagggaggagaggggcgctgaggaactccccatgatcacccagcacagccaggataggatcccacgaagcctggctgatagtgatagtgaaagtcactcagtcgtgtccaactctgtgtgaccccaatggactatacagtccatggaattctccaggccagaatacggaggggagcctttcccttctccagggaaa

SEQ ID NO: 27825 - DNA, 1069 bp, Bovine  19866881084854
  misc_feature (1)..(1): n is a, c, g, or t
ncaggctgaccagcctcctgatggtggagggcctgacggacctgcagctgagggagcacgacttcacgcaggtggaggctacgcgcgggcgctggtgctcagccaagaccatcgccctggacaggctcttcctgcccctgtcgcgtgtgtccatccccccccgcatctccatcaccatcggggtggccggagtgggcaagaccacccttgtgaggaacttcgtccacctctgggcccgagggcaggtgggcaaggacttctctctggtactgcccctgaccttccgggatctcaacacccatgagaagctgtctgcagacagactcctccgctctgtcttcccgcacgctggggaggcgggcctggcgtcagcagtgctgagcaaagccctcctggtcctggatggcctagacgagtgtaagacgcccctggacttctccaacactgtggcctgcatggaccccaagaaggagatccaggtggaccacctgatcaccaacattatccggggcaacctcttcccggaagtgtctgtctggatcacctcccgtcccggagctgctggccagattccggggggcctggtggaccggatgaccgagatccggggcttcagcgaggaggagatcaagacctgtctggagcagatgttccccgaggaccctgtcctcatgggctgggtcctgagccaggtgcaggctgaccggaccctgtatctcatgtgcaccgtcccggccttctgccggctagtgggggcagcgctgggccacctgcaccgcaagaggccagggcccccggacgccgagctgtggcccccgaggaccttgtgtgagctctactcgtggtacttcaggatggcccttggcggagaggggcaggagaaggccaaggcgagcccccgcatcgagcagctggcccacggctgccgcaagctggtgggcacgctgggccggctggccttccacgggctggtcaggaagaagtatgtgttctacgagcccgacctgaaggtgctgggcgtggacctcgtgttgctacagacggccctgtgcggccgcttcctgcagcg

SEQ ID NO: 27826 - DNA, 929 bp, Bovine  19866881105692
  misc_feature (1)..(1): n is a, c, g, or t
ntatttataggagagatttcatgagcatatagatctgctctgcagttagtatataaactgtcattaattagaatagtaaagatgcgatgtttaaattgttttaattaatatgaatttttaaatttaaacgtttggattttttttttaaagatgtaatcctgaataccatctgagggcaaactctgagagggatgtagagtgaatcgggcctggcagtacatccacgcatacagtattgagaaaacatatctacggtagcatctgactcttgccatatcctttctctcttcttacaagtgaggtacctgggcctctggaactttctggaatggatggaaacaagcagtctgcaccttgagccacacgccctgaagatacctctcttggaaagcatcgcaggccacttgagcagagaggaggatgtgaaaagagccccggaccctgagagacaggcgagcaccctgtgtggggtctcctgggtctgtgttacctgatcctctgaatgcgacagtctttcccactcagcacgctgcccagcagctccatcacggggtcctggaactggttggtgtccagcctggtcaggaggaacagcggtagtgagtggtcctactgctgcccatgggcaggtgggatgaggtccctggcactggagtggccgctaagctcagacacctaggctgagaccctctgccgccccctcctctccatcccagcgaagcccctgccgagcgactcagagatctgtgccaggacacctgcgtgctcagaattctcccaccaggcgacttgggaggttcagtggcataaaccatgggcttctgaccctcagggctgtcttccctgcagcccccacagtgtgtgtgtcagtcggacaccagctgccctcctttaaggattgtagaatggccctggtcctccagccttcc

SEQ ID NO: 27827 - DNA, 1327 bp, Bovine  19866881135979
  misc_feature (1)..(1): n is a, c, g, or t
ntaagctgaacgctgtgagagttccaaggaagtgaaagttgatttggggatagggaaaagttacagaagtccttgagggatctgccctgcagcagagagtggggccatattccaggcagggggaaaggtaagagcagtcttgaaagcttcagagatgagcatgtaagaaaatctttagttcttttttttttttaactcaatgtaattagggtatatttagagtaaaagttagaaaatgagttcttgtacttctactatggagcctggaatggaagtgaagagatggcatttaataaaataaagtaatcaagagtatcatttgagggtttttgacagagattcttccagggcagctcatctggagctaagtttaaggtgggaacgaaaataagagaccattaccaggtcattatgctatttttgcttttaggtagactggtgttacactccaaggcgtagatcttgattctttttgagagaaaaggattaaacagaggtgataatagtatctgctgggaatttcctggcggtccagtggttagggctccttgcgtccactgttgagggcatgggtacagtccctggttggggaactaagatcccacaaaccatgcagcatggcccccccccccaaaaaagtatctgcctaagtcacttgaatatgtttcaaagcaggttcatttccttagaatttcaggttgtgacttagtctcttcaaagtagttgctgtttccagtctctcagaaccagtgggcaataagtctgccacatgtaattcagagcattgagatcctcatcatctggaccaagctgaacataaaattggaatttgttaaactgaataaatggagctctgccagctgtgcccctgagtgtctctggcaggcctgattcataacatgggtagggagctggttactgaacacagggagaagaaagtgggaaaagagaccctctgaaaggaagaagaggaaagaagtcacaaaatgctgaattgtgaatgagggcccctgatgactgttgtttgaatgttaaggataagggccacagttccttattcttgctgaggaagccactaaagtcccctgaaaatctttccttttgatttcacctttctctgcctgggcacagtttgagaaatgatgaatgtacagctggaaaacaatgaaagcatgcagtttattctgagacatcatacaactgccatagcaggctgaatgtttttgctgggtgactggctgggtttaatggtgcctgctgttggctaacaaacactctttccttttttggtttataatagtaatcgccttagttagagctgcctttt

SEQ ID NO: 27828 - DNA, 848 bp, Bovine  19866881173516
  misc_feature (1)..(1): n is a, c, g, or t
naattagatctgataaagtgcatgaagaattatggacagaggttcgtgacattatacaggaagcagtaatcaagaccatccccaagaaaaaagaaatgcaaaaaggcaaaaatggttgtctgaagaggtcttacaaatagctgagacaagaaaagaagctaaaggcaaaggagaaaaggaaagatatactcatccgaatacagagttccaaagaataccaaggagagataagaaagccttccttagcaatcaatgcaaagaaataggggtcaaactcatatagtccataattgtcaaagcaaaccccaattatctgatgtatttctatagttcctgaatgttatcatgaagtctgttgataaatccaccaaaatccacgttattcaaatatggcccaagcctcactctacaggctgttataaaaaatagtagcttatttttcttgtgatttcactgggtattctaactacaaaattaaaacatgtccaggtgatacagttttgatttttaaaaaattcaaaatatttggggggcagtgcaaaaggaagctgttgaactatataaagattttacttcacaacagaattgtacaacccctttaaacagctccaactattaagaaacacctactacataaactaaggcacaggtgtattagaaagactggcaaattaagagactgtcaaacagcagcagacgggacatctagaaataggaaagtcagatttaaccaagtgaaaatttcttcagcattagattttactattcttagcgatagttcaactaaacattcttttgattaatggaaatgaaacacgggggaaaatgacacatgggatgatatccaa

SEQ ID NO: 27829 - DNA, 805 bp, Bovine  19866881320701
  misc_feature (1)..(1): n is a, c, g, or t
ncatgatgctgaaacttgataatatccccaaatatggaagaatttgttataaataccacttgaaaatacccaaaatgtacacaaggaagaatatctgagagtggaaaagtgccaataacatacattatttgtaaacttaacagattaccttggtaaacataagaaacactcaagttaaagcttagtatttgggaatgctgtattgaatgcagtaaaagttggatttcattcatatggacaaaaactttcttctttgcctaaagatagtatactactgttcctgaattccaactctccagacatctcactgtcaggatggctttaagtctttatccaggtggacggactgctgcccagtgaccactacaggcagagcaatatgattactgctttcctttctggcagtgaggaaaatcagcttgtttcaggagaggagaagccacactgcatctgttacacaatattattctgtccttgcctttcggaggcactactttttattgagatttatcttatttatcttaagtctgttcttgtgagcagaccttttttctcaccttttttcttccttttgtgtcttttcctatattcagttagggagagtatgcaggtattcctgttattcctgactggtgctactgtaaagagagaggaggagaacaagcagcattcagaagcagggttctgaagattgatcacccatgtcttgcagtagcaacagctagacaggaccttgtcagtggtaactctgagttcagacctttacctctagaccagcactacatgagcctttatcccttttagg

SEQ ID NO: 27830 - DNA, 968 bp, Bovine  19866881337847
  misc_feature (1)..(1): n is a, c, g, or t
nctaaaacgaattgatgctccttttctctggtaatgttttgccaagcaactttctcatatcaacccagctttcctccctgggaaaagaacacatgggctgtggtggcaggagtggatttccttggcaattctagtgatgtgaagaatcacaaactggcattctgattccagtacctgagttctttgctgagttatggtgtgcaggactgattactgaattccagaaacttaaggggtgaaggactatgatcatgagacagaggagatgctttacagatggacagtctttcctgggctcttaaacttgcttaaggaatcgcagagcattccataaccactgaccacactagcatatccaaatgctggtagcaaacctgatggctgggactttggtgaagaaatgatttatttttatttctttatttttggccacagaggatgcaggatcttagttctctgaccagggattgaacccctgttccctacagtggaagcacatagtcttaaccactggacacagggaaggcccagtgagaaaatgatttaaatgaaactatttaattgaaagaaaaatagtcttgggaattccctggtggtccagtggttaggactccatgcttccactcccagagggcatgggttccatccctggtaggggaattaagtttctacaagtctcagggcctagccaaaaaaagaaaaatggtcttccttcaggattggatgaggcaaaagggaaagtgggatgtagacataaaggagagggtaaacaatgacagaggcatgtgggtagggagtgagggcagacagactgaaatattaagaagagacaaagagatggaaaaagatgatggatggatcaggtgcaaaggtgaagttcttgggttctggcctgattttatggaactatataagatactgcaagtggagaattaggaaaagtacagaatttagaaatgtacaaaatt

SEQ ID NO: 27831 - DNA, 836 bp, Bovine  19866881366440
  misc_feature (1)..(1): n is a, c, g, or t
naaaaaaaaaaaaacctcaaaaacattatattagcaaaaaaaaaaaaaagtgtctcgtgagaaaaagcaataaaaatcttattttaaccacagcttctgctttaacgtccaccagcatccagcgccacacgctggctgcgcctccctggactccaggcgcgccagcccctgaaggcacttgttctccaagcttctgacggtcacaccgagtgggggaaggggaaggaggtggatgaaagtgaaccctgaatgactgtgatccacacagaggttagggctgcagtgaccacacgacacgccgtccggggacggggacggtggcgcctggacggacagagcaccgcgggcgggctgggccgcgtcacgccctctctgagacgttgagcttcgtgagttcgttggcttcctccatccccacttcttcacagtcgcttttctctatggctttgccgaaccgacacctttcctcggctctgactggctccttccagggtctcttagcagacgggtgagcgtccctggtctgggcgttgttctcggaacctggggacacctggtccgggttctgaacggaaggcaccaggctggctatctcgtctgtgggggagcgtccgatgctgccatccacctggacccggatgtcgggtgagatggacagctggtgctgtggcaccaacccactgtctgtgcacttggggtacaggtaggtcttcatttggcctttgcccttgacgttcaccgtccctcggtagtcgaactcgtagcccatcttgctcaggacgcggtagctctcctcgctgacctggatgcggcactccacccccgtggtgtccatc

SEQ ID NO: 27832 - DNA, 891 bp, Bovine  19866881599560
  misc_feature (1)..(1): n is a, c, g, or t
nacacatgtctatctatacacactggcttaagccaaactcttgtcttgcagatgtagaaattgttgctttgtttctctgataaaactggttttagacaaaaaatagggatgatcactctcttagaccatgttaatgttaatagagaagaagcattcttttctttcttctatgtaaaacttgaaatgaggaaaagccattctcatgtaaatcatgcaagcgctataattactataaataagaaaattcaagaaaatccaatcactgtatagaatggtaaagcaccaactcatttcttatatcatattgttaaataaactgtgtgcaacagacaaaaaaaaaagaaaaaagaattatctcagtgcctctgatggatagattatctcctgcctcccagttcctttcccttgtgtaccctttagatgagcccactaagcttactaacagcccaccatcaccctgttctcagtgtctatgactctgtttctgttttcttatattcgttcatctgttttgatttttagatccatcaacatataagtgaaatcatacagtacttgactttctctatcttatttaacttgctattattcccttcagctccatccatgttggctacaaatgtcaaaacttcatttcttctcatggctgagtaatattcccatgtctgtatgtatacatgtgtgtaccacatcttgttataaaatttttttgatgtctaaatttgttagtttcagatatgcataatattaagtatttttttcaaattatatttcattataggctattttaatacatttaatatacttccctgtactctatgggcttccttggggctcagaggtaaagaattggcctgccaaagcaggagacacaggagacggattcgattc

SEQ ID NO: 27833 - DNA, 858 bp, Bovine  19866882224422
  misc_feature (1)..(1): n is a, c, g, or t
nagtcagacatgactgagcgactccgctgaactgagacattgttgatacttttaggcattattgatatatgtagatttagatttatttttagatattgttgatacattttagatatttttagacattgttgaattatcatcataacaactaccatttttggagttcctactttataccattaactgtatataatgtacgtacatttattttttcctaatcattgaaacgtacttggaatgcgaggattttgtattggtcaggacaggttcaactaagctgtggtaacaaatcgcccctaaaatttcagtgctttagcaaaacaaacatttatcatccagtcatgtaaagttcaatgctggtcaggaaggattcttaatcctataagaccatcatcttgatttctgcctggctcttaatttataaagatgactgagtgacaacataggagatcaatggcattgaaagaaaagtttgtcattattccctgttcccctagaaatagcaccttgacttaccatgcagggatactgggggaagcaccaaagttagttaagaggcagaagcaggaataagggaaaacacataggtccagaatctttattgtgttttctgtgggaaaggcaaagcagggcagggaaactgcttaggactggtttgaattatgttggtaggctctggggcaatagggttggtctctagttctctggtacctggccctgagtgatttagggcaggagaaatgctggcctggtatatgagagttagataaagaaggcagctgaatataaggacttgggatttggttggagggtttgtaatgtaatttttgtgcactcaagaaagcgggtcacagggga

SEQ ID NO: 27834 - DNA, 1610 bp, Bovine  19866880600999
  misc_feature (1)..(1): n is a, c, g, or t
ncaagcaactgacttgtatcaaattggagatttctattagaatacacaggcatatatctttcatttataataaatttaaactacaattataaaatagacatcaattggggtcagtatgagttaaaatgacaaatgctgctgaagaaacaaagagaacactaatgtaagtgcttttctttctttaatctttatttgatctgtatgcattggatttctaaacaggtggctaacatcatagaaacttgtgatgataataatagatttaacagagaataatactagagagcttccagaagcttaaaaaatcttaaattagaatcctaaatctagttaattcaacacagggtgtttcaaccttctcaagaagctgtttccttcataggtatggtcagtaatcacccactagaatgtaagcgttcatccttaactaacctctctcttaaattacacctactcttcgaatatatgccagtattcattgtattagattgtgtgaataaaaagcagtaatgtatattttcttcccttataagaaatattctggtggaaataactataaacaataaaacacaagtattcttacatccttataaagataagtacattgtattgtgggattttcttcagtaaaggttagtgattaatggattggtgtcagcttgcccagacaaatgttactaagctgctggacttacattatgactgtattatcaagtgggtgaaagcactgaaaagaaatcagataaaaatgagactgacttaggaggaaatgattggttagttgacagaaatcttaaaatattaaatggatctagagttctcattgcaattctaaggcaaatagtttgaaaaaacattcttgtacatattctcaatcaactaattgacataaaaaaggaaatgtttattgttattttcttaatatgtattcaaataatatagaaatatagatacactaattttagaataattttaattttaatgtgattatatttagttatcacaaatacatttatttaatagagtaagcctctttgattattataggctctgaatatttctaggcttcttcaagtataaaatattttaaaatcactttaatattcagatccataattcattagtgggcaggccctctgtcatcattttatcccatacccagtagcactcattaataaataataatcaaacttagaaatgaaagggaaaagtgatttcatgtcctttcaatatcataccagaacactgcctaacaaaatcacctaaggattatttatttagaggatctaatttgtttaacttgaagttgctattgattagaaagcaaatgctacattaggggttaatttgtagagaactaatgtgaaaatgattatttgtttggtagagaaggtatttctaaaagtgcccatttaggacactgacaacttttggatctcatgaagcaatctttgatttttaaatatttattttattgaagtatagttgatgtacaatattgtgtcaatttctgttgtatagcaaagcgattcagctatatatatgacatattatttttcatattccttttcattacagtttaccaaactcccaatccattcctcccctat

SEQ ID NO: 27835 - DNA, 1237 bp, Bovine  19866880603297
  misc_feature (1)..(1): n is a, c, g, or t
nccttatatttaaaattacaacctgttattccctcctggcatttctaaattatttttccattctatttttccgtagcacttatcttccctttacatgttgaaaaatttatgtacaaattttgttcattgcttagtctgcctcactcactagaatatagctccttgaaaatagggttcgttttaaacaaatatttcatgaactgtgaataaagtacatagaacatagtagatgttcaaataaatgtcaaatgaataactggattgaacaaataaccaaataaaaagagcaaagcttaaatcgaataatataaacatgattatatcttaggttttcttatcctaggggcttgatattatatgaactgcctacttccatcaggctattcataaactaaaggtaaataaatattcagactgagattattcactcattttcctgcacattcatttccagtagcttcatgattaatcaaacatgtactcttagagaatactttgaggagcaaggcttccatttcattgtggtttgacctataagttgaagagctggagaaactatacaagagtgtctcaagtactttaatcatggatttacaagcattaaattctttcttatgaatgtgttggtgctttcacatttttctaactgaaaacattccacagtacattagagatccccaatcctggttcaatgctgtttctagttaatgactgtgtatgattcacatagagtgagttgcaaggtgatatgtaagtaatttttgatatggatgtgaaaaataactttgagatatgagaaaataggtaggccaattgaaagagagtttttgaaaaggtctgaagaattaaaagagcatgttgtgtttaggaaatggtgaatactccagaagaattagttctcagagtgtttgctaggagcagtggaagattaatcaggaagagtaaagtatgaggagaattttatgccaagctatacttgtactggattaacaagtgctcttaagcacaagaaggtgaggactaattgggtagaacttgaaacaactgatttattttttgacaagcatgtttttatcacaccacatttattttgtataagagttttacttgtacattgttgtttcatgtttatgttggatataaaggtgtaaattagaaaaaagatataaggtacatttaaagacaaagtttgaaaatacaataaatttgagattcataaatgcagaaataaattagt

SEQ ID NO: 27836 - DNA, 1266 bp, Bovine  19866880723681
  misc_feature (1)..(1): n is a, c, g, or t
natttctccaacaagatagtccaatacccaacaggcatacgtaaaaatgctcaacataactaatacaaataaaggggaatgcaaatgaaaatcacaatgagtcatctcctcatacctgttagaagggccattatttttttaaaaaaggaaaaaaaggaaaagaaaacaagttttggtgagtatgtggataaattggacccctcatatactattggtagaaatgtaaaattgtgcagttgccctggagaacagtaaggaggttcctcgaaattaaaaatagaactatcatgtatgatctagcaatcctactctgggtatatatccaaaagaactgtaatcatgatcttgaaatggtatctgcgcttctctgttcactaccatccaaccatctcctcctctgtcgatggcatcaccgactcgaaggacatgagactgagcaagcttcaggagtaggtgatggacagggacccctggcgtgctgcagtccatggggtcgcaaagagtcagacacaactgagcagctgaactgatgttcactacagcaatattcatgaataccaagaaatgtaaacaaatatctgtcaatagataaataaatataatgtcttagccatttaagaagtaaatcctatctctattttctacattctttttgtcttgcctaggcatgctttgaaagaatatgaatatagctatttcactgattgattataatattccttgatagattgactcttaatggcttataaataatccctatccaatccccctgattctcaagtgtaggataactgataaagacctgaattatttcagatcagagaaatagctggataattcctactgctggagcttcaggatctactgatttctatctttaattagattctgatcttatacactattactgacttgattccattctttggacatgtttttaaaatcagttttccttttgaggtcctcttttgcagttcatcctgtaatttcaaacatacagcaaattttcttgcttcctagacacaacctgttgtatacactttgctaacagttgtccccattaacttcttcctcctgaattgtgcctcttgcttccatccctactaatttttttaaaattttatttaatttttaaactttacataattgtattagttttgccaaatccctactaatttgtcttaaagtcaccatgtctgaaactggcagaggacaatcaaaggacttatctctaagcactgtttttagaggcagcgacatgagatt

SEQ ID NO: 27837 - DNA, 679 bp, Bovine  19866881065582
  misc_feature (1)..(1): n is a, c, g, or t
ntttatagcagtagtgtatgttctgtatcttcctaacatatttaaaataaactttgaactgttagaataaaaattatcacacactcctggaaaacaatcaaaagacaggaagaagaacctgaactgtactcattctagaaatgaaggaaataagttatgatcataaaatatctttggtaacagtcacatgtgaggatcttagtccattgattttttttttcacttttcaaaattctgtcaaatgttcgacaaatacatatcaaatcttagatatcctgtagtttactttaatgcgactttttactggggtttcaataatcattataagatttttgtatctattccaacctaacatgtggcaggctgagttattcaaaaacaaacagcaagtcattcttctcttcctagatagagtacttctcatttttcaaaatcatattccagcacacagtaatgcaatcatcatgctgagactgtcagtaataaccttcactacttaagtggcttctttgaacagctgctctgaaacaatttaaaatcccatattcctcaaaaataaaacaaataatgactatgactatcgaaacattggaaatcttaatgagatattggataaatacatttacatgatatcatcagtgcgtcagcaaagagtgcccatttctgtacatcacacatt

SEQ ID NO: 27838 - DNA, 1543 bp, Bovine  19866881180860
  misc_feature (1)..(1): n is a, c, g, or t
nttttaggatatatagcattaatccaccagaagaaggcagaagcttacagcagagtaaggagcaagtggacatgatgagctgtccttggattctagatacatcttagaactagtcagggtattatggtggtggcaattgcacagaccttcatcattatcgactggtcacttaagggtagataatttaaaaagataaactttcatcatgactagtgagttgcctttgttgtaaaaaattaaaatgtgtagtttattatcatctgtgtgagctaggtttgtcacattgacaaatttaattttggaattttacaatcattttgaagtttaactttcaatattttgaggtgttaacaatatcagcttgacttttagctcattaaaagtctttgtgtttctgttattacatgccatgagatggtctttttcaccaggagtgtcactagcaccataattaacataactactcctaacctgagatcattaagatgcattttgcttcacattggaaatctatgtattgttcatcttaaaagtcaacatatgtttttttttgttaatgaactgaagtggtatgggatttctaatttacttaaaacgaatacctattttctttcaagtgtctgactctaagagaaatctacttcagggcacatttcaaggtacattaaacaccatcaactttatccacacaatgcttttattattggaacattaaatgatcccctcctcaatctgagcacagcatctagtctctgtagaaatgagcagttaacagaaatctttcctataaatggaatagatgaactgtatcctaggttaaataataattatttcatacataaaaggttagttcaaccttcagagcacctttgtgtttaggtagtaacttgctcccaatactagagaaaatctggatcctgtaaaaataattgataatgtgatttgaaagaatcacttttgagcatctttacctgtcaacattcttatatgatgaattataatatttggccataattctcttgatgataccttggtggcatattgcaattatatatcacatgagagccactactatgctgtgctttaagataaatttcaccttataaaactaacctaagtaccaaaatttaaatatttctttcctgagaactgtatttggagtgagatatagcaccttaattttagaaatcaccacaaaggttgtgtgcatgaaattactatatatgtaaggaattttagatgtcatatcaaaacttttacataagggatgtggtaactaacaccaaatgatatgatgtggcttccctaaggtcatgcacacagtaacatcattagaagtaaatccatctatcctgagcccatattctgtgctccttgagtgatgcacagtgtaccttctggatttcagtatcatttctaaatttgtctatgacattataaaacaattttctattttgtagttcaacatcaaaaatattattcaacattgatgcaaataatttcaataaaatataataaactattataaataaaataaaatatg

SEQ ID NO: 27839 - DNA, 3407 bp, Bovine  19866880429725
  misc_feature (1)..(1): n is a, c, g, or t
ncaaacatgtagctttaacttttggatgtttgcttattgattatgcacaagtgctcctgtcaatgcatgtattaatcattagtaaggcttctttctctgttagaggaaaagataggtaacagtagcgtgaggagcatttctttcccgcattcctcttggcagtgcatgtaccctgtttcagagatgccttcaacaaagtgtactgttagtgaatgtccagcacctgttctgccctactcctgtggtgacccctgagacccagcccagaccctctgaatgagaacctctgtggttgttctcagataacgtgcatggttaacaaagactaggtgattcttctatattctcctgtttgaggatctctatcctagctctgggccagagagtgttaattccctgagaagacctaggagctttcctataagctttccctcttatctttcaaccaaatgaattctgtttgcccacgaagaggaagacacacacccttttcctaatgtggttatccataccttgaccccctctgcagcctcatcccatccttacttgttttcttcctctgtgttatcaaaagtcagaattctcttgttgttattgttattagaagtttaatccagtaacttggcatataccgttggactctcaacaccgattttattattttatagcctctttttccatcttgtgtgtctattatttttactttatgagctccatggagtgccacccatgggcccatggtggtcttgtaattcttttcttccttacttgagattttttttttttttttttgaccatcctattgagcttgcattttaggggaatctagaactgctctgtccactctagtcctactaactgcagtctcctaagtcagcgcaaccacatttcaagggctcaatagccacagcgagttagtggttacaatattagacagtgctgcacatattacaaaatatttccatcactgcagaaagttattttggagagggtttttctagaaccttctatccatcaatctttgccctaaaaaaatgtttgaatctgctcgtctacagccaaactaaagaaacatgaatttatctgctctctttttcagttatttgggctcctgaagcttattccacttcctctgtctggctagcacctccttatgataataacctgagccagggaggtagctgccctctatactcttactaacttttgagagtgaaaattttcagtttgaagacatgcagtgttagacattaacacttacttatgcactgcatttcttagaaagttacttgaggatgtgtttccacaaaatgaaaggatataatagtcatgcacgaggtgaattaatctgtgttctctgatgcgtctgactctgcggatgcattgactgtagactcagtagatatgtaagaacttgagctcttgagtcacattatttcgacttcagtcttaactctttcctttcatagctgtgtgacattggacaaataactatacttctctgtgccttagtttcattttttataacatagggaaaagtatttttaataataccttcatgtatgttatgatgattaaaagaattaattcatttaaaggggtctgtatggtgtctggaatgttatgagcactcagtaaatgcaagctgcctgcatcctcttccttctccttctcctcctcccctcctcccctccctcctctgtctccttcttatcaccctcatgtacaaagcatgggattttgaagataactaagaatcgtttgttcactctcctcacagaatttagaacctagcataggaaaaagagaagtaagcaagcagatacaaaagggcgatgccctgggttgctgatgagtgtcaccccctttgtcatgggttttcctatcatccttatgcttcaggttcagggccacgtgactttctttgacattcggtgaaaactgacgcactgtgtctttagcagcctcctatcaagcacttgtgacacctgtaagacctgcctgtccccttctggatataatctcaaatttcctgaatctcccaggccttgtgaattatattcccgacattcctgcagacatacacagctaaaagtatgtagaatttcacagtcaagggcgagccaaggtgtggcccctgtgggaagaaacgataagtgctcgttgggtctctccttacatctcattttaggatgaatgtagtcttggttgttttccaagccagaaggcactcgctttgcttttgcttcaaatctatgcactttaaaaaataccatgacattttgcttctgagacaaaagtcaaatgccaaaaaaagaaattcacctctacaaatgtgagtattaaaaacttaatttataaatgcaaacaagatcagctgccaagatgccaacacagttacttagtttgcagacttggagattgtgggcaatattcctcgtgcctgctctacacctgtgtatttgctgccttattggggattgagagagttgttggggttgacattggcatccttccctgtctgaatacttaaatacagttggtgggctggagattacagtcctggaatttatttagagggaaaataggaagtgaggtaatgaatcgggcatctggtgttctattcgctgtactcacctgtgtcattggcagaccgccctgcctttccatgatgcctcagtagggctgtcagtcacaatgttcacttccccccacggccctacagggatgagtctctcgttcacattgttctaggcgtggactctcttgcccccgggaatagcacagcacataagtagatgcttcccaagaggaagggatttgtttcatgcttcaaaggtcagaagagctcactaagtacttatggaatggataagagtctcaaatattagttaagaaaccatttgtaaatttgtaaaaggatgttgggagatggaaaagttcctgattgccagaggaggggctgagctagggaaggtaaagttgtgggtgttgggatccatcttcccccctgggaaagacaatctgaggatacatggaggaagacagggtgagatgggagggagaccaagccctcctccatcacctgcgtcttggtcctgcctagagatggcaccataccttcctttcctatttgcatgacccagtgcatttctttttcaccagtttgatttagttttctgttacttgtttttttaaaaaggcttatatcagaccttccccatgatgtaagagaatggaacagagccaaaaagtgcatctacaagttgagaaggcaaccaattaagtacagacatttttccagaatgctggggtaagctcagatttccaaatgtggcctaccactctgcctcatggccattcttggccagtcctctggagtggacactaactcaatttatacatgc

SEQ ID NO: 27840 - DNA, 1738 bp, Bovine  19866880441589
  misc_feature (1)..(1): n is a, c, g, or t
ntctatgtcctaaagtttgtaagaggtctgacctagactcacaagcaatgggaagtcattccccaaaccacaaacctaaaaaattctagtcaactctccacttgattccaaatccgccctccatatccacctacatgcctttcattttcacagaaatagttgatggtttggaactgacattaggccactgattctatctcatgcctggtttaatcttatttaaactgaaaaatctggggttttttattcgtgttttttgttttcccttcactgcttccactgacagaggaagcatttgagctattcgaactaataatttgggaatcaaaaatttctataaccaccatttcttgacaaagcaatttttgatgagaccaaagtaatcattaaaagaaagttaatttatgggagtttgcttgacatcgtagtaattagtatttttttttcccttgaaaatgagcattaagtgtcaacagttaattgtaaaagaaaaaggctcaaataccattttgcagtcattttatggagctgatttccctccactaacagggcactggcattagaagacagagtaaagatttatggacttcatctccattgctgtaattaactctgttgaacaacgctacacttctatgaggcattagaaggacgcttgctaagaaggttgaatctctggccaagttctgagatgtttcatctacctgaagagttcagagcatgatcattctactattctctataaagtcctcacttagtgtcagggtctatgccagacactgggagctcattacctccatatttaaagggtgtgaactatctgcaaggaacttctatgacattaggcattagggatggagagggagggactgtcctaaagaacttgaccagctcttgtcccaagtttccaagaggggacctctaaatcctttgatttttccaagtgagaggagtgtcttcgtaacttgtgggcagtcccttggaccacccctgactttaggctagcgagatgacatgtggtggctcctgtgtttaagctaacatagtgatttagcaatcgaaaccctctcagatctcatcctatgtctcttcttttagctcctcccaatttctatccttttactattaaaaaaaaaaaaaaactgtaatagggagtatggcactttcctgaattctatgaatcattcatagaattttcaaacctgaggatatagaatgagctcccaaattttgtagccagcaggtcagaagtgagagtgccctggggaccccagacttgcagctgatgtctaaagcagcagggaggagcacagtttgaggggactgtacccttaacttgtgaggtctggcctaactcagggcaggtgagtcactgaagaggtgaacaagaaaaagcccttatctccatgggacttgtatcctcctggacaaagaaggcaagcacaggtacaccgagcagaaatcaggatttcatccagggagacccgccctaaaggttagtgaggcaaatgcaaggggagagacaggctagaggaaggaggaaagagtgtcagggcaggccttcctcacctcagagtggagattcaaagaagaagaaggaaaaattcttgaggatggagacctgaccttgcccttctttgattatcatcaagcaggacaatccagggaaaaaaaatcaagtcaaaatcagctaccgacagattctgcttccccaaagagactctgtgtaaaatatcga

SEQ ID NO: 27841 - DNA, 1885 bp, Bovine  19866880509629
  misc_feature (1)..(1): n is a, c, g, or t
nctcatgatgtactctgcatataagttaaataagcagggtgacaatatacagccttgacgtactcccttttcctatttggaaccagtctgttgttccatgtcccgttctaactgttgcctcctgatctgcatttaggtttctcaagaggcaggtcaggtggtctggtatttccatctctttcagaattttccacagtttataatgatccacacagtcaaaggatttgacataatcaataaagcagaaatagatgtttttctggaactctcttgctttttcaactattaaacatcagtagataacaaatacaacagtgttcctacgtgtgcacatctgcagagcttaggaaatacacatggagaagaaaaaaaaaaaagcacaactgtgaaggttatgaagaaaggctttccaccaagattaggataggtagtcaaaattaaatttttgcaggaacccacttttgaaacatgaaagttatacacttttttgctagatggtgcatctggctgaaggtcttgccacaaacaagatttttcatcattctaggaaaactgttgtaagtaattagaggcagaagtagactttcacatttacttatgacttaggagtgtcctatagattcaatcataaagcttttatccacaataaagcatgagcatggattactgaaattcttaatgaagtggtgtttccataatggtatgatttcttacctgttgatacaatgcatctttgtctctaatttcttttcatgggatatttggacagataacacttcataaccaaagaattatagagaggacaacaataggtaaatggctttactaaatgctttcaagcttttccaaagatcttagcctgcatggaagatgagtcagggttggttcctaaaccacagcttactttacaacactggtttttattccaagttaatgaatcgagggagatgcacaaagccataatcacttactatcctccacaaatcctaatgattatgtctgagcattttattaccctgttttcctgtattcgctttcatcttctaagagggctttctaacttatagacaaggtcttgctaggaaagtgagtggtaagaaattcactgtgaacaacgcgagagctgaactgtacatgacagcagtttatatcagaaaggcaaggatctgaatcattgaatatataacttgcatcaggacagagaaggtgagaggggctgggacttcgaattcggtagcacaactccaaggcagcaagcgagacccagtatttcaggtgagcacatgtttatactctattctagaagagactgggacaggtgttgagatggctcagcctctcagtggtctgcccactacacaagtagacccatgaggactacttaatcttgtcgttagttttgaagggtctgttcccctctatgggtttgcagaaatcacacattataatcacatcagaacatttctacagaaactctacgtctatcaccagagatgaaattgtactatgaggtatcagctatctgtgatgctcatggctcagcatctgagtccttccccaccagggagactaggaaagggaattctgaggttgatgtgttgatgagaccatatacacagctacagctcttagccctgttgagatccagctgctttttgggggattcattttgagtttctgcacaactgcaaggctgtccctcaaaatgatgcatggccattaatccatggataagtccaagtacaggggttcggctgggagaaagttatgaaggaagctgggtgaaaattcattgagctaaaaatatagatggacttgaagacaagccaaattaaaaacatagctgactgtcagtgtccaaattgttactgtgcacctcctgttg

SEQ ID NO: 27842 - DNA, 2595 bp, Bovine  19866880512683
  misc_feature (1)..(1): n is a, c, g, or t
ntcaaccccagggatcgaaccccaggtctcccatgctgcaagccaattctttaccatctgagccattagggaagcccaggataactgagtaagacttcccttgaaatagctgtcctgtcagtttatttttcttgggctgagcctatcagccatcaagcggatggccaagggaaaatatgtcaaattccactgaaaacagatatatcatattattcttttcaccgttgagcaggcacagtgctgtggtggggagtagccttcgattgtgttgactgtctctggcatctgaccctcctgtgactgcatttatgtggcccagaaccttggtacagagaattttccattgtgcagcttatctaagtggctggggctcctagattctgggtctcttcacattccaccctgccccctcctctgtagcttctctggtccacccagtgttagctaggtagagccaggaagcagcatttggggaagcatagccttgctgctgtgatggcgaagacacaggaagaggagagagtaggaagtttggagcagccacacccaggaaactccagccatttatagtaatctgtcctatagggcaacgagtaccagtttctccctgttgaagctgtataagaactgtgatcatttccgcttagacccacccaaccccctttgtctgactcactcactcttttttccctatcaagtttattggagtccgtatgccttcttcactgaatatagttcttgtcttgacttaatatagttcaaaaatcaactctggctttacttaaactcaaacagaacccacaggtgggctgcccacccccccacccccaatccatgaagtatttttaaattaaaggaccactgggagacccgggcccttcgtcaggacctagggcatgtccctcatgtctcttccatccacatgctgatttctcctcacattcagaaggcagctctggagggagcctgtcagcttggggaaggaaaccaagcagataatcaggaaatcaagtattcaccgggaatgggtatttggagtgcagcaagttcaatttggcagataatttgcttcccacactcagctttacctacagcacaatgaaacacatttcaatctaaaattgcctcctaactccaatcagcattaatttaataatacatattcaacagatataaacacttccaatgactggaaaaatagtacagatccacatgtgtttatgctgatattggagtctaaatacgatttctttcagagacagcaatggaagtgtttctctgcttcccacccccgcctcccaaaggtgaaaatgcaatttgcaaattgctgagggatttactattggcagggttgagagccctgcgatacttagtttttctgtttgttcactagcactttttctgctgggcctcactgtggtcccgtgactttcttctctagttagaaagcagttctgcctcttttagttggttccaagaggctcagcttgatcatcagtggtgattttattttcttctttgttgaagaaggtgggaaactgagaaagtattagcatattcttgccaccttaggcaagggtgctatgcaaaagcctttagaaccaagagaacatccagaaatggggagacttcacggagtcctgcctagaagttacactgccccccaggcctcaggacatccccaagtagagcttccactcagggaaaaatgtgaaagagttaatactccccagcaactcagatggctttttgttgttgttaaaagaaagagtttaacagttgaaaaactaattaaaaaaaaaaatgaggctttactacaaaagcaaatggtaatgattgcagcagcaggagtcttatacccttaactcttgtcatagtcttattttcacaggttaaacatgtgaccttgatacacatataacatgaacatgtgacaatttaacttaactcattcctaaggacacagatgagatgttcaagctgattataagaacagttgagaaattggacatctatatgaacttagaaatgttagcctgagtttgccaggtttgatacaaaggctgattaatgtatatagaataataaaaaccttaatgtatggggatatcttttgtactgggcataaattaacaagttaacacgtaactttacagtgtcttgagctccaatcagatagtaaacagttgtgtcaaacacaagtacagtcttccagagagctaaataattcctcgcaagcttgttaagagtgccttggtatgtcagtaatgcaaaatgccactgttccctatgcctcccctcattgccaactgttaggtaatgatcaaagcagattctcaagcgctggctcatagtcacaatagaaccttgtaatcactgtccagatttctctggctatgtctcatgccaagagctcccctcccccacatcactgcatgtccccaggtctctggacttgaaggctgtgtggacttttctcctgccacttctctcagattcttttccttcttccaacttggtggttccttccatttccaatgtcagtctcactagatcttcaggcctttatattttttttctatcacagacatcaaa

SEQ ID NO: 27843 - DNA, 855 bp, Bovine  19866880603368
  misc_feature (1)..(1): n is a, c, g, or t
naatgggataaggtgaagggtgtctacacttctcagaagtgggtaccagaaggcatttccaaaggtagtgtcagcatgggcagtccagaacatttttccatctgttggtttttatcagaaatatctgaagtcatattgcataattaagattgctgtgacaaacaatttttaatgctttcatgtgcagtggtattttccccaaaagtcatttctgttgtcttaagtggcaaaactaggaagatccattggaaaatataaatgattcaccaactctctatggagaattgagataaatatttatgttggtcatttatcattcatttaatactcaggggcttattatatctatacttactatgttatctctttgaaatattcctatgtgagtgatttttcatagcagccttagagaggggtcctaagagatgagacatttctgcatcttaataccacatttgctgagcaactaccttctatgtttcaagaatatgtatactctattgatttacgcacagtggacttctgtgttgttgtgctgattgatatgcctgctagacccagaatcttatataaaacagcttgaccttaaaaatggtactttatgaaagtgagaaattaataaactaagaatcataggcaatagctttggagtaaggacttccatcattttgccttgattgaatcaacagcgtcatcttttgcaccaaaccctaagtcagtgctttgtttatgattctctatacccattccatgtctgagctccaaatccctgctcacctcatctccctggcctggaatgccctgtttacttcactttctaatcggctaaatcctcttcagatgctttaagactta

SEQ ID NO: 27844 - DNA, 1645 bp, Bovine  19866880655974
  misc_feature (1)..(1): n is a, c, g, or t
natgaattaaaagaaaaaaaaatctacgagcaaataaaggaagaaaggaaggaaaataatttgagcatgagaaagatctcatgaaagtattgaagtattagctggtaccttgttggttaagcaacttgagcctcagtttagatgagatgatgcacagatttgcccagttcagtcaggcatgaactccacatgcatgcccatcaccaccatcatcatcaatgctctcactgttgcattatgatggttatcagtccctactgatgctcttaacaagctgcaagtacacttgcggatactcataaacatatctgcctcatggagcatattaaaaacctgctcactcatttcacaggcaaaggaagaggggccagcaaaactcacattgagctgaagttcatctgtccactgtccaatcagtcggtagccggggttggtggtgttcgtggtctgatactggaagatgtcgtaacgcccaggggcatccccattcttgttaaacatgactggggtgcccgcactacctggggaagacaagacagtgacaaattttatagttaaacaagattccgtcaatctcttgtgccctggggaatagtctgaagacctagtgatgagcaaggtagcctagaggtagccctgttgtttaacaggttccccaacatgctccctgaaactcctggacaagtcatcactatgctctgtgaatcagtagataaggtgggaagacaatttgtttcctccttggaacatctcaattctttaatgtcttaaagcattttattctactttgtcttctcttgtaaggaataaaaattaaatgcattatttttcagagaaaatcttaagctttattgttgttgttactattattattttagtttctaccaaacactaaattgtgcataaagaatcaagacataataaatatatttttaaaatgaaatacaagagaagtgaaaaacaagctcaaaagttcacttaaatacatagttgaatactgattgcatttaaaagtatttttggctgattatttctaattggctttaaacgataagcagctgaaatgcttagcagtttgcctggtgaatgcttaacaaacaatggattctttctcaattttctatttgggtcttatttgaaatgtctatcttaagactgtaaacaattagatagtgaagccaatttcaaaagactaatgcattgttttgaaaaaatatataacttaaaagttggatatgagtgaaaagttccttaatattaaccatagggaacaagaggcaaatcacatacaaagtataaaagatgtgaattttagttaccttaccaacagttaaagaagaatcaccagaagtttataactgagcattatttcactcatgatctctgagaaataggaaaaataatactggcttcagggtatgtgacttcagggtatgtctgctctgcctataagttaatacatgatctatatttccaacagaaaacagtgctctatttcctgctgtttacaaggaagttcatagatcaattacaggctgaaacagaatcactgagaacattttgctatttttagggggggggggcaagtaaatcttagataaagagatgaaacactttcgataattctcattaaaaattttaagat

SEQ ID NO: 27845 - DNA, 1356 bp, Bovine  19866880673464
  misc_feature (1)..(1): n is a, c, g, or t
ntaccaataccagtgatgagagagaagagctactggttccaccccttcttgccagactcctgttattataatctggcactcttgattgaatcctgtaaactgtcatttatagtcaaggttatctatacttttaatagaaaaaaaattaactatcaggaaatatacacacaaatcatgcaactgactatttaccaacttcgggtgcgagctagcttcttgttggagcataaatgatttcagggcaatttcaaagaaccacttacctttcccatgcatatccatcactgtgttaaagctcgcttccacggtgtgatttcaaatggaagacatcatgttccctgctaagataaagaccttcgtgtcccattcagttactgtgaaggctctgttatactaatgccacatgataaatcaagaatgcctttgttatttatgagaagttttgccttcttggtattttctcactgcatcttttctgtctttcttgctctctgcttgttatttcttcctcactgtcatagctaaaaggactgttcagtagggaaatgaaaacaccccctacatcgatgagtggatgaatgtttgtcaggaggttgtaaggaatgaacacttattgaccaaagagcttgtctgaatagcgggtgagatgactccgagacgtgagacaaagggtgtggtgagacaactacttctcctaggctccccttacccccattttccaaggacagagatttctgtcttggaaatctctttgggctccagaatcaatcaaatgagagagggtaaattctggggtcagaagttcactgaagccacttttattcttaacaatgggaaactggctgtgcagctgtgtaaagaccagccagatcctgtttccaggcatggaaaacacactcatgaatttgtccaattgaaggatgggtgggggtggggtggggggatgctgctcatttagattttaggggattgtttactactctcaactgaagaatcttttggagaagttgtctgtagacaggatcctatcaaattcacgacatttaaagatggcatgagcaaaacatccctaggaatggcagggctcaccagagaaaactgggggtgggggtcttccaggtacagtaaccagaaaaatgaattctcttagacgaaggcccctacttaggacagacaatgtaacataaacaggaaggccgtaatagcatcgattacggggctggcttgcttaagtagctggagtagtttaggatgacatgtgctcagtggttgtgctattttggttctgaagggtaggggacagtagaaaagggagagaagcttcacttttcattaggcccaagacatggaacaaga

SEQ ID NO: 27846 - DNA, 1319 bp, Bovine  19866880795093
  misc_feature (1)..(1): n is a, c, g, or t
nagttgccccataaaagagaactgagaaaatgtagcaggttttgaaaagtggacagcaggattctggtgggcagaatttgccattctaaatacccttatcctttctccctgcttctgaaaaagctcatgcctggaaatggaatctcatttctgtccagcaccgaggcttctcccttgctggtggtaatgagccattgtatctggtgagctacaggttgccagcagatgtccagaagcaaggacatatcagttttcaataggacacgtgtttgatttgtctcaggcctttgtatttgaatccaagtttctagcttgttataatttctgcatttggataatttacctgttgcctctctgaagaccagttcagaaaggtcatggactgaaactctatgatacgaaaaaacctttggctgaacggctgactgtttttggtctctcccggggcggggtggggggacaataaatataccagcagttgctatacattctatcactggctgtaaattttccaatcaacctgatctttccaaatctgcagtcagcaagaaggctgtgctttgcatttatctactaggaaagacattagtcttatttcaattatatttttaagatcaaagttttggaagtattttctatacatttttctgatgatttcaaaatgaaaactcaaattggcccacttctaattcatccatttttagatagggaagaagaaaacagtcttcaatcagcattttgagaagagtgatagaaaagaacgatccattttcaagaaattaagaaaattccaggaagataaccaatgttctgaatttctacactttcagtctttctacagttagcaccagcagtctgaaaaatgaacccaaagccctttcagaactcccatctgagcagaaaaagattaaatcatgctcaacatgcttcaccaaataaacagagtgaaatgatatgtttttgaaaataagaatttcaatggtaagggatgaaacaaagagaggttaccaggtaaccccatcaaaccagaaaattcaataagccttgcgcatcccttcccttgcccactacttaatcagagtgttgctggaatcagtttgaaggaatctacttacttttaaactggctgttttgatgtcctgtaaatacagcccaaatatccatttctgcaacagaactgaccataaaaaatgaaaccattcaacccatgggattagggtatccacattaactatattatgtattcagcttggacgggggctgtttatttcattgcatctcagtgtcctcggcagcactgcatgagcacactggctcta

SEQ ID NO: 27847 - DNA, 3026 bp, Bovine  19866880877535
  misc_feature (1)..(1): n is a, c, g, or t
ntcaaagaattgtggttcatggtctacaacgatagtgacccctagcaattccctagcaaaaatggagagggagaacagagagggagaactcttttgtagaggggaaacagatttgggagagtcacagtaaacaaagagtggatgccttttcatcggctgaactgtgacagtctctcactggctgagctcttgccaggaaagaaaggaaagtccttctctttcatgttggactctgctctccttgtaggccatgagaagtcagtctggcctcctgactctgttttaattaaggtttctgtttatttttacaatagtagaaagtagccaggagttgagccacttgttgctttatcttggctccagtacggatgcagcgatgttgttattgttttctgaacctcacaatattttaaatacgagaaaattccacatgaaacacctgaaagtccttcttatgtttgaaacttggaagagcctgtgacctggaccccacactcctacgaggcagaagtccactggcgctgggtagctgctgccctctttacatgcagcatcctcatggtccccacgggtcctccccggtctagcgtctgcctcacctctgtaggcaagtgtgcttgtgactacagcggactctttaggttgctcaaatcttttcatttctatcttcttctttacttcaagaatagactgtgtttgccaggtaagcagttgctgcattaagtgcttagaactttttagaatttttccatatgtattgtattaattttcataattatggccgtgaacttttaagttcagttaggttttgtgtttacccttttatatctgaaattatttcccaaatcttaaaattgatgtgccattttacaaagattggcttgctgtaactttgaaagaagtccaggtttcctttattctcttaaattatcaagggaatcagagataacttaaagaaaatgagggaaaaaagtcctggcactcactgttatttgctattgtgctatctaccacctctgcatttttagggagtccaggaaattgtaactgatggggaaaaaggcgtcaggtaggagagaaacttaacataagagaaataatataaaaagaactgattaataatggggtattattattgcatataataatgtagagagacttttagaaactgctatgaagtaggtatactcccaccatactctcaatgttaatttcaagattcccaaatttaagcagcatgccatagtttatttttttccttagaaattatttaactgttttaggattcacatagaaagagtttaatatctgccaaacctcctatgagacaacacagttttcctcatctcaatatatgactgcccgaatctgattttcttagggagtctgtagagcctgtgggaaaataatcatcagatcggatgtcaggtagaacctagcccaagtctttgctctggtactggataggatcacacacacagaagtcagttcctgacatgctcagaggttgtctctcttcctctgtgaaaagagacagtaacaggacttactcatgaagaccaaataaaatagtcttcctgtatcacatagcatagtgcttggcataaactaacacaccataaacattttgtgttttgtttatggcacaggaaacaattagtaggatgtgaatattccttcactccggataactcttgagaagtcatcatttcttactgaaatgttttgacaattgtccgtttttaaagagtagcctatgatatctaataaaaatgggttgatgctgtttttccccatccctgggacatagtcagaatttaggagcaaatgtgtattacatttatccttgcatctgaactatagtctatcatgcaacagtcccacctattctagagtgaaatatttagcagacattcagtgctcgtattcgcttattttctgtttacaaggtgaggtgttgactccccctgatcccacaccacccctagagtattgtgggacgtgtgaggtgtttgttttgttgaggatgatggtgagggttccgtggtactgaaagttcttacaaacttgtctcatatcatcatataggcaaaagagttgcttgggtcttccacctttcatgtggttgttttgaggtctgataattttaccccaatcttctgggttgctatgagacttgaacacctggtaaatcactatgctataagttattatgtaagctcttaacattctaaacccagagagtcagatgtcctttaagaaatgaaaatcaagcatgttgttccctttgagactcagagcccaacactttggagaaaaggatacagagaaaggaaaccccccaactctggagagaaatagaccaaagcctatgaaatctacttgagtgcaaatcaacacttttaacttgggccttttaagttgctgcttagtatcttactcagcttgattcctaacttacttaaggaaggagggaagaaagtgattgaaacatccaaaaaggcaaaatcaaaccattccctcttggcttggattcaaaggaaggctgcatatttaaataatttctgtttttgtagaagtattgaagagatttctttttactttctttgcttcttcctttactgtttaaaacttttccttccccttttgtgttgctggtatttattataggcatcacataggtaggtatttgtctttaataaaaggatgcagccatttaactctattgtgatatgttgtcttatttcttccatattttttgtttattatctattagtcttttttcatattttctttatttaccttgtgttttcacttataagatgaatactttttgttttgtgctaatttaagatttcatctgtgtatttttactttactattcagttcagttcagtcgctgtcatgtccaactctctgtggccccatgaatcgcagcacaccaggcctccctgtccatcaccaactcccggagttcacccagactcaccatgtgtcgagtcggtgatgccatccagccatctcat

SEQ ID NO: 27848 - DNA, 930 bp, Bovine  19866880987248
  misc_feature (1)..(1): n is a, c, g, or t
ncctttgataaaggtctcagtaaagaaatatcagatataaagaaccaaacagaaactttaggaccgaaaactataataactaaaattaaaaactcattgggtgggctcaacagctgaatagagacaacagaggaaagaaccagtgaacttgaagacggaacaatataaacagcccactctgaacaacagagagagaaaaaacaaaacagaatgaacagcgccttggagacctctgggctatacagctgctgctgctatacagatatccccttaaaacgaacagagcctccgggactaagaggaacagtaacagaagatctagcacccgtggggtcggaattatacaagaaaggagaaagagaagggctgaaaaaagtactcaaagcattaatggctgataatttaccaaatttggccaaagacataaacctacagatccaagaaactgagcaaaaccctaataggataaacccaaagaaatctccactaagacataccatagtcacactcctacaaacaaaagaaaaaaagtgagcaaaaaagaccttgaaagtagagagacaaaccactcctcatctaccaagaagcaataattcaagtgccagcagaattctcatcagaagctatggaagccaaaaggaagcagcctatttattttcaagggatgaaagaaaagatctgtcaacctggaattctatattcagagaaatcatccttcaggagtaaaggggaaatcgagacattttcagatgaaggaaggctaagaggatttatgctggctgacctactttagaaagtggctaaaggaagttcctgaaacagaaggaagtgaaaaaagaaggaatcttagaagatcagaaaggaagaaagaataagggatagagtaaacatatgggtaaatacaacagaatttccttttcctcttgagtt

SEQ ID NO: 27849 - DNA, 1817 bp, Bovine  19866881010619
  misc_feature (1)..(1): n is a, c, g, or t
ntggtgaatcctttccgattgagcttcagttactttgcctagagcctcagaggaatctctgttgcagctatagccttgcaacatgcatttctttaataataagatttgaaacttaaaattactccttgattcatgggctacaaaatggaccttgtgttagcagatgaaaacaacactaatttcattgaatatctccgtcaaagctcttgggtgaccaggtgcactgtcaggaagcagtaatattttgaaagggatgttttcttctgagcagtaggtctcaatagttgatataaaatactcagtaaaccatgttgtaaacagacgtgctatcctctaggctttgttgctccatttatagtgcacaggagagtagatttaatataattcttaagggccctaggattttcagaatggttagtgaacactggcttcaactttaagtcatcagctgcattagcccctaataagagtgtcagcctctcctttgaagctttgaaaccaggcattggcttctcctgtctggctataaaagtcctagatggcacctccttccactataagactgtttcatccacattgaaaatatattgtttggtggagccaccttcagtgattatcttagtttcacctcctggataatttgctgcagcttccacaccggcactttctgtttcatcttgcacttttctgttatggagatgactttgttccttaaagtccatgaaacaacctcttctagccccagtcttttcttctgcagctcccttccctctctctgtcttcataggattgaagagagttagcacctttgctctggattgggctttgacttaagggaacattgtagttggtttgctcctccgtccagaccactgaaactttccccatatcagcaataagagtgttttcctttttttatcattcaggtattccctggaatagtacttttaatttccttcaagaacttatgatttgcattcacaacttgactaacttttggcacaagaggcctaatttttggcccatcttggcttttgacatgccttctgcaataagcttaatcatttctaacttttgacttaaagagagaaaggtgtggcccctcctttcatgtgagcatttaggggcaatcgtagggttagtaaatggtctaatttcatcatagctgtgtttcatggaatagggaggcctgaggagagtgagagagaccaggggatgcatggtcagtggatgagtcagagcaaaaacagcatttatccattcagtttactgtcttacacagctgtagttcacagtgtcccaaaataattgtaataatatcacagatcaccagaacaaatatagaaataatgaaaatgtttgaaatattgtgagaattaccacagagacatcaaagtgagaaaaacgtccatagacgtgctgggtgcagggtttccacagatattcaatttgaaaaaaatgcaataaagtgagacatgcctctatatccttcctttgcatctgtagagactgtgttgtttggcacattctcacttggttctaatctgatgatgcacagaccccctggcagtgatgaggcaatgctctgtgtctagaacgcaggctggtggcaaaagaagcacttggcatgtggcttcactgagacttgtaaacaataattaaatggacttatgcatcctcattctgctgtttcatttccttctttcaagatgcaagaaggaatttgagttctggataataaacaacaagaatcacagcactctgcatttaaaccaaatgagctcaatgagggtgtacaattcttggaattacaattt

SEQ ID NO: 27850 - DNA, 636 bp, Bovine  19866881024653
  misc_feature (1)..(1): n is a, c, g, or t
nttttttaacttttaaggtcttttaaaatcttattccaatatagttattaattttctagtaaaaaaatttcatatttcaactttaaagatgtgtccaattacaggcacccaccaaagaaactgcatgctgaaagagaacgagaagataaatatgtgcatgtaaaatattaaatttatactttcctacaagtgagaaagccccattgaaattctgaagtccaagccatcatgttaattaacggttgaatgatgtaatctagcttctctttcgatgagtctctcttctttctttgagcctcttttttttttttttttttccacatcatatatgttaaacctactttagcaagtctgggaataacttgggttgttgatcttccaaagcccattacttgggagttggccttttagacccactgcagaatatgtaatgtctacttgggagctgtggaaagccccatccaccacttgaaatgaaaatccaggtgttaatcaagtgtaaagaagacaaagctataaaagagaaataagaataaatatcccttggacatcctaccacatcttgaccatgccaggtgataatgaccctgcatccttgctcctatttagggcagggcccctgcttgcttcttttga

SEQ ID NO: 27851 - DNA, 1653 bp, Bovine  19866881078114
  misc_feature (1)..(1): n is a, c, g, or t
natgtcccatcacagcttattcctttgtccatatctttatacatccagctttgactcacacatgcatcctattctctttagagcatgtttttctgcttttcaagtcctctgaggcatcatcatttttcctgctatgagccctgtgccatgctcttcctctctcagaaactctccagcctgttcttctccattcctaaccagccagtgtctactcatcttttgagaaagcttctacctttaagatgagtaaaattccttgattatatgcccatacactctcagaatatttattacagtatataattatgtattcatagaaaggtcactggaataatgtagatttcccccctactttctctagcagcatgaaagcatggtttacttacttggtttactccccattggatcaggaggacctggcacagtgatgagtagaaaggagtcactcaatacgtatttatgaatgaatccatgaataaatatgtgattctgctttctgattatggactacacataaataaatggtaaacacttgtgcttcttatttagaatacttatataagattatatatgaggcttagtatcttaaagcatattttaaatagcaggtaactcaatttggacattatgaaaatccactgaaatcctcattactctgaccccaacatacactttgtttccttcatcaaagatgttattttagcatttttagtcatgtctctgctgaccattcattctgatgctaatatggaattggtaagagatttaaacctctgtgaaaatgactttatactcctggctacaacatgaactaatatttatcagcaaaagcattcaaggcaacatgaccccttttgaattcaaagaatcaatgaaaatgtcaattatcactagatggacaggccgaaaagaatacattcttgtctgtagtgtttttgtcctgcaagactcatgctcctgttccattttctgaataatctagtaagattcaatttactttttcaatttgtctccagccaagcttccttctgtcagctctacagaaatttcaatgctggccacgtagagtaacaggagaaggacaacgagaatgagattacctgtgcatttgcgatctgtgtcttctttctttgacccactaatcgtcagcttgcagttgaagttttcctcccagtattcggcaaaccacacatttcttcgattgttttcaagagtgcgggatgtaaaataggcatcgaaccctaaacagagttaaatgaaaaggtcattgcttgcggggcactgctggaacatttggaaataaaaataccaataatagtttttctttgttttagtggactggatgcttgctcttttgtgtcaatcaaaaaaaaaaaaaaaaagaataagaaaaaggtaaaaaattctaatgccaacacacatggctaaatctttacttcattctgtcaggcagatgcgtggcggacaaatgacatttcacagtgaaatctgagttacagatcttagcgataatatgatgacaacagcatcccttgtgcctcttgggaactagaccagggacaaagcatctttatcatcactgagataataagtgatcattcccgtacttactatgggccagactctggcttgacgtcggttctttctttcatt

SEQ ID NO: 27852 - DNA, 1210 bp, Bovine  19866881081974
  misc_feature (1)..(1): n is a, c, g, or t
ncttctgaatgaggcatgtaggtgctagggaggatgatgttatatggtaaatggcctagagcattgtaggcctccaataaatgttcatttatttaaagtgtctctttgccaacgctgaatttcatcatctgtagaatgaggatacggcccgagaaagcaagcatgtcctctgacaaccttcgtctgcaatggccactgtctgtcctactttttcactaatcagactctacccaagaccctattaagacagtgtcatggataccctctcagttactcacagttgctccttagaaagtattattttatcctttgatagacaagtatatgctgccctccggagaaggcagtggcaccccactccagtactcttgcctggaaaatcccatggatgcaggggcctggaaggctgcagtccatggggtcgctgagggtcggacacgactgagcgacttcactttcacttttcactttcatgcattagagaaggaaatggcaacccactccagtgttcttgcctggagaatcccagggacgggggagcctggtggactaccgtccatggggtcacacagagtcggacacgactgaagcaacttagcagcatatgctgtcttcaaagatctcaagtttgggactctatggtctcatacctttaagaaaaaataatccagattcctcttacagtgttgtcaatctaacaaaaggagaatgattttaacatcggcaactgcaccaaagcacccaccatggactgagctgggtgtttaattactgaggtattaattatcacatcattcttcactgtggtgtttatagcatcttcatatatttagcctgtagaaagcactttaattttttgaatgacaggaagagcagaagtatctattaaaattctctctataatttgtgagtcataacaagttatattttcatctagacttttgaggcaatcaaactagaaattttgatgtaagaaagtggtaccaatagaagatcaagaattgggtagcaatggggcaggggagagaatattagtaaataaaagcagacctcacatagtcttcgaaacaagaccaactgtatacaaatcactgtgttaggattttggggaatttgactaggagtagaacattctgaaggaacccactgtttagatgggggagatgcctggtatctaacaactcttttgtgacccccatgggactgtagc

SEQ ID NO: 27853 - DNA, 873 bp, Bovine  19866881088466
  misc_feature (1)..(1): n is a, c, g, or t
ntttttttcctgtctctccaatcagcataactaaagcccttccttcaaaatgttttttttttttttttcctttttctttcacttaatgtttagtcagtggctaaatctatgactaggaagaaaatggaatatcattttgaataaaattccttctgcattgttatagatgtttgattatataagtttaggtgtggagctcaccgaaaacttctggctgctgagacatttttagatcagagtacaaaatgaagatggtaaccaggcaacgtggttcttgtacggttattaaaaataaaatgtgaagcttccacgatgcagaataattttctgacaactttgcctggtttttgctttgtcattggctggaaaaataggtagaaattccatttgtcgaactctgcattgctttatctgggttaaattcattatttaaggtcatgattgttggaaaatcatatatatgtacatgaatgtaagcatggtaatttagtatgactcagaaaattcttaaacatttctgtactatatatgtagtgcaaaaaattaataatttaaattatatatataattatatatacatatatgcttgacaaatgttcacaaaatttactatggaaacaaacatgatcttgcattcattagaatgttttgaagcttgattaaacatatgtatattccttatatatcaaggtattgttgattaaaatcttggaaacctttcatataatggatacttttcaaagactggcactgagatgcagtcaattatggcaacatgcttcaatatttatttgatgtttctgtagacatttgagcgtgtagtcttgatacatatagcaaaaatggatacactcgaagtaccttgtcttctgt

SEQ ID NO: 27854 - DNA, 1975 bp, Bovine  19866881189948
  misc_feature (1)..(1): n is a, c, g, or t
nttcgactctttggactgtatggaccgtggctggccagattcctctgtctgtgggattctccaggcaagaatactggagtgggataccgtatcctccttcaggggatcttgccaacgcaggaatcgaacggacgtctcttgtgtcttctgcattggcaggcagattctttaccattagtgccacctgggaagcactccagttctttactggccccaattcccttttttcatagtctcccccaccaatgccaacctgccagagggctgcaccgcctttaaaggccttctctgtctgaggcaggaaggaggcttgatctcagtgtcatcctataagtgtcatttctttgaaagatcacaggctctattaatttctgattcttttcgtgtgtagacgattccaaacaagagttgcttacattatagattagatgagtagatggcttaaaaggggaaccaggtctgggcattcttgccaaaggggagagaaaatcagtatcttctttaagattgccaccacacatcagctctcagtggtgactctgtgtgttacacattgcccgccccccatcatggctttgcatgatcctcttccctccctcctttctcctacttctgccttctttctccccttgcttccttcctttctcctccactccttccttccacaaatgtttgttgggttcctactatgtgccagcctactgtgcagtgtaacgctgtaacaacagtgagcaaaataagcatagacctcttgtcacgagcttgtttcggaggaagggtggcagagatagatatgaaacacataaagtcacaagtaagtagtcacaggtcagggtaagtgctatgaaggaaagatacaggggcatgggggcctttggcaaggggacttgatctagtccatgctgtgagggaaggagaaactggccttagaactgagagcagaaggaagagaagagtttattaggtaaaaagaatggatagaacattccagaaaagttaaatgtgccaaagccctgatgtgggagggagctgtcctacatacagaacaggaaggacaccagagaaagggggtggggagagatggggacagtggagatgggtggacaggtgggaaagttagagctacgacctgtagacttggattccccaagaccacttggctgatgcgtggagagcaggtggttgctgctacaggcagccaggtgagaaacgatgactttggcctgggtggtgatggagacaaatacttggaatccagagaatctgaggaaggaaaatcagctcaacaatttaactagctttgtgaccttggcacggaagttggttaactgccttgacctctgtttcctccagagcacagtggtgcctgatgttactggccctcctttgtccccagagagtcttctcatgtcttctggatatgattcacctgctgtgcatgggcacaggaaggcaacagtaagtgggccgtgtccctaagggactcacagtctatggaagaccaagttagtgtcataaagtgtgccaggcgcatgatccaggtgaacaggcagaagatgaagaaggtcagagaagcagacaggactgtgtctgtgagagcagggaaggcttccaggaggaggtgatgtctcagtcagccatgaaatggatgagtaggagcttgccaggtgatggcaagtagagaggctggagaaaatgacatgtggaagtgattcttaccaggggcagctttgtccccaaacatctggagacatttttggttgtcacagccagagtggtgctacagatggatagtggtcagaggccggtcatgctaaacatcctccagttcacaggacagtcccccaaatatacaaagaatgtcaactctgctgaggtaaaggaactctgctttttaaggtagttgctggagtaatacatgtgaaaagccttagtaagttagacaattctatatacataagtctcttaaaatttt

SEQ ID NO: 27855 - DNA, 1436 bp, Bovine  19866881396614
  misc_feature (1)..(1): n is a, c, g, or t
nctttgtgattgtttctccttccaccccctccctgttgttcatgctgatagaatacatgaggaatgtatagaaaacacttagcacagaacctggcacatggcaaatgaccaaacaactttactaccatgagttatttcctaaagacaagcaaaaagacatcatttctctccactctttaggtttagccttggataaagtgagcacacacctggatgatatcagtctcttcccccacatcatggccttgactgagttacagcagaaattcacacccttagctttgcttttgttgaaggtcaaagagaaaaaatgttagcatttgctgaatctcagacagcatggcacttaacagtttacaagggacttaactgtatacaaggtcttttccaacgcatttgcctcactctgccctcctagagcccctgagagtagggtagagattatcaactctatttaacatttgtaatcagtggagtttttcagtctcagcaacctacccaaggtcacagagcccacagaagagatgagaaaaacacaatagaagacaacatgaaattctgccaactcttcctcccacagcactccaaagtggcattttcttcttccagacaattctcaggttgctaatatttacctaaaccaaagcaggagcaagaggcagttaccaacgctgcttgatgtcctattgtcaaagcaaccttgccaagaacaaccacatgaggcttttccaatggagcatgaaaaggatgcttagacttataaatataaccagagaggagaagccacaggaacatatgtgtatataatctgcctcaaaggtatgccacagaaatgaataatcaggagtgaacgtgtcccctggcctaaccagtaagtccccagagaggaataattaaggattcaatggtcctccaagcacccacctccttcaccccagctcaactgcagaaaaattcgaaaagataatttgtacactggtaacaatgggaaccaagctattttcatatttcccttccaccaagacttaagtttccacagcgattttgtgtaaggcagttttcccccctttcccaaagactccatactcccttctaccatacgtgctggctttaaagagaagaggagaaaacatcctgaagctattttggtaaaagctgcatgtatgtgggttgtgggttgggggagggaaaggaatgatgcttgtagggttatgagatcagatgatatttaaaaaacaattgataatctctcacctctggctgaaccatcaatattataacacatttgtcacttgggggggttttattgttggtttcaggtaaatccagctattctccttcagcaatcatcaggtttggctcctgaattctttccctaagcaagggtgcaaggtttagatctcatctctaatgaaagcaactcagcaggtaaaata

SEQ ID NO: 27856 - DNA, 1507 bp, Bovine  19866881523221
  misc_feature (1)..(1): n is a, c, g, or t
nttcttgtcagactgcagcaatgttctccaggaacgttccagaagcattaacactcaggacgaaccgttaatttaaattctaccagctccctttccctaccagtcagcaggaagacgactaaaaggcagacaacagagagtgagcacgaaggtggaaaaactgaaagtcaagcccaaggaagagggattaagggaaccagggtgaaagggggtacttggtgtcaaaagagaaggttcactgtggatgagaaagccggcttcagttagaaagacagacaaaacccttaagtgacagcaaatttgttccatattgtccccaaagggaaaaatgaacattataagaagaagtacttgggttcagctcaaggaaaagtgctactttggggaaataatagatttctgaaaatgctgcagctgttataggcacacctcatccataaaagtgtacaagaaaagatggaccaaacacctgagatggtgccaggatacaataagctgctgggccagattcctgatccaggccttccttctagccctgagattctacaaattatagttaggtgctttgtttaatcaggcttctattttatgattctcatcttgaatgaatgtgatcaaaaggtattctttgagctctctttcaaccttgaaagaacccgagaaagttttcttcctatgctggcaatgctgtaaaggacatttctaccatttattgataaatttcttctccaagtacaggggttatacttgacacttgttaaaggattatatgtgactggctgttaacaatagtaccctagctgtaactaatacaaacttctcattgctccccaaagaaatatgttactttacattttagttcaagggaaagctggggaacatcagtcaccatacatgagataaagggtaatttgtccgattaaatccctgaactaaaagttaaacactgagaacaccatgcatattttatgattctcagtcctgaaatgaatggtcaggcacacaatgagataccaaaacaggggtcatacacaggtgatgacaggaagggacacagcttgaaaaagaggagcttgatgggaggtggtaaggatatcaaaccgaatttttcaaaggaaactagaagagaggaggatttttagaaagcagagtggccttcataaggtcctgaggaaatacagagtacatcccatcccttctctgccaaaggcacttcacttgggaggaaaggaatgcagaggtgagggcatgaggcttctcacatcatgtcaagcagaagctcaggagacacgatgatgatgaagaaagtcccaccctgatgtgggccctccctcccccacctctagtctcaaaatccttgttcattctacccagccactatgggctctcttctctctctttctctcttgaactttcttaggcatgcccctgcctcagcacagctgtatctgctgtcccctctgactggaatgcttcctccacccccacataatgccctggcttacca

SEQ ID NO: 27857 - DNA, 1116 bp, Bovine  19866881854583
  misc_feature (1)..(1): n is a, c, g, or t
ncacatcattccccatgaacatgtccatggttatcaacttactggcatacactgcatttcactactccaactggcatggcactattcctctggcccaaggatagataaagtaatgaaatgatattcaattgatttcacagtacacatgtgttatgaatttgaaacacatttctgacacatactatgctccttgagcatatattttagaagaacttactctaaggacttccttttatgactcaaaccataatctggaaccatcacagtccttggttttagaatactatgtggtttcattttcattttaaagacagccccaacttctagctgctgaatcaaaccatttaggggaaagacatattttcagttggaaaactagccaaagtccactaatcccttctatgattatacagagaacagaagtaacaatgtaagcagtcagattcaactaatttgagaagcaaggatatgtaaatttgtagccatttcgacttcagtccttgttttccccatttagggcactatgtccttcaatgtttaacagacttctccaaagtagcatggaatcaggctccacatttgatgtgctgacctctcatcaagctacacttgcactctctctctagagcatccagtgagggcttagtcccagttctggtttcagccgtaccagccaatcagagccaacttcagtgaggaacggacaagacagctcattaagatcaacctgttaggactgcccaatttgcatatacccacaaccatatacgggtaagcacagaactcagatatatataaatcacgttcagaatcaacactgtagcactgcatgatttgcccacattcacatctccagatagacacacactgattgcattaagattcaacatattacaactgctaaacttaccgactcgtataaaacatgtaactatatgatgggagcatgtatactgaacataccttggaccaacatagtaaagcccaatcattttgaaaactttgaacttttgtgactgaatatagctaatccagctacattaactccatcatttgaaacaattaatatacatccagctgttaggagcctaaagtagaatcaacatcaaagttctc

SEQ ID NO: 27858 - DNA, 1202 bp, Bovine  19866880378993
  misc_feature (1)..(1): n is a, c, g, or t
ntgggaaagaagaaaaaagatctatacttcgttggcacttcgttgctttggtgttttattttaggtaattgcctcaaggccacacttttacacccctccttcagtgtttgttgagcagccaatgaaacggaaaaccccaaaacacctctaacacttccttcctccctaatagaccgaaagaattcatcgagtgtgtctcccacatccggctcttgtcctggctgcttctgggtgccctcacccataatgcggtgtgtcccaatgcctcctctccctgcctgcccatacctctggatgcaggttcccatattgcagaccatcttattgttatcctgattggatttccagagcaatcaaaggtaagtgatttctgcaagattaaagccatacgcatcaagattgctaatggaaacccttatcggccaattacatttcttctgagaaggaaatgcaccttatcacttgccctcctgtggatgctaggaaggcaactttgtgctaatgccttatttaaagttgtttaaattcccagactatcttctcttccccctaagttgtttttcggtttacttttatgaagacaaattatagaggcaagcaaaagttagcttcctaggcattgctgtctcaaaataatgaagagaaataaaaggctcgaaatataataaaacttccgtgatcagtttttataaacaaatatgaagtggagggaaatttattctctaatttttcatgcactgtcttttcaactcaaatctctagagatatatgaagatacaaagtgaaaataaggccagttgggaactcactaaattatatatgggaatcacttacacagaaggaacttataaattgtagagacgggtggtgtgcttaagggaataaagtaaatccaaggcttagcatcaatcatgagcctgtacaagcaaaccagacacattagtactgctcagctgtgaggagtctaagtcccctcacagagcctaggccagttctaggagctcatagtggttttgggaacagctgggatttaggctagctagggcaagcttcaccagcaatagattttttttttaaattctgcaataaaatagagcacccatccaaattacctgaatgatgtttacaaaaggaagtaggcagtcggttcctaatatttcaacccaatctgtgttgattcctaatgatggtactttgtaatt

SEQ ID NO: 27859 - DNA, 999 bp, Bovine  19866880379117
  misc_feature (1)..(1): n is a, c, g, or t
naaggtaatctggccaaagtcggggaggagagcagggtccccatactccttggcctgccagttcccagtgtggccccccaggcgcctgcagagatatctagttcctgcccagccatactcgtgccctctttcgtaacagactctgattttcctctgtggacccaccctcacccattctcagaccgggattccatgcacccaaccttgccaatcagccagtgccacactctgtctgcagtgattggcttgggaaagacacgtgacctgggttggtccagggtctagcgctggaactcttcctaggagcatcaaatcagaagtctgctctttgttctggggttgcttggctggttgagcggaaggcagaatctgtgggcatccacaggcgagagccttcctaatatagccaagtcagaggacggcaggctcaggagatggagaaaaagtaaacaacggctaatgacgtcgtttggactctgggatctggctctacctgcacaaatgcaatccttcacttcacagttacctgagcttatagatttcccactttgcttaagcctgtttgagctcggcttgctctcacttataacggaaggaatcctgactgctatattagggttcacggaatacagttgaagaaccactgttctatatcatccttcaaatcaggtagaatgcattggatgttttaaaatttctgccaacctgttttcatggataataataataccaataataactcagttcttcagtggttttcaggtttcatcacacttacagaagaacactgtgaaaaaaacccaaccatttctacctgtagatcaggaaattggagctcagtgaggttaagagaattgcacagacacctgagggattaatcacataaatgcctttgcaaggtttttttttttaggatttatgacaaataagtgagaaaagtattaatacttcagttacagaaagagctcacacaaattggcaaacaaaacacttccagca

SEQ ID NO: 27860 - DNA, 2025 bp, Bovine  19866880392640
  misc_feature (1)..(1): n is a, c, g, or t
ntgtctgtccacagggggacaggctcttgctgctcaaccagggacccagctatctcctgcctcaatagtaagagttgtgtttgtctttgtcccactttttactcagactacgtttctagcagatggaatgagttgctgtttgttcaacacagggctaaagctttttaccgatatttgtaggcgagagttttgtagggtagacttcacctggttacctatctttactttgccttaatatgtaaccagtagaggttgcagttcagtctcagatggttatagtggactgagaagttacttgttaaagtctgggctgtgctgaggaaaagagcactggggggcttattaaaaggggatatattaattgattcacatcaggaggagaaataaatttcttatattttatgacaggaagcagtagtacaagtgaaagcaagagagccctcaggctgacagccagccttatttccttggatgtttgcattttaaagagttggctcttgagtcctggggaagacagttctgggtggtagaagatttacatctcaaagagggagaggaagaaagcaacctttttaaataactgctctaagagggtttttcagggctatatttgcctattgccagattttggctgggacaaagagtaaatttacctggtaacattgagctctgcaagcaggcattttaagggggctactggtgaacagaattatttgtgtggagagtctctagtttctaattggcccaggttgaggcctaattgagaagaggttcagaggagcctaaatgaggaggctgaggcctagaataatgactatcgtgtttcttttccttaagttcatgtcagttttccccccagtgtcctgacattttaaagtattagcaagtatctcgagatgaatagaggaggctttggaattggcaaaaaagatggtagactttgcgctagttctagagccatagatctgattttgtaaagattaagaaggtgaagacagatatttttaattcttcaaagaattgagtggcagcctcaatagtaccatagatggttggctggcatcaccgactcaaggaacatgagtctgagtaaactctgggaactggtgatggatagggaggcctggcgtgctgcagcctatggagttgcaaagagtcggacccgactgagcgactgaactgaactgaactcaatactaccaagggggtggcctacccatccaactatattattttgaacttatttcttacttatatcagagagagttccagttaaggcagaaaccaagattcttaaggttctagggtgcctggatttagagttctatgtctttgaaatgtttttttataaatcactcaacaaaggttttatgatgtatttctttcctctgggtaccattccacttcagcccaattaaccttcggggaaaggcttctataataattcctattgggccctgaacaccagcttccaagtgggccatttgtaccagggaggtggtggaggggagtttatggtggttgcagatttaatttttgttctaaatctgatttctttcctttaattttgttagtggagactttaagctatctgtgatcttttttatgtccttttttcatattggtaaaaggatatttgtttagggtcagagttttctcaaaactcttacaagtataaactcttttccaaatcaaaggacttgttgactggccattgatatttaggatccccaaaggtatatctattgtaaaatgtgactcaaaaccaactagcctttttatgacttatccctggacacggaggcatccccctaaaagggtacagaaaatgaagcaccatagtttaaggtcactcccaacagtagccaaagagaaagaaagtcaagcatctcatttgctgagggacttcccaggtggcactagtggtaaggaatcacctgccagtgcaggagacataagagatgagagtgcagtccctgggtcaggaagatcccctggaggcgggcacaacaacctactccattc

SEQ ID NO: 27861 - DNA, 1642 bp, Bovine  19866880441696
  misc_feature (1)..(1): n is a, c, g, or t
nttacctttgttgctgtataggtaatatgttttccccctcctctggcttcttttaagaaattttcatcttcaattttttttgtaatttgaaaatgatatgcctaagtgtagggtttttttttttttccccatttattctatttgttgtttttggaaattcctgatctgtagcttggtatttgaccttaacttgggggaaattactagtcattattttttcaaacattttttctattctcttctttctccatctcgtatactcattaaatgtatgtcacacctttttaattgcccccacagtcattggatactaagtgctgtgattttcagtcctttcttctctttgcttttctgttttggaggtttctactgaagtaccttcaagttgagtctttccccagcttatcttgtttactagtaaacccaacccttgtagctcaactggtaaagaatctgcctgcaatgtgggttcgatccctgagttgggaggatcccctggagaagggaatggttactcactccagtattctggcctggagaatttcatggcctatatagtccatgaggttgcaaagagttggacatgactgaataactttcacttcagttcactttaataaacccaacaaaggcattcttcacttctgttacagtgttgttgttgtttttttcccaatcgctagcattttcttttggtctttcttaggatttccatttctcagctcatgttgtccatctgttcttgcatgttgtctattttacctactagagtcctttgcatattaatcataattgttttaaattcctagtctgaaaattccaatatccttaccatgtctgattttgatgcttgctcaatattttcaaatgtgtgttttgctttttggtatgtgttgtaatttttttaatagtcaaacatgatgtattagggaaaaggaactgctgtaaacaggcttttagtaatgtggctgtgaggtggggtcatgggggtctcaatctttcagggagcctatgccactggactgtgaacttcacaggtgtttttcatttttctagaatgatacccttctaagtgaaagaggctggctagagtgggctggagttgaataatacctttctcccaggtgtgttaaggctctgataaccaccatcaggttagtctctggttaatttgtttcctctgaggtcagtccttataaagagcagaatgctctggtatgtttcaaaatggttcctttcctttcccttcagaagcatgagggaattttctctaatatactgtggaaacttggttgagctcctggatgtaaatctctccaaacagtacatgctcacccatgactggatccccctagagtttttatctcccagagtcgtccaaactgtgctttcatcaatttgtcaattacagatctggttttcctaccctggttctggttcctgtggtcgttttagctcataaatctctgctccacagagttattttctatattcacttgtgtgtctttctgatcatgtgaattcacaatttgccctgtattctcaccactcttatgggtcctagaaggattgttgatttttcagtatattcagctttttacttactctttggatagagtggtagcttacaagatccttacat

SEQ ID NO: 27862 - DNA, 1562 bp, Bovine  19866880531762
  misc_feature (1)..(1): n is a, c, g, or t
naacatatcattggcttgtgttatatagaatgcagccttgggaaagacacttgtggataaggaagcacccaaccaaggagatgcctacaacttcgtctactttgaccttttttgctaatttttagacattttttaaaatttaaatttatttattttaattggaggctaattactttacaatattgtgttggttttgccatacatcaacatgaatcctccacgggtgtacacgtgctccccatccggttttctttatagtccaactctcacatccatcagatcagatcagatcagtccctcagtcgtgtccgactctttgcgaccccatgaatcgcagcacgccaggcctccctgtccatcaccaactcccggagttcactgagacccacgtccatcgagtcggtgatgccatccagccatctcatcctctgtcgtccccttctcctcctgccctcaatccctcccagcatcagagtcttttccaatgagtcaactcttcatatgaggtggccaaagtactggagtttcagctttagcatcattccttccaaagaaatcccagggctgatctccttcagaatggactggttggatctccatacaaggtgcaaataatgaatgttaagataaataaaattaagtcagtttaaccccaaaagtacaaatcatttcctggacctatgggaaatgcgctgggcgtttcttgggcagcctgccttggaggggggtgcctcccagtgtggttggagctggggacaccagtgtctgctctcacccatccagagagtgttcagctcggggtctggggagctgggtggagaggcggtgggtctgcagagcagggccccctccagagaagttgctgagggcagaggaggtcctggaggagaagtgaaaatgccccctttccttttacccccctctgtgtggatggcagtagggcagcccgtccagtgatactgaggccacacaccagcctgcgcactgccgaccttttgctgtggtggtgtccctgcgaccacaggagctgtgtgcaagaagatgccatagctgtcgatggggttgggcacagatcagtggtagcccagggaacttactgcagagcttggggaacatcttttggggctcagttcagagaagagttgagcaagaaataggtcacagttaccaggcatagttgccgaacttcttattttctggcaggaccaagaaatgaggctttccactaattccatttcttaggtagtagcttggagctttgtcttccctttgtcttccaaaaagtggttttacaggtttaaccatatattccacccctcttttccttttaaaaagagaatgtgtgggatgcagtttaattctttttcttatgtttgttgttttgtgttgtttagtcactgagtcctgtctgactctttgctaccctgtggactgtggactgccaggctcctctgttcatggaattttccatggagggggtggctatttccttctccaggggatcttcccgacccagggatcattattgtacaattagaaacaaccagatgttcagtataggg

SEQ ID NO: 27863 - DNA, 928 bp, Bovine  19866880582891
  misc_feature (1)..(1): n is a, c, g, or t
ntgtataaagtgctcaacaatagatattaaatgcatagagctctgatccagtctgctacttataatctcaatcttgaactaatcacttggacctgcttatgtgatttggctctactaattactctatgggtttccctggtggctcaatggtaaaaaatctgcctgccaatgaaggaggtgcaggtttgatccctggatgggaaagatcccctggagaaggaaatagcaacccactccagtattgttgcctgggaaatcccatggacagagcagcctggtgggctacagtccatgcggtcactaaaacgtatgacacaacttagagaccaaaacaaacaaacaaattatacattattctatttctacccacatttcaagtttatgagcaattttatgtgccctttcaaatttatgtgcaatattatcacccaggttccagctttggatcttcccaataatgttgctgctcctctatcctggaagccttacctcaagttgcctttacttataacccttctagttacattcagtcttgtgcccagaacaacatcccatctgactggcctatcctgatcctgtagatagagtcaaatcacaagattcttgtggcaaaaaaaaaaaattatatcttatggttctatatacctacattatgtaaaacaaagaagctaagctcctaacagttactgagatagcaatgaaaagggagagtaaggactgctgaaaattcttctccataaaagcaagagaaaactggcaaaaattaccaggatcaactttttctaaactctggactttaactaaaggcttgcagccacccaagcaacattaactgaaaaaaaaaaacaaaaccctcattaagatcagagagctttgtagcattttaatttgccctggtcccatcccctattctcgggctctgaagcag

SEQ ID NO: 27864 - DNA, 4129 bp, Bovine  19866880604191
  misc_feature (1)..(1): n is a, c, g, or t
ntggatatatatgctgccccgagaagttctctcacattgaagaaggtctccctcccacattgcaggtggattctttaccatctgagccaccagggaagcccatgaatactggagtgggtagcctatcccttctccaggggaacttcccaggaattgaactggggtctcctgcattgcaggtggattctttatcagctgagctgcccgggatgcccaagaattatacttaactaaaactagagaaaactcaaatgtctttgaacaacactaaaaatcctaaaacatagggaatccactgcacaataccgtcaataaaaaccagatttataactcaataagtgatcataaagtgtgtagcaatgtttgaactgtgagaattgttaaagtagattaacttggtgagtactagtaagaatacaataattggatgataataaattacaaaaaaggaatgtcacatttttcttccaaggaatttcatgaatcaggagacttcctcatagctttctgagcttggcagcccagatcttctcaagactcaggagggactaaataggcttatttaccctcctagacctacctggagtcatcagcattgtccacattcctgacctgacctttgacctggctgccgtgaatggcccagttctagtcattcctctttgcaaatcccaaggggccatgatgatcaacgtctctcaggtctcctcttccacagagctctcaacagtgtccactgtcctttcaatctttaaggctacccaaggggccttttagatggtatggctcactgtcagcagttaacagaagacatatcaagtgctggagaagcaaggccttgcggttcccaacagcccatggaaacaagctcctggatgcattctaactgaaatgctggcttcagcaacttgaagaaagtcaaatgcttttgataggcatgggacgtagaatcacagaatgatgaaatagaactagaaggatcttagagatcttttcccataaccacgtaatgttaaaggtggggaaaacaaggcacattggtagtcagcagctgagctagactagaacttacagaccctgactcccatccaaggctctttccactatgacatactcttgaacaccatctggagtgaagtcgatatgtagattgtgcatgttcattgcatgacatcaaagcaatcttcagctgcagttggattaatcattcatcctaaatctcatataccatttatcagatttgcctcttcttccttctcctatctgcactatttccataatatggctaacattttcccacaaaattgtctacattgcaaatagcaccttgagtttatataacacatcacctctgaaaaaagcaacaagtttatatccattgtctcaattaaccccaataagtatttggttgtaagttttttttttcctgagatacagtaaaaatagatgatagtggaagggtttcaattacataatttacaaaaatccattttcttctcagtctttttgatcatcatcttttcatcatctttttttaaaaaaattacaggggaacccctacattaatacatagttctgagtttcaagaatcagacatttgctaggccagcagatgctttctccacacccaccatcacagtaacgctttgctactctgacttatcaagtcttaacattcagcaggtttctgtcgagtatttcaggaatatcattaatcattctatcgccttaaaaaggtgttgatagtgcaggtttgggacaataagctaaatgaggagaaaagttatagatctcccaactcaaagcttgcttgttattcaggaactacaaaactttcactacacaatgacagccagcattcaaaaatgtgaaatgaatgcatatgctttttacagttcctttcattaaaatgcagcaatgactcttttcaatgggtaaccaaacatgcaaaggaatgcatagacagagtcactcctttccctgagatcttttaacattttataagcattccattgtattgcttttgtttacttacctgtttctttttctatatcaggttgtaaatttcttgacggtaaaaattttaccttactcatgtctctatcccaagcctaacacagtgcttggctcttaacagacactcaatatatttgcaggttaaatgaacaaacgaattattactttaataacagcactatcacttgaggttctattgcgtatatacctgtctcccacactagattatggactccttttacccctaatgccagacaactagtaggtattcaataaattgatgagtgaagacggggaaaaataggaagaaagaagggggagagaaagaacaaaaataatgatgactaatcattaaagacaattttttttaacagaaccagttggcaaaatgttcaagctaatttgctcattggtgaatgcaacaaaaccctagcaattatagattatttaactttcatgttttctactatttgagaacagccagaaaggtccctgacatacagcaatttgtaattgtgctcagaatgtaagtgaaactcatttacgttcaaactgtgcacacaaaagatggccgtttggctgaaataacagtagccacgtggcagctcagatttcatgtactttattccacctgtgtgcctgaatattcggagaaggcaatggcacccaactccagtactcttgcctggaaatatcccatggatggaggagcctggtaggctgcagtccatggggtcactaagagtcggatacgactgagcgacttcactttgacttttcactttcatgcattggagaaggaaatggcaacccactccagtgttcttgcctggaaaatcccagggctggggagcctgatgggctgccatctatggggtcgcacagagtcggacacaactgaagtgacttagcagctgcagcctgaattttgctgcagaatcttagataattgggttgttggatgtaaacaaatcatctctagtctcacctgaccctggggttacacttctctagaaagctccccctttcaccctcttcaatctctatttcagtcctccccacacttttcaaaattagcccccaggcccactcttttccttacactttaagaaaacagaacccatctgctttggatggaattttgtctcccagaattcacatgttgaagtcctaatctcaaaatgtcactgtacttggaaataaggcctttaaagaggtaattaaattaaaatgaggctcttaatgtgggctctcatccaagccgactggtgtctttataagaagaagagatgagagcccaggagagacaccagatatgtgtgtgcacagagaaagggccatatgaggacacaatgaaaagacagccatttgcaagccaaggagacagtcctcaggagaaaccaaacctgttaacaccttggtcttggacttctggcctccaggaggcaagaaaattaatttctgtcatgcacaccatcctgtctgtgatgcttcgttatgacagccctggcaagttgactaaaataccatgttagaggaagtcctctaagagcagtggtccccaacctttttagcaccagggactggttttatggaagacaatttttccatggaccaggggtgggggggacagttccgggataattcaagtgagttacatttattgtgcactttagttctgtaacgataacatcagctccacctcagatcatcaggcattagatcctggaggttgtggacctctagagcagaggcaaatgctaagagtctgagttctgaaatcaaacagttctggactaagaatttggttctctctctactcaatcccagtttcctcatctgtaaaatgggaataatcataccaatgactcttaaaagcatatctccatcccagataggtcattcttctgagtaatagatcttatctattcaatttctcttacggatactgcacagtaaaacatgcaacgctgaacccttatcccttccctcaccaccatccatgtaatccaccaagtcactccagcaaagcgtaatcaacagctcctattccctgtcccctactcctaatcaatctgccaccaagtcctatcaatggactactaaaatacac

SEQ ID NO: 27865 - DNA, 1566 bp, Bovine  19866880612593
  misc_feature (1)..(1): n is a, c, g, or t
nttgcagtgtgtcttcttacctcttgtccctttcttcttgtattaaaacaattcttctactgtagtttggtagcgtttcagatgtgcctgatttagatgtttgtgttcgcttttgtagtcttttttgttttgttttgttttgaatgcaccacaaggcatgtgggattttatttcctccactagcgagtgaacctcatcccagcaccagaaatgcagtgcttaaccactggaccatcaaggaagtccttcgcctttgtaatcttaacctagaagctttctcccacgttttcgtgtctactgtcttctcattctttatgtcttaaatataatctcttctgagaggtcttccgaaaccactaggggggcattccttacccttttcttttttctctgttttagctcccatctctttatagacctttgaagatattttttatactttccgttcatctttcactctttaccataagcagcatcaagggctgtagctttaatttttattttttagctttttcatacactgtcacatattcagtatttggcacatagttcaggaagagaaggggacaacagaggatgagatggttggttggcatcaccgactcaatggacatgggtctgggtagactccggcagttggtgatggacaggggggcctggtgtgctgcagttcatgggggtcacaaaaagtcgggcacaactgagcgactgaactgaactgaaatatctgctgagtgagtgaaaggacaaggtacacataggcatgaattttgaagcttgatagcaatgctctcaggttttacatatgtaggaaaagagcggggaaatgaaatagctcctagctcattggattgttgtgaggcttaccaatatgaagaggagaaagtgcttagaacagtgccttgcacataggaaatactacagaaatgttgtatttttaagagtcttaaaaaaaagagtctctaaagagttatcagtttatatttaaatattgttttatgatggaatgaattatttttttctttaaggtattttttaaaatgtattttaattggagggcaattgctttaccatgtggtgtgggtttctgccatacaacagtgtgaatcagtcataaataatacatgtgttccctccctattgacgaattattcttgagtattgtgtagtatgttctgagtcatagcatatctgaattttaactccaggttgatcatgaatctcaatttggactgtaacactatcatggaagagaatgtactttaccatgaaggtaggagcccaggtattttcaagtttgtccatatagccagacacttaaatttcaggacactgctgtctatacttcaggttcttgtttaggcagttccaaaatatctgcaccttctaaaggagtgtaatacatttttggtacaatcacttttaaaaaaatagagccacattgattggataggtggttgataattcagtttgatttaaaaacttaaagaatgattcattgtcatcaactgcagcatatctctgaaattatttaatttctacccaataactccttagttcctgaaa

SEQ ID NO: 27866 - DNA, 2885 bp, Bovine  19866880660586
  misc_feature (1)..(1): n is a, c, g, or t
naaaaatggaaaactagattttaggaatttttttttcttttttttctgggtgagatcaagatatatttttatagttatgtcatcaataccagagaaatgttgtacactgatttttaataagaatcgtaacattttttggtgcttctcttgggctctaagagctttaacgtcaatcaactcttgtagtcctccaacagccctatgagataacagttattatcatccagattttacaggtaaggacagtgagctgaagttctgtaacttgctgaaggtcacatagccaagaagcaaagccaaagcctaacccggcatctgatgcctttattcctaatccctgagctgtagggcttctcacagatgacagatgtttcagcactgggtactgtctgcctaaccatgctaataaatggaaaagaactgaagaaaggtttttctcaatttgtatgagctactgaaaaccaaagtcttcaagcagctttaagtcaggtttgaccagaatggaaggctgggcattccataggaagcttttactttaaagattaagcaggtgtccttggcacaatcagattcttctccagtagtctcatttctctcctttactacttccaaaggtctagttactgaaatgtttttttgctacaggacactgatacactgagtcttcaaattaagtaacagtttgaaatacatgtttttgcaagggacaggtaaccaaatcacttgcatcttttgagtgcttactagaagtatgcatggctgcaggcagattcctgagacatacagattctgctgcatgagagttctatgatgcaagtatgtgttgggactagtaccaccttacagaagaggaaaatgaggaagcctgaggcacacagaattaataacttgctgttggtcacaccgctagtggaagagccaggatttgaacccaggatatctggcttcagatctccagctatatcattctactatactgcttatcaaaaaaaggacataatttaagaaaagtcattgcacagtttcttgttttatttatttgatttgtcctgaggcagtgctagtttggaaatcgtttaagaacattatttccatcactttttgttttacaaatgatgtaatgaaaggtttgtgagtttgctatttgtcttgtaaagtagtaattccgtattttattgagggagactttcttagacttaaaattctagtaaactctcccacatactgcaactagagagtagcccgtttgctgcaactagaaaaaagtccatgcagcagctgaagaccctgcacagccaaaaataaagaaataaagtcattaaaaaaaaacaccaccactacagttttaaagggaaaaatgtgattcccttagaatttgattctacttcaaacaaagctttcataattaaaaagcttttctttggggaagtggaatcatcagataaagtgctctgaagtgacagcacccagagaataatcaaacctgcatgtttgtttaccatgagttgtgttatagtctttgttaaaattatctactgttgatttccttcttgatggatttaatgttctcaatctctgtaaaacactggcagaaaaggttaccacaataccacatgtctcgtttttgcatcaaataagtgccatactttataagttctccaatatgtttataatgttctacataattctagaccatggttgggaatcatcatgcattgatatttttgttttgatctaaggcagtgagtgggtcttgaactctgtctgaatattataatcacttaaggaaataaaaaaactgcaaaactcatataaacaatgccagggtcccttcccagctatcaatccctgggagaggggccaaggcaatcatgttttgagagctcttcaagcaagtctgttagggttgagagtcactgggctggagtgttgttattttctttctttcttttgggccaggggtttttatgcaccatgaagcctcaactgttaagtcactgagagctctctctggaacagcgtttgtaacaaacatttcatggtaggctcacgccagctgtttgaattctgcaaatctttaaaaaggtgtctatatattctttttcaacatattttttcccaaggtttaaatacacttgttacaaggggccctactgagcagtcttatgaactaatatgtgtggtcctgggatatcagccatggagagaggtcatgaaggtcagatgcagaaggtcactgtaactgaaggccaagttctaggggaggtcagccagtaatgcagcagacatgatcagttcaggctgggggtggtcaggtcacagataaaggagaggactcctgcttcttgtagttctccaggtgtggccaaggcccagcgccaggcaggaggaaacaggaagcaggaggtgagcccagtggtaacatccacggtcctgagctgctcctgtagtggtttggaatggatctgggcgtggggcactgggagctgcaggccgggcatgtcaggaccctcagtggcagggacgtcagtgtagacaggaccacaccaggtagactgcagacagctgccagccccagctcacggtggggaacgaggtgtctgtatttcctgattcctgttgtccaatttatcctgaatatacttgtcaggtttttgtctctgactctatcaaagtcgctctcttgtcaacaggttgccagtcatttacatataactaaacccagtggtcaagtctgtcttcaaattacgttttttggccatgccattccttgggggaatcttggttccctaaccagagactgaacccacacccttggcattgaaagcatggaatcctaaccacggaccaccagggaactccccctcaaattactttggacacag

SEQ ID NO: 27867 - DNA, 1394 bp, Bovine  19866880753874
  misc_feature (1)..(1): n is a, c, g, or t
ntaacccctacctctagccggctctgtcaggtggacgaggctcatcgccactagccggctcaccctgccttcctccaggaagccttcctgatttacaaaagtgtgggaaggaccctcctccatgcctgtgcctacagtctgtgcccacgatccctaccctctttggctctgaatgccaacggtaggcttcagagagctgaagggatgtggcctgggcccatgcgagtccccagcacccacagcctgtgacccagcagggaaaggtttgctgaatcctgttgcgaggggcgggggagaggggcagtcttcccaaccggcatttgccggctatgagggaccctcacgctcactggggcttcccctgtggctcagcaggtaaagaattcgcctgtaatgcaggagacctgggttcaatccctgggctgggaagatccccgggagaagggaaagactacccactccagtattctggcctggagaaatccatggactgtacagtctgaggggtcgcaaagagccagacacgactgaacgactttcacttcacttcacgctcattggttcagtgaggccacctgtcaacacctgaaatggaggagtcaacggggtctgtgtatccagcgccctcgttacaacagtgcaggggggaaactgaggcaaacagggacctgcgaccatcaccatcacgacaggcaccccctgaggacacggggggtggccggcctcttgtcctactctcccacctgtgctctagctgagtcccagcactgatcacagggcaggactcccaagtcctcccagccctgctggactgggctcacctggggcttctcaggcttcctgagcaggtaacggcaggcgttcattattatcaagcatctcttggcctaatagacccagttaggggaggccagttagcctgcagacaagcccactgccaaggcctttctgagtctcagcggaggcccggaccccagagtccgagtggcccccctcggagcagggcctctgatggcctgagagccgggctgctgacccccctctctggggctgtatacgcctcagggcctggttctgggaagcaaacggggtaacactctaaagcatgggccttcaatccaaaccccccaaaataaatgtttaaaactctgtatctatttgtacattttcaagctgacatctaaatttctcatcgtaagtttaaatacttgtagaggatgtaatttccaacatattgtaaatattaacatttcaaaataaaactgttactgtgtctctttcaaatggacccagtggaattctaaataccatagcaattcaagatccaccgtcatccatcttaaaattacagaattggacgcttcttaaacactggaaagatagcaaggctcctt

SEQ ID NO: 27868 - DNA, 858 bp, Bovine  19866880784501
  misc_feature (1)..(1): n is a, c, g, or t
nctcagagacaaatttgcagacaccactatccattgctctgtcttgaaccaaccccaccaacatacagtcagatcaaagcagagtacactaatctgagactaccacagagaacaggcttctgctttacagagaaggatgcaatctccctttcatctaagaatttgctcctgataatttgaccactgacaatacaatattgccccagtctagtaaaacagtaccttcacagctggtttgttaattgcattgtggcattcgatgtgctggcagtggatggggttccaagctgtaaggcaaagcacagctgatgagtatttctcactgaaagtgtttgtgccctgtaaaaatgagttaaaaaattttttttcactacttttccttttcctaagtagaaccatcaccaggttttctaaaataattatttttttttaatctatgaagtattttctaatttagtaaaaacatcacagctccatccattttcccatggggaagataagctagtgggtgccatacccaaaaaccataatattatttcatgatgatatgcctagtaaatttttagaagtttttacatttatggcttcacttgatcctccaaataactctgtgggatagataaagcagattattaacctcactttatgtgtaagttaaaatcttaaaggttaggttcctatggtcacagagttagtaagtgacaagctgcaactagaacatatatctcttggttctcaaaaccctgttcttttccctatagcatactaggccaaacagcctagatttttggcaccaagaagttttcagattcataataactgctataagtggttatgtcaccattccatttcccaccc

SEQ ID NO: 27869 - DNA, 2127 bp, Bovine  19866880818725
  misc_feature (1)..(1): n is a, c, g, or t
ntgctaaaactcatatccactctcatatgtcaacatcattgcagatattcaatgattgcaagtatttttcaggctgtttagaaaatcccccacagaagtttatgaaatgtcctgagtaatactgcatcatttcagtaagtgtgaagatgcccaacacaaagaaagaatcactatacagagcttcccctcattcttcacctctgaactaaaggaagttcatgcttcagctacctgcttcaggagaagatcaaacatgaggatgaaacaatttagattcatttcatcatcttcacaatcaaagtcaatagtccttcctccttggtgtccaaaattcttgaaaggactacgaaatggactacgcacaggactccgaaatggactctgaaaaggactatgaaatggactcagcatattgtgctgaactcgtcgaccaggatcagaggcaacactcacctagaaaaaagaaaatcagcacatataagtgagctcacagaagctcaaatggctgtacaaaatacttgaggatgctgtggaaggtgtttccagctgtcacacggatttccttccttagccaatggaattactacctccaaatcccatgcatcttctcaaaacataaaaataagaaataaaatcatccaaactttctatttgtcaggtaaatgacacattatcaccctgaagaatgaaggcagcctctttgccattatatttttcatcccaccaacatgtccaactacattgtctgcatctatctaaaaccataaactgaacaatgacaacttccagagtaaagcattgcaaatcaattttagaaccattagcacagaatctcagattgactggtaaaagaagaatggtctctgacaataataattattacactatcatgagacaacagtacatcaagcctattgtactagttatttttcatttgcgaaccaactcttcccccacaaaaggccctcactgcccttttctgccctgttctatgcccaaggatgccaagaactgagcctcttctggccctcttgctggatggcttccagatgattcagtcaatgagaggtaccagcagaagacctgaagttggcagagagagaggcaggagtatttctctcccccgcctggctcctctgatgctacatttctgcagtatctccatcctctccagttcctctagccagcctttccctataacttcagctgccaaaaggcccaggaacacttgttccttcagccataggtatataaaggcttcctagtgaactactgctggcctctgggtgtctcactgaccctattgcccccttaacctttcccataactctataggccaagaatccataaaagactctttgttaaacatctgggataaattctgtagcaggaccctgactgacatacctgtacatcagtctcaagtcatattttctctctttaaaatctctctagtaatcagaaagctccttgaaccccatatttaaagtaaaaaaaaaagtaaaaaaaaaaaaaagagtatcccattaagaatcagaatacctggatcatgatagtgttatctatggcaaatcgcttcagttcacagaacctcaggttaagtagttgtaaaatgaggataatgagttctttccaactgcctcacacaggcctcacacatcttcacatgtgatgtcattacatgtgaatactctacacagtataaagtgttaatcatgtactgtaatattaaaggtaaccaaagaaagaaataaaatataaatattgggcagctggttcctatgaggtacatgagcaaataatgatttttttaaagcattttaaaagcatgaatcctatgagtatgacggtattataaaatatcattgattcttgactggagaatcccatggacagaggagcctgacaggctacagtccaatagggtcactaagagtgagatacaactgaagcaacttgggtagacacgcacataaatgtcacatatagatgtaaattctctgaatggctcttgtgagcatcatgactttccttggtcattgactattagagactaaaacaactttttagaaataaaagtaaatttaaatttttaaaaacttgtaaaaatttttaaaaagcactaaa

SEQ ID NO: 27870 - DNA, 2072 bp, Bovine  19866880834093
  misc_feature (1)..(1): n is a, c, g, or t
naactgcgtttttgttgtggttagctgcttactctcacgtgatcttgggcaaacacttccattttcaggcctcagcctcctcatatgaaaattactccggggggcttcaggctcctttccgtgccagtgttctgtacctagactaaaatgcagctgaggtgtctattgtgcacagctgcaatcatttcttagtaaaacacttgtgacttttctgtttcatcggtttgagcccaaggtcgactgaccctcacctcccagtgtgcactgtgtctctctgctgtcagtcaagggggcaaattaattctaatgatgatcagaaataacatcaaaatagcactaagaagctcagtctgctaccagacaaacaaatctaataatttcttttataaaggatacgaaaatgatccaagttttcattgtcaagacttggctgatgacgtgagatgcagaaatctgaaaatatatactcatatactcagtgtgatgtggtttggtctacttgcgttctaaagctaaatagttatgatttttgaatgtcttctatttttactccttgtgcaggtaataataatagtaacaatattcatatctgatacttgtggagcacacattgtgtgctatgctaggtactttacgttttgttcatttaaacctcctaacaatcctaatgaagtgaggtaggtattgttcctatcacttacaaacgttgatagaaacagtactaccaggggacacgtccttctgtgatatttgtaactaaatgcacagggtcgggcagtatcagtttacagcttcctttcgttgatgtatgctgaatctgccactgtgctggaagatgccaattacctcattgcctgagacttcagatgtaggaagattgttcagttgatggagcagaaatagcctggttttatttccagccttgcccttgagttttctgaaacttcccatgagaaaataatttaacatctttgtgccacagttatcttgtataaaatgtaatggaggtaagaatgctggagggatttcaggattcattatcatgtgaaagtgcttttgatttataaaatcagggagtaatatgactgaagatggataaagtgttgaggaaaagctcatgtcatagatacgggtgacctttgaataactcaaggagttagaggcactaaccaccttccctcgccctcgccccgcaaacagtaaaaaatcaggaatttctgctgctgtctctgcctcaaaaacaatggatttgataaatgactcacccaagggcagggagctgaaacgctttggatagaatcaagactcaaatcctagttctttgggttccatttgttgtgatctctaattgaccacaaacttcctcctacacttagtttaaagatctgtaaaatgaagatgaaaaaatagtcaaaagtgttagctgctcagttgtgtctgactctttgtgaccccatggaattgtaggcctccaggctcctctgttcatggaattctttaggcgagaatactggagttggtatccattccctcctccaggggatcttcccgacccagagtttaaacccaagtctcctacattgcaggtggattctttaccatctgagctacagataatataattattgaaaaaaatccatgtacaaaaatggacctaatacagttcaaacccgtgttgttcacaagtcaactgtatttatattttttaattctatcatttatcaaatactgtgcaggtgctatacagaactcttaaagaagggagtgatagttgcttgcaatttaaaccatttcataaaagcttaaaatgtaaagttagcttttttgttaaatgcaggatattcaatgactgatgacttgattttgttttgcagaccttggacagtcaatcttttatacaactacatgtttgctcccctttctcagtgatgatattctgagtactttgccctacacgatgatatcaaccttagctacctttcctccgtttctgcacaaggatattattgaatatcttagcacatcttttctaccaatggctatacgtaaggttcagtcttacctaatactag

SEQ ID NO: 27871 - DNA, 1950 bp, Bovine  19866880964389
  misc_feature (1)..(1): n is a, c, g, or t
nacaatggtgaaaaggatgaaatgtaacctactcagccaggcacacaaggcccttcactgtccaccccttgacattccttcaaaccctcggaggggcttgggcctcccgagacgacttgcagagtcatacctctaagactttgctcctgccgttcctcctgcccagatgccctttccccataacctcctcatggacctggaacaattccacttactatgaagacccaagtcagtgtcactgtttcctgtggttggagtttggtccaactactccaggattttcagtggacctagagagcaatttctgtgccccctcaggtgactttgtgtgggttccttgaggccaagagatcccagaaaccagaatggcctttcaggtctgtgtctggcactagaggctcagttagcacaagatgaactgaacagactctaattgggggatgtggatccatcaggtaccaacatgcctggaggcagcgcagacctggaatctgaatagtggagggagaaggaattctaaggcagggaagggagtgaggggcaggggcctgaggccgagccccacagctttccttcaggagagaggagaaaggtgagcatcttgggatagtgggatcctgcatggtaccgcagcagagggcctggtaggctgaggctcttgactctaacgtgcatctgaatcccctcagaacttgtcaggatgccaactccgcagccccaccccaaaggctctgactcggtgggttacagtgagcctataaagctccactttaaaacgaatgcttcaggtgatgttgagggccactctctgaaaagcactgagccacaagtgtcagggaagactggacacaggtagggaccctagggcttccctggcggctcagaatctgcctctaattcgagagacatgggttcgatccctggggaagggaatggcaacccactctaggattcttgcctggagaattccatggacagaggagcctggtgggctgtagtccatgggtcacaaagagttggatacaactgagatacaagcactttcacttttttgggggtggggagaacctatagacaaaatgcagaaatatgcatgaactgccaaaggtcccccagcacactgcatcccggcctggacactgagagcctggaaacagggcttaccagagaacaaacctcgtcaaggttatttcaaatatgccccaaataactcaacagagatatgtttaatgaggtggatccacgcaggagctcacgcattctacaggccgcaacttgggtgatccaatcaaaatacagaatctcttgttagagaccttatcaactggcaattgtagacatggaacttaacccctgccggtcaggactgaggctctttctggctaaagaagccctcctttgtttacaatcaaattgttcagagaggaaatccaggcaaacaagtgggggttgcggtggaggggggaggttagcagaatagactgcaaatagctgggaggtatctgtgtaactttgttcccagagcctccacttgggttctatactaattgctgtcttacacgtgaatgaaaatcagaaaacgcaaccgtgctcacaggagggggatttcaggccagcgtccgtggctgccccctcttcaaggtctggccttcggaacaatccaggcagagtcactcatcaaatggagattgacttttatctgattacccgatggagaaacatccttctccatctcacaggagcacgctgtgggaaaggcgttttgcagactgcagggaaaagttgggccttggcttccctcctgctcggccagtggaaaattacaaagaaagcagggctgtcctctgctctcctcaggggttcttcctgggccccggaaaacagagagagaaaccggaaacacggagcgagcctgtgcttacctggggcggagaggagtctgggaggtgg

SEQ ID NO: 27872 - DNA, 639 bp, Bovine  19866881038539
  misc_feature (1)..(1): n is a, c, g, or t
nggggagaggaatgatgacatgcagtctggccccaacaccttcattctgcctgggctttgccatccacctccaaggccaacctcactctctcctccccgccccccgccccacattcaggtctcagtttcaccctctgtaaaatgggaggctggacacattgatgtccaggccccacacagcatgacacactgactctcagcttggccatgtcctacagaagtgtacaacaattagatgatttcactgttattaagatgatgcttctgggacctaggctgcctccagtcacgtttccacatttctgccactttgccttggttcgacaggggaccactgtgacctgccagatctcagcccatctggccagcggccctgggcagtccccctcgctgtttttcccgtggttgggcacgttacggctgttacagagcatttgtcagcgatggctgcggtccagggtgaggccccggccctgcctttgaccagcacctctacagagcaaggtcaggcctcctgagcctgcacaaatagaaattaggaggcaattagcccccctgggtgtgtgaatttccttttgaggttcaagaggcagattttaagcaaacacagcgtcactaaccaaaataatactttccacc

SEQ ID NO: 27873 - DNA, 1492 bp, Bovine  19866881059733
  misc_feature (1)..(1): n is a, c, g, or t
naacctaatgccgtgcggttgggggtattgaggagcactggggtgaggacagtcaggatggaagcggcctcttcctcccccactgggtcagttgctaattcctgagccgcaggagggacccagtccagactgcagcatccagacgaggtcccagcagatgctgctgccaggcggctgagagctggccctcttccgctgggtccctggtacccagcccggactcagaggaagttggctgagtgcctccctttgagaggacaatccgcattgcctggccttccaggctagtatttgcctgcattgaggagcatcctccgggcaaagaaacagagtcctgatggggcaattgtgtgggaagcatcgggaagccaggttccagtccggtctgcccctttcctcactctgtgactccctgaactgactcccgagcctcaatttccccaagtctggcctgagctggtggaactggctggttccagctcaggcttttttttttttttaaagtgcttctgggtcaaggcctttttgcctcttccaggcccctcagggattcatttgcattcttggaataaaattgtgactgtgcttcatgctcagccgcacatctaaatgcttatgcggggtttattttggagaagtaactctccggattgccaccagctgggctggcgccgccgccttccctgggtgaggcaatcagccccccaccgaggctggagcccacgaggggcaaagtctccggacctgggggaggcgccttccaatgagagcttcaccccaggggctgtcgcgaggctgttgggaaatgtctcatttttatatgtaaataaatcatttccagagattgctctgatcacagcggggctgctgctaaaatgtttgaagtgggtccgctgccaccgtaaactttgttaagcattattatcgagttcgcttgttttcctccaccgatgtcacagaaatctgcccactccctgtgtttttgcctcttctgcctttgtccaccctggttgcatccctctggggctggggagctcatctccaagccaccccttccgtggtaggactctgagtaatgggaaagtgcgctgggatggaaattctctttgggtagctgtaatgtctgccccctgagccacacctgggtcttgttgtttagtagctaagttgtgtccgactcttgtgacccggtggactgtagcccaccaggctctgctagccatgagatttcccaggcaagagtactggagtgggttgccatttccttctccaggagatcctccccaacccaggggtcaaacccgagattcctgaattgacaggcagattctttaccactgagccaccagggaagccccacactgctctggcctctcagaaccagcttgctcccttggtcacctccatctatgggaccagggctcctacctccttccaaagcctgtaacatcctctgtcacttggctctggctccttttgcaccctcaccagt

SEQ ID NO: 27874 - DNA, 1794 bp, Bovine  19866881136557
  misc_feature (1)..(1): n is a, c, g, or t
nttttatttagttgcaagcttgtctcccctcctaatttttcagtccttggggacagaggttctgttttgtttatctttgagtgcaggcacctggcagccaccaacatccaacaggagctccataaatatttaaaagtgactgtaaatccatgccactggacctctgtagaagggtccccttcactctccaacctcctttttcactgttgcctagtacccctccgtcatcctccttgctatttatacactcaagcccaagcctgcttcaaggtcttggcctggctgtttcctctgcctggaacacacttcccccatttcagcagggcccgattctttaagtcttccaggtctttgcttgtctgtcgttctttgaaccacacccattctgaccatcctatttaaattgacagcccatgctcactggctctcctcattctcctgagttttttgatttttctcagtaatacatgttcttttgtaatacaaactttaaaagcttgtttcctgtggttagtatgtttctcctctcactaagatgtgtcagggagttgcatggccctgagcagacacttcctgcatcctgcactgcacgccttcaatccacttctggtttcagcacagtcgtgatggacagctcctctgcacactgggattctcctgtccccaactccctactaagctgctcacctctacttttctgcctgagagtcaaggaaagcaggcagaaacccgaagtgcagggggtaaagactccataaggacttgaacaatgtagtcactggagttttggacacataccctggcctgcctttctttctttctttattcattcatttatttatggctgtgctggatcttcattgctgtgtgcaggctttctctagttgtggggagtggggtcaactgtctagttgaggagcttgggcttctcattgtggtggcttgtctcgtttcaaacatgggctctagacatacaggcttcagtcactgtggcacatgggcttagttgcttctaagaagagaagactcctctgaggctcattcttacaattccttgggggaccccagtggatcgaggcccttttgactgtggggggtaacagtcttgattaatatagccttaactggatcctcccttttccttccaggctcacctcccaaacacatcacccacttgaatactggtctcatctctgcttttgggagaacccaagaagaccactacactccaagcctacagcatacttgacctatgagggtctggtacacgtttgttgaagaatgaacagaaagagagacaatttacagaattttacattttgcatgttggtttatgatgaaatatttgggtgacttttttttttttaatcacaaagagaatttgctgaatcttgtttcttcttgtttgcactaggattttcacagaatgaaacttctgcctggaaacctggctttgaactttgtagatttttttcagggaatgagttttttttcactatttactttagtcagaaatgtcagaagcatccaggagcttgaagatctcctgctaacacctgccttgaccagcccagcactcagctgtttgttatagctgtccaaagagcatgcctatcttggagtatgatgagaaggattactttggcgagtttctccctgaaataattgagctaatccctgcctatttaggcactcaatcagcatttatagaacgcagattgtgtgtcagacttgggcaatggggatcagaaatgcctgagacagcgtccctgatagccctccaggagctcctgg

SEQ ID NO: 27875 - DNA, 1465 bp, Bovine  19866881137747
  misc_feature (1)..(1): n is a, c, g, or t
ncaagttttcatcaggttcattctaatttcaaaaaccagaaaactctggaatgagagaacccccaaatggcagtttaagatcttatttccaaaatcaggcttcaggataatccctcagctctattcatttgtgtgctggagaggggatcgcttttggctgaggtcagtctagaaaactgtattcaaattgtgtggaagggaagcaaacatttcgcaacaaatcaaatcaagcaatggccctctcagacaatcatgacgttaatgatgtatctgtcaattcacgtatatatataagtgtgtatatatatatactggttatgcatacatatatataaaatcaacagtattaaaatgtgtagtaacataataaaattaagatttcaccccaaacaaatggtagagtacaacatttctgcataaaattactaagaggaaaaaattcatacttctctgaacattcatctcaaccggctgatatttcaccattttgctgccgcctatccttttcaatcttgcaaaaaaagtttgagactctttattgcagggtccagtaggtgtatcatgaatatcagattcatcaaaaacactatcttcttctaattggggagagaaagtcaaaattacacttaagaggttattctctcttaggctgtgtctacacaagcatttcaacgaaagcatcatggaacacagtctggggtggttcctacaccagcccaagtctagcccagctgggcatttaattcaggtgtcaaattattcagaagttgagcagaacaaactgttataagtttgcccctcaatttccatgtcacaaagggcagcattttcaaaagaggcatctcaatattccgatagagccttcatggggagctttttcaatgcacttaacaaccagataaccaatacatgtcaggaatctgggacactcctgaaacgtgcctgctttgggtgaattttcaggctaatttggcaaaagaaaattaaacacaatgagtagatcttgccccttccacaaatacatgccttcctgggatctgagaactggcatagacacagcctaacagtacatgcaccttatactttgtgaatgcaaaatactgtactctacacttgaaaatgaaacacatgacacacagaaaaagcttagaaaagccgctggtcatctcaaaagctccacaaatgattatggactgaaagagtaaacaaaggaaaaagaaaacagaaaataacatctccccactaaagtaagactcttctcgagtttgccgtgggcgcttttatgaatcccagaaagaatctttgactgttacggtcctgaggctccataaacaaactggtcacttagaatcctagcaagcttgtatctgtgtccttttctacccccttttggccacttttaaatcaaagagaaaccccaaaacacattaatgaggaaaatgttgttatattgcaacccacaaaa

SEQ ID NO: 27876 - DNA, 1151 bp, Bovine  19866881196457
  misc_feature (1)..(1): n is a, c, g, or t
ncctgagaggtgcagctgccgccctgcctccgctggctgtggtggaggtgctggaagggtacttactccctgctggagtaacctgtgttttctttgattttctccacaggaagcgaggcatagaagtcgtgcaggtgagtacagaccatgccctcaccgctgtgcaggtggaagggcctgcagcacttacctttcctgctctcggaggagtctgggtgcttggcctctctccacttgctcttgttttaacttctctttctgtggaattgacatgcttgctgcccagggtggacaggagttggggctggctgtctggtgggggttgaggaattgctgtgctttgtcggtgggggagctgtgggaccctgggtcagggtggggagcgtgagggggcatagccccacgtcccggtcctgggtgctgttgtgacccgtctgtgccatcctcaggggaactccagcccctgggtatctgcctcagctgttagccctctggggatgagccttcttctacctggaccattcttgtatcatgacccaagtggtgtcatctccatagacctttcttctccccgccccagggtgcgtcccctcccccttgtcagtccttctctgctctcagtggccgcatctgatcttcgagatgttcccctggcccctggggcatgaactgagtcagcagagactcctgaccccctgtgttgcctcactttgggttggacttggatcacgaggtcactggggcttccctgatggctctgcagtaaagaacctgcctgcaatgcaggattcgcaggaaatgcttgttcgattcttgggtcaggaagatcttcaggaggaggaaatggcaacccactccagtattcttgcctggagaaccccatggacagaggagcctggcgggctacaatccctggcattgtaaagagttggacatgacggagcacacacacatacacacacgcgagatgagctcattagctggagaaggaaggatagttggagagagaagctcacctggggtgtggagcttgccctgtgggccccaaatggatgacaagctcggacagcagcagtgatgccaggaggctgggtctgtctgagagtggggaggggtggagacatgccaggggtgcctgctggccagctccg

SEQ ID NO: 27877 - DNA, 1038 bp, Bovine  19866881211870
  misc_feature (1)..(1): n is a, c, g, or t
nacgctgatggcagggggaaagtgagacagacgagcagcagattcatcagcctcagctctgagcctctggggtcctggggctgtctccccagtctccctctcactgggtccgcaggttcagagccctgtggggtgactccagtattcagggcccattggagggggggcggcgtacccaggggttaatcacaagctcagcctggctggcaggtcctggaggatagagtctgtgaccaccaagcccggcttggctggagcctctgagtctcaaggggacatacctggaagaggtgtgtgtctggtggggggctgtcccttcctggggcccgtgggcctgccttccacccccaaccccagtctggaggagagtgagcttggatggtctgggggccacggcggggggcacttacgccagctgggaggacttgctgcggttgtatttctgcatcacctcctggaacaggcccttgggggctgaggtcggggcgctctcaggagacacagaggacctggagggtgcagggcaggagtgaaagagggaaaagtattccgtgtatgagaagcgggtcatggccggaggcaggaacgaggatggagggagagcgcgggggagactgacagacaggcacagggctctgaaccaaagcagatggccgggtcctccctgtgtctggacgcagctgctgtgtctccagattatttttggcccttggaggaagccctgggagatttaaatgaccatataagacaacaatgaggttaacctcaccccacgccccaggtccccctccccagccaaccacgcgggaggcagatatgaagcaaggtgacattcttcacccagaagatgtgagaagtagtcagtggcaggtcccaggatgaaaagcgctcagtcttcgggcgggctgggctgggtcccaacaagagatggacaagaaattcaccggggtgggggacaaggagagcaaagctggggcgccaagccaggtcagtgacccacccccacctcgccggctcctcattagagggtcctgccat

SEQ ID NO: 27878 - DNA, 1147 bp, Bovine  19866881217288
  misc_feature (1)..(1): n is a, c, g, or t
nttgtctcctacccttcttttcctcttcgagtggtcccaccaatacctgtcagcgactcagtgagaaaagaagggtatatctgacaggccttatctacatgatcccaaacaactagatatttgagaatttggggttatttactttcttataaggacaatttcagaaactgaatctctaacatgtatatggtctagaagaggatggtagaaaccaagaagtctgtatggcccttagaaagccttacatgttatatacaggtttcccagtcatgggaccaagacagcaacttggtgtgatgtgaactcaattataacatttttaatgtaattagcatgctgcttcattaatggtggttatggcatgtttagctacaaaataatcagctgataaactgagcaaaagagaggtgtgatgggaattctcatgtcttggactccatgttaactgaattcatggaagtgactacgcaaagtaatatgaaaaatctgattcttgtggttggtaaattttacagcaccatgattcacttgaaactgcagcttcgggtaaaattcaaaggcagcagtctttcagaaaatttaacaaatttcatgtaaaattcaaaagtggaaatctttgagaagatttaccaaatttaaaaattagcatctatcagacaaaatcaaagaacgattaaaaacctctagtgatagaacaatttctccaattatcagttgtttttaaagacagaagaattccctgagagtaaaaattcttaatgttcagcacagtgtgtaaagcacctggcattgtcctctaagaacacaccatcaaaagctggtgtgtatccaacatgcgcttttaatggagaggaggacaaaggtggaaatctaatgatgcattatgctaaatcccaaagggctagattcaatcatgattttgggtcatgacttatttgacacatttattttgtgatacatttagctagcactgaagtcaaactcagttagtcatcccggctcaatcgtactcaacttggaattctaactatgtaattcactatccctttttagatgactctcgcaaattaggaagagaagatacatgttcatgattttagtatgtggacttaaaaatgggcatgttatgatgctttaaaacagattt

SEQ ID NO: 27879 - DNA, 1220 bp, Bovine  19866881223695
  misc_feature (1)..(1): n is a, c, g, or t
nttaaaaattttaaaggaaacaaaaaaaaatttttaaaggaaacagaagattgggaaaaaggccagccaaaatataaatattttctacggtaaaaatagccaatcacacaaccaggaaaaaagaattcttgaatttctaataaaaacatgattttcaaaaactgtttcaatttaactgtttctataaaaagaatttttaagggaaaatgcaaaaattaaaggtttatccagtctacctagaagcgtgtgtgtgtgtgtgtgtgtgtgtgcatacatatatatataaacttcatgtaactgctccagaaatgtagtttcacttagaaaagtagcaaggatacttaagtaatggctttaatgtctttacctctaaattactcatcagccaaaatttttgaaaataagcctgtcatttggctcactttgataaagaagagaatcctatttcctatgttaactatgaagaactgtaacctttattctcaataaagtattaatgaaggaacagtttctgaaaagagccccatttaatgactgagtcctgggttaatttaagaaacatttactgaatcctattatatgcagtagattccactcctcattctctggatgatcaaagactttctctgctatcccatatgtagatatccaaccacaggctgctatgctacttattatctacctgttttcaaaaatatcagccattctacctctttacccttgatgaagctgattctaatgaatcaaatttgccgaaggtctagagggccattctaatattttgttgtctttaagaagataacataaaacacataaactacaattattttctcccatgttaaggccatttatattgttaaaaaaaatatgcacatacagaaaagtatgtaaatcataaatgtgcagcttaatgaattgttatataagcaaacacttgtataatcatcatctaggtcaagaaacaggacattgccagcattataaaagcctcacacttgaccttctcatttctaaatgagggctgcccttctcagccccagtggttgcaataactacctacctttggggtgattaccttcttacttcttatacaacatgattttgaaagaatagaaaactatcaaaaatttacttagtatatatatgtaagaatctaaagtcaaaatcaacttttaaaggaattgtcacaatattttttataactttcctaatcttaaaaa

SEQ ID NO: 27880 - DNA, 1436 bp, Bovine  19866881239570
  misc_feature (1)..(1): n is a, c, g, or t
nacttaactgtagtaccgcggaggaatactgtgaattgcggcggtgtcaatggtgtgggaaaaattggaatttaaatctgttgtttggggcaccatgacgctgaggctcttaggagactggtgtagggggatggatgtgaactcgcggaaagcgccgttggttgccggcatcgcccagacctgtgatgtggcagaaatctgtgagctggtgtagcccccttgggggagtacagactcctcgggagaatgtcccggagggacgagatcaggaatgtagccttaataggacttactgaggagacaagtcatgttctgatccctaaggagatacccggaggcaggggtgcctgtagagtgatctttaagtcccctgacccagatagttaatttttaagcagattaaatgaactcttagagggggagggcgtgacattgggtaagtttaccagagctcttacgtatggaaacgaccctttgatctagactaggatgtgattctaggaatgcggacccctttgttggcacaggcagtccataaggctcttcagcctgctctgtaacacctgaaatacaaaaaactgaaagttttctcaggcagtgatcctccagagccagaagaagagtttgaatcctggctgtttcatactactcaaaagatgaggatatgaaagttgtaagatgtcgaaaaaacaaggcgattgctagagagcttcagagactcagcatccggtatctttcgtgtcctccagataaacaatcctttaatcacaactcctgaatgcctgcaggctctgggagttgcaggtcaaatacctgaccacttgccagaaggagggagaaaattgcttaggaactaaggctggagcctttactacagaaactggtagagagaggagacttggagtgagcctggagcaggtccttgctggagcagtccacagaacaccggcgcaggcaggcttcttagagttactgacactaataaaggatgaagaggcagctgaagaggaggaagagggcgccctcctccaggcaggacttgagagacatttcatctgaatcttgggaaatcaggaagggctatctgcagcaagcagaacacggaggctgaacagtctgtatgctcagtgatagacattaacctatcttgtgctgccaagttactcatgtttgtgcagttcttagtataatcctttgtcatttctgtgcccatgtaatgtctcctaaatgtctctctagtcattgactagaaggatgtagttcagcactggtatttatatatttatattcacccatgaatttgttttttaatcactcagagtcgtacagaagtttcatcactacacacatacatgtgatactctgagaggagtgtccagacatggctcaggtgcacatgctgatcagatttcgttcaaatgtcggcttgtgtgata

SEQ ID NO: 27881 - DNA, 997 bp, Bovine  19866881239965
  misc_feature (1)..(1): n is a, c, g, or t
ntgtcagttccgtgtttgtcttggagattccgtcctcctctccaggtggatggtagctctctcggcttgatgtgcagccattgggctatcgttgtcttcagcagctttccaagcctcgcctctgggaacttgccacactcggctctctccctccccatctcccactccagttcttcctttctttagcttaactccatcatagaagatttttccaaggtctttcctgaatcatagactcaatagcaaatcagtcagtgaagttagttttctttttaggatttacattatttggggagctttggggtgccccagcagagggttagctcttactgagtgtgtggcaagttgagaagccatggttcctcgggcagctgggagactgtagaggagggcaagagagatccctgtgttgtctgagccagaatacgcctctgtggtcataggaggaagctgtagctcaggtcacagaggtttccagccttcctctcacattctttgaggactcagggagctgccctcctggcttccagctgagtccttactgctcactcaagacccagctcaaacacacctcagtcatggggccctgggctggggttgacctttctttcttgccaagttctttgagttgtaactctcccttgatttgcatttctgctttctgctcttaggtaagttaaaaacagttggtgtttgcatgtttgtgtgcttgtgcacaagtgtgtgagtgactgtgtgtgcacagacacacacattagagggggaagctgtcgtccggtctcacccatgttgtctgtcccccacagcgcctggcatgtgcctggcaggtagtaactcttccgtgactttctgtgtcatgaatggaagcttgttgtgtagatttgagaaattccacctttaaaactgactcatggtaaagaatccacctgcaatgcaggagatccaggttctatccctgggtctggaaaattcccggagaaggaaaggcaagccactc

SEQ ID NO: 27882 - DNA, 1515 bp, Bovine  19866881329717
  misc_feature (1)..(1): n is a, c, g, or t
nccatagataataggaaagaggaaggtcacaaaatagctgtgcatataagagtaaaaatataaatcatcttccctgaaattgtcacaatttacacatgaattgccgttagatgggctgtaagataccaaacagaatgcttttatctcagtcaacgatccctaacaagaggtccaccccagggtcagaaaggcagtcacaaaggaaaagcacaggcacgtccatcaccgcagtcagctccaggaacattatattcagagagacatcacctctaagttctcagctggggtaggatcacaacaaaagtgactaggcttaaaacagcagcaaaattgtacaataaacaaactcacaagtttctatatttttgtatattcactgtaatatagaatcgcaaatataaaaaattaataatcattatatcatcatttttctaaaagcaggctttaaatgtttgtttaagaacacatcttactaaataaaccattgagaattctcttaggaaagttagccataactaaaagacaaaataacccccaccaccaccaacccatttcccaaatttcaactttttgtgcagtgaaactttggttatcatacctccatggaccaaattatcaatgcttttaaagttaagacaactgacgtattaaaagctcatttgctgcaaaaagaaatccttttttctcccacacagtaagtcccctacatacaaactctcacattacgaattttcaaatatgcgaacgtgcccctgtatgccagctgtggtactgaactactgtacttttcaaggtactgtttaataagatttaaaatgctctctttatatctgtgtttgctttttatgtattatctatgtgaaaagtattataaacctattacagtacagcactatatagctatgactgtgttagttgggtacccaggttaactctgttggacttatgaacacactggactcacaaatgtgctctcagaacataacccattcatatgtagaggacttactatatttaatacttaagcagtagatactactgagctcctttttatgggttggaagaatctggtaagcatgcaagctaatgaaattgacgaaagactgcagaaaggggaagagttaagcaaagaagcatgctcttgggcttctgtcataaagcatcattaatacatgtataatatacaccatacacagcatgcatatactatacacagcatacagcaccactatacactgtaccatgtggtcaacattttctaaaaaccactgatagttaaatttggaaaagttcctagagatttcttcatatctagcctcctgggttaggagacaggaaaaatgagtcccagggagattctgtgatttgctccccaaaattacagaattagttagtagacttgacgtgtccttcaagctccacctcttacatttttctgggggtggactagtttttaaaacaacccccaaaccataatttcaaccagtctccctgataagcaggtcagggtgaata

SEQ ID NO: 27883 - DNA, 1433 bp, Bovine  19866881345902
  misc_feature (1)..(1): n is a, c, g, or t
ntcataccagtaactatattgaaagactagtgtataaaattcccaaaaataaatgactagatggaagagcttcagatgaaggaccaggtgtttaatcactgactttacacaatgaccttagaatacactgcataaacagctctgaaaacgtgagaacagtgagaatgtattatttattgatttgtaattcttttagtaaataccgactctttaggggaactatagattttctcatgaactttaacaacccacaggccagtagagcttctgtttccttttcataaatactgttgagttagcaccagcatctgcatgcgtattccagtcaggggtgtcttacagttgtgtgctctaaaatacagatttgttttttttatattgatcaaaaatgtatttttcagtctttggaatatgaagtttatttatagctttagttccaaaatagcttctgaaatgcattgcccctgtttttagttgtaatgcatgtgattatactttattgaattaaaactcttaacagagaaacaactgaaagcaatgacctaattttttctcttagcaacttggtcagattccaggagtatgtgacttgatacaaatacagaataacaaaaactggccccactctaatccattcctccctctttccatcctctccattgtccccatgttaacacgctcccttctgtctccatttggttgctctggtagttcattttgcttctccctctaattgtttcctcttcggcagcttagtctggatatacttgctagagaacagtggagctaagttaaataccatcatcaacagatcaaagtagtaaatacaggtttcagttaaacatgggatatggttgaagaattcctgtttcaggaatggcagttcaaatgactcaagttatacatctttaatcataatgaaatttagcacttaactcaaaattgtgaataaggttccaatgtgtaatatttaaaatatttaattccacattttattttataactcaaacttgttcatgctgctgctactgctgctgctgctgctgctgctaagtcacttcagtcgtgtccaactctgtgcaaccccatagaaggcagcctaccaggctcccccgtccctgggattctccaggcaagaacactgggttgccatttccttctccaaaaacttgttcatataaactcttcacctctgaccctctgcgcacactgttctttggttttatagtatctttgactttgttcactaaatgtctaaattctacccttgcctttacgaccaaactcatattctacttcccgtgttttgtcttaggcattgcagattaagtgttcctgcttcttgcaaacctctaaaacacttcttttatcattcttttaggtttttacatcttctgacttgttttgaaattaacctgtgtaactttcctcta

SEQ ID NO: 27884 - DNA, 862 bp, Bovine  19866881349416
  misc_feature (1)..(1): n is a, c, g, or t
natctaggtgagcataggcagggctgctgatcccaaaattgtgatcaaacaaatgtttgctgttataagttaatacactttaggatagtttattacatggcaatagaaaactgaaacagccctccaaaggtatccactcataatcaactcctaaaacgtttaaatgacatgtacatggtctcatagctagatgggaagacagctgaccagaatccaagtatctcaatcaaccagtccagagttctttgtatgacatcatactaccttctcttgtatttctcaaacaactagaacaagaaaagaagatggaaatagttcagggaaagtgtcatgaacagtggctatttgaaggaagaatctttaagtagagatatcattcacctcacatataaatatgtattttccatatatatttggtctggttatgtttttgacacacaagtgttggatcacttgcactccacttgcaaacaataaagattttttagcaaacaagatcatcatttaccaaaattaagttgcattgtcactcacttttgtattcaggtttctaccccagagttacacatatgcttttatttcatattatttttcagaaacactatgcatatgatgggtaagcaaaagcagaaatggaaatagaggccatcgagacatagcaatcttgcatgctgaataatttcctttcccccttcacaaatacagtgacatgtacatactgggaaaccatggtgcagaaatgagacagatgtcaatgaatgaatttacatacaaacacagcaaatcatgccgcaccacacagatggtttgctcttaccttcttctgacatatagcagatatttcagctgtaaggggaaggta

SEQ ID NO: 27885 - DNA, 779 bp, Bovine  19866881458438
  misc_feature (1)..(1): n is a, c, g, or t
ngtgggtttttttagatgctggcgtggaaagcatccgcctgccttcgtgctggtccccagccgccacttcctccccccaagtcatcgcccaaatgaacagcagacccatcaagaaagatttcacaactcttcttctgcctggtacattctaaaacaatggctccagtttcccattccacccagagactaaatggattaaaggtcttggtcttcccggcaagccatgcaaagcaaacacactgacccctgagttggccctcacaccctgaagctccaggggctccctccgcctgcccccctcctgtccgttcccatgggagaggtggcatcgcactgggttatagtctgggatctggtatgaacagggatcaggtactggggacagagcttacttcttcaccttttaagcagcgactgtttgtgagcacatgaattcattgcctctaaaaacggctcctgagagaaatttccgcatggaccctgatggaggctgtagttagcctccaggaagtacctggcccttcacagtgacctccagctatagcttcagctacgggtctaggctttggtggtgagtacagcagcatctacaaaggatcagggggcttccaaggaaaccatcaaagatgactaagagatgaaattaagccaaagtgtcctggagcaggagacaccaggctccagaaggacatgaatacagctgcacctgctctgcccgctgctggaccccgggcaggcattaccaatccacccctgtcctcagccattcacagacttta

SEQ ID NO: 27886 - DNA, 749 bp, Bovine  19866881534178
  misc_feature (1)..(1): n is a, c, g, or t
nctactatgtgcttggctcttcacatatattactacatttgagccttttgacaatcctacaatgtaactgctattattcctagtagatacaaggggaaacactctaacagatgttaacctgcccaaggttacacatgtaaagagttgagaagaagggatctgaatccctgtgtgtccaataatggagaaaaaagaactgagtaggaacagatctagagatgaccccagtgttggaattacaggcaagaacgctaaagaagctgctataaatattttcaaggacttaaaggaaaagatgatctaattgagtaaacagatgaggaatctcagcagagaaatggcaacaaaagagccatataaacgttttagaactgaaaaacaatatgaaatgaaaaaatattcactggatgggtttagcatcatattggagagttcgtgaacttgaagacaattcacagaagttaccctgtttaaagaacagatacaaaaaaaaattgttatgatcagtatcccagtgacccttgagccaatattaagcagcataacagacatgtatttaaagtcccagaagacatggagagagaaaatagggtagaaaaatatttgaataaataatggttgaaatttcctaaatttgatgaaaatttaggaattaatgacccaagaagctcaacaaatcttcgaaaaacacacctagaaacgtcatagtcgggcttttgagaaccaaaggtaaagacaaaggtctgaaa

SEQ ID NO: 27887 - DNA, 1073 bp, Bovine  19866880174669
  misc_feature (1)..(1): n is a, c, g, or t
nactgcactgtgtcctcccagatgccctgtggacagtggacaggtgtcttctctcattcatgggcatccggagctctcagctctccttgccctggcctgtcacagaagcgtctgttgactgtgtcctggcttcccacgtggcatctggagagaggtataggccatgtgaaggcagcccaggccatgctttggcctgcaaaactgtcagcaatgacaccttctcttaccatcacctgatgagcttatagcgataggaacagccttttaactagatgtgtgttttctgtatggacaaaattagtgcttcttcgtgtggagaaggaaatggcagcccactccagtgttcttgtctggagaatcccagggacgggggagcctggtgggctgttgtctctggggccgcacagagtcggacacgactgaagcgacttagcagcagcagcagcaacaagctaggtttgataaaagaccagtttcttttctttccagtcagtagtcatgaagggacgtgagaattggaccataaaaaaggctgagtactgaagaattgatgcttttgaactgtggtgctggagaagactcttttaagagtcctttggacaacaaggagtcagactagtcaatcctaaaggaaatcaaatctgaatattcagtggaagaactgatgctgaagctgaagctccagtactttggccaccttatgcgaagagccaactcattggaaaagaccctgaatctgggaaagattgagggcaggaggagaaagggacgacagaggatgagatagttggatggaatcactgaatcgatgaacataggtttgagcaaactctgggagagagtgaaggacagggaagcctagtgtgctgcaatccatggggtcgcagaattggacatgacttagcgactaagagtgaacaacagcaaaggactaacactttaaaaatatatataacaaaaatgtcatggggatcgctataaaagtttccaaatgcttgctctcaaattctgtagttctctcattctgggctggtggaataaacagtttgtgatccaacactggtctgtggggg

SEQ ID NO: 27888 - DNA, 2157 bp, Bovine  19866880455222
  misc_feature (1)..(1): n is a, c, g, or t
ntatggatgtgagagttggactataaagaaagctgagcaccgaagaattgatgcttttgaactgtggtgttggagaagactcttgagagttccttgaactgcaaggagatccaaccagtccatcctaaaggaaatcagtcctgagtgttcactggaaggactgatgctgaagctgaaactccagtactttggccacctgatgtgaagagctgactcactggaaaagaccctgatgctgggaaagactgaaggcgggaggagagggggatgacaggatgagatggttggatggcatcactgactcaatggacataagtttgagtaaactccgggagttggtgatggacaggaggcctggcgtgttgcagtccatgaggtcgcaaagagtcggacacgactgagcgactgaactgaactgacctgaccgtggtttctaaaaccccagaaggaaaaggaaaacggctcataaagcaggggtgccacaccacagtcggccactaggtgtcaccactcagcaacgcacccggtaacccctcccagctcccggggcctcaaggggtggctcaccattgttgcagtgtcggacacagtcctgcaggacggcctgccacttgtcctgctcggcttccgtcatcatgcagaagtagtagtgacgcgctgaaggatgccagaggatgagcgggaactgcgtggggcacttgagaatgggggcagagcccgatttcggtgtggtccctgtggagacagcacccactaagcggctgccctctgtggcttccctcggccagagaacggccagcagctgacccctcgccctgcccctccgggtccagagagggctggcctgtcccagaatgaccagagtccatggggaggccgcttctctcagtctccacagcttggctaagagaaggcctgccccccctgccccaccggcagcaattcttagcattggtaatgcgtccacctccctggggtcaagttctaaactctacgcaggaggcacaaataacacagggctggagccctcagggtcaagggccaagcattactatcttgggtttcccttcaaatttcagctgcagaagccaaagggtggcttaaatgtccaaagtaggagggaggcgtgggggcaggggatacagaataaataaaagggggtttttttctctctgttttgtccgcatggatattcgagatccacagagataagtggtcctgggctgtgacctggtcactcctgttaataacaggacaatggcagttcttctttgggtcctggctctgggtccctgtgctaggctcaccacacacacagcacctcgtggggtctccacaacaccccaaggtcagccctcccagtgcaggggctggaatccaggaaaaccagactctagctgagtcctcgatcaccaagtcccacacaggggcatctcactaccccttggtctccttgggatcagctaagaggtggacgtgatcccacaaagcttctgggtgtctctgatggggtggggtcacctaggatggctccccacaaatgcagcattgacttggcagcttacaaagtggggcacctggatcatcttctccgggaacctctcagggacccaggaagggacagggtacagagtaagccccctgcacagctgtgatcaccaggctcaggaagtgggggctgggtgggactcacactggcgtggccccaattccctgggtgacttcaggcaaatccctctcaggccccccccccttggaggttcaggttgtgctgggcacttgccacagctctagcccagctgctgttcctgcaaacatggagttccagaaccagggatgccccccacactctacggccaaatccctgggcacttggcctgggatgggtggtccctttacctggtaaagagttgccaacgagttccaggtactggtccaaggaggtgaggattttgtagcccgcactgttgatgacagctcggggtgggatctgccgctcataagcctgaggagggggcaagagagatggtggaggcagctacaggtatggccaagcccaaaccccatgtctctacccggccccagggccccactcagtgttccctgcccaagacagggaggaggaggaggaggaggaggagaggaagagaagagaga

SEQ ID NO: 27889 - DNA, 1012 bp, Bovine  19866880464603
  misc_feature (1)..(1): n is a, c, g, or t
nggcccgctcagccgtagctgccgcgaccgcctcagcctgcgcctcccgcctccggaaacgcttaccggtcccgccccctaaaactgccagtgtttccgggggtgcgtctgagagaaagcgatgtgcgcttgcgggactcgcattcggggtggggcgtcaggagcgtgctccgagagaacccgcggctgcgcagtacagcccggagcaggtcagtctcctgtaggtactctagggccaacgctgacgtttgcggagaggagtgctaaataaacactttgacctatctcagcttgtctgatagagattatgtcaaatcctttactggctccacagcgcctttagcttgtagcagatgttcagtaagagtttagtgaagggaccaatgccctctcaagcattgtgccgggttcccctaggaaaagcctcacgccaattgaatgactcataactggtccagactattcgtgataaactcattcttattagccagtagttggactaggcataagcatgtgaccaatttctggcccataatacttagagaagccatcaactggggcttctgaaaaagcttttgtttattctgttcttgttttcaaagttcaccaagacttctagttgaatatgctcaagtgttttgcagccttttttttcttcctgtctctaaggttgaaaattcagttactggcatgtgcctgtgatatgacaaatgctaaggccaacaaagcagaaagattgagagagcctagttctcagatgaggttaagctatagtctcaggtttggacggtgtatccctggatgtttgttgtatgagtagttttactactagtaagtggcacaacttcagttaagccctgcagtctggctccagacccaagatctcagctctgtaggactgctttggtcttgggcgttatttctggcaatattatagactggctcagttgcttcaggtgtccggctctgcaaccccatggactgtagcctgccaggctcctgagtcatgggg

SEQ ID NO: 27890 - DNA, 4749 bp, Bovine  19866880606395
  misc_feature (1)..(1): n is a, c, g, or t
ncgtgctgcggtggcgccccctcccctccgcagagccggcccggccggcagacgtcaccccgcttcccgctacctgccaggctgggctgcgcgggggcgggtgcaccgacagggacagcaacccccaccccgcccactcgccagcctgctgtggcctttcttcctctgccaggctccttatgggcacccccgggcccggccctcctccctggcattgtcggagcagctttcaacacctcgaaacccaccctccctgtcccctctactatggaacccagaccagccggtttctatgtgtgcagatttggtaaacagaatgcttgagccctgacttgctggaaggggcgattcccagctgacagcccagacgcgcgcagcctattttcggcctcctctccccttttctctcccccgccaaggtctgtggtcactgtgttcacgtgggctccctgcctcctccacaccagcacccaccattgcgcccaccattgcggggggtcagaggacgcaggagtgggtttcaggttcttttcctagcctgggccccgccaggtccccagccccctgccgcgccccctcacccatccaccaggctgcacccgcggatgcctggtatccgcttagcaaatgctcttgtccccgctcccccctgtgaatgccgtgattcagcacacacagagaggagcttcacttaagaaagaaagcattcacggccgccatccagctccagcaggcgccgggagtcagctgctggctccgcccgccaccctccacacacagaggggtctctcctcctcctccttttttaatgacccacagtctcttttggttgctggaccaaatgcagtttaaatctgtgttcagagcacctcgttaataagtagcagattaatagtctcctggaatcaggagaacaccacccagtccataaaatgcacactacaggcccacgtgtgcccggcgctgggctgggctcctgaggacaccgagccagccgccttgggatcccatccgcactcaggaccccttccatgtctctccttcactctgcgttttgagaactcatgtaaatgatcgtcgctgccgtgtgtactgtgacgttcgggtcccgggtgaagctctttatcacctcagggaacccatgactccttgtcatgaacacgatgactctgatctccaccatgtagatgaggaaaccgagcctcagagagtcagaagtctcgcccagggtcaccgggggccaggtcttgtccccccagaactgacacagagctccgtttctttactgttgcaacacaggctgtctctgtgaaacacgctgctggtgtttggtgaaaagaaatgcctcaccctcttgttaacaagctctaccagcccttccaatccggccggccggccgggagtaactataggatgtttgtcgaacagaaccgaggtggtggtttccggtcccacctccagtctcagctgcctccccacacccaccccggtgactcttgggggtgtcccagaggagggagagtcctggattcgcagcaagggtggtttaagatgaaacgggtgcttctgttccccagagccaaaccaggaggctctgggtgagtcctttgcgaaaatcaggtgcctcctacagtggagggaccaggtacgtgagaaccctcagcctaccatggagcgtagtaatgcccccggcagctgagagtagggggctgcgttcttttcagctcccttccctctctggggaagaagagaaagagggtgattgacatacagcccccgaaatccgggtcaccctgaacgtggaagctggtgcctgtttctggtgtgatggtggtcgtggtggtttagttgctcagttgtgtccgactctgcaactccatagatcgtagccctccaggcttctctgtccatgggatttcccaggcaggaatactggagtgggttgccgtgccctcctccaggggatcttcccgaccaagggattgaacccaggtctcctgcactgcaggtggtctcgtacattgcaggtggattctctattgactgagccaccagggaagccattatttctggtgtagaggtttcttgagggggcatgtgtgggatcaccaggctcagagaacatgggtgtctgggaagagatgggttcacctcccactcgcattggctctggccctcccaggatgccagcagcgtccccagacgttactgtgtctccaggtgaaggggggagaggctggcagttgggcaggagctgcggccacccagatgaccactgcactaagcagtgggacactcagcctagagaagggtcgggacacacggcccttgtggcagggtaaggatgcctggcttcctttcagccatggaggggtcaggctggagagccagatcacctgcatcagagggaccagaccagaccagctgttcccaacagtgacaggtggaccccgtgagtgtgtctcactatcccctggcagagaatgggcccagggaggtctgtcggagtctgaaaggtgttggggaaggaggttcaaacaaagaagatggcctcgcggaagagctgaaccttccatttcatcccctccaggcccccaggaaggaggagggagtgaacaaagatgagctttgaattgagtttgaatcaagtcttcagataaacagaacccactcttaaatcttgaaatgcaactatgctaataatgggaagtggctgcaaagctatagaatctggcccagatttcactgagggaccaggtgcccagaattggaaagggcagtcaacacagcacagtcgggcagtgggtgttgaagagaataaagcatttcatgtctggaccccagcggactccagttctgcaataacctagtaatgataacctcagtcatccaaggaccccaggttgggagtcaccagtctggccacctgaacttcccacagatgcgcagaagggtaggggaggtgctgtgtctatgtgggatgagacctgctgggactgccagccaggggcgccctggcagcggaggtgaggggtgaagagggaagagagggatgcaaacaggaggagggtctctggagcgttactgagctctgtcctctgcccggggctttcacaagcttcttcctcacccacacctgactctggtccaagcacagcacgtcagcccccagcccggcggggcggaggctctcacgggccagtcagagtttctgcctgtttgtcttgttatgtttctctgaagccagggacgagggatctctctgccctggttgcagcatggtcagatcctgacaccactgatcccagtggcctcacctctggcccatggagtgtctgaatgactgaggccggggcctgaggctcagcagcacgaggggtggagagcgggttgtgtgcaggccgcaggcgcccactcaggccaccgcccccagcggcacccattctggggtgcagccccctggtcctgtgagccattctgggattcttaaagtccttccccctttaaaagctggtttcaggtgagtttttgtcacttgcaactggggtcctgacttacacatctccccctcctccgcctcatcaccttttttcatttaagaactagttcctgagtgcccgaggtggagcagagcagccgtggtccccggccctggggctccgagcctggagggggcaggcgtccagtaatcagcacgttgggcagatgaggcgttagactccactctgtcccttcctgtccaggtgaccttagacgggttgtttaattctctgagcccaggctgctcacggtttcaggaagatgtgatgtagggctggccacaggccttgggaatgtgaagtcgctcagtcgtgtccaactctttacagtccaacccatagactgtagcctgccaggctcctctgtccatgggattctccaggcaagaatactggagtgggttaccatttccttctccagggattcttcccaaaccagggatcaaacccaggtctcccttactgcaggcaggctctttaccatctgagccaccagggaagcccacgggaatctgcctcctttaatcacaaagggactgattgttacagaggagcagccggaggtgggaggggggctctgcagggagtgcagcgtgagcctcaagctgcagagtgagtggattgtgtccaggcggtggggacagtgctcatgtgctcatgtccacagccttatactccatgatacggtgtatgtagcacactggtctttgcagagtcaaaaccttcttaagtgtcagagctaggagttccagccccttagctcacagctgaggttgcggggctgcagggatggggctgggctgctcggaaggggcagggctgagacaggagcccagaacccaaggccagcagctgggccagcgtttgtggagcaccccggtcatccagctgctgggagaactgggagcacgtcccgggagctgggagtcctgatgagagagggcggaccggcacctgtcataccaggctggtgctagaggggaagccgggaccaccctgggtgcaggctcaccccgcacaataggtgtctgacaagctcacaaattgccgccatcctcaggctgtcaaagaggccccagaaaatagagcccttcgtgccagccatcagcccacagagcggcgtgtcccatggagttcggcccctgagggatggagtctggatccttctcagctgtgtgacctcgggcacccctgtcactcagtatccaca

SEQ ID NO: 27891 - DNA, 3567 bp, Bovine  19866880646371
  misc_feature (1)..(1): n is a, c, g, or t
natgcatggacttaggtctgataatgatatttacatgggagcagggctagggagggtgggagggaacaaggattaggcctgagagtggtcaatggatacttttatatgccttgcttagttttttacaaggagaatatagtcaggtattatctatataactaaagataagcttaaattttactcctaccttagcatagggaaaatcttatttctttatagaatgctgcttttatagctccaacacttgatcctgatctcagaaccaaataactaaatagaaaggctggttttaaaaaaaagtgtgtgtgtgcgcgcatgcatgcgctgatgttggactacaaaagtaattcatgctccttgttataaatctaaacaatacagaaatatacagagtaagcatctcccctcccaccctgcagtcccagcgcctggaggcagtcgccgtgaactgatgaatggctctccttcgtggcttttgtctcagcccctccagagctgggagttgagttttggtggtggtgcttttacaagagaggaatcgcactgtacagacagtgaaatttggcagacacccttctgtagctgcacccacgtttgccccgtcgttcgacagctgtgtaataatccactgtgtggatgaaccgtgacttagcaatcgcatgctgatgggcattggagttatttccagtgttttcactcttttgaacaattctgcaggaacttgcacacacaccttggtgcatttgcagttgtcttgggggctggagctggtagcttgctgtgctgtgcagacgtacaaggggtcagacacccatttcttggtctcttttttggaacacccgtgccttctctgtgctgcatccccagaacttaagacttgaagctctttaagccaagccccgcgattctcaaccctggtgtccatcagaaccatccagaaccctttatcaaacagccagccccttcatcccccaccccctacccagccctccaaggcagtccctctggatggacctgcaaatctgagggctgtcaggctgcctgggaattctgggccagtgagaacccctgctgcccaccttctcttaaccactattttttttttttgcctcccagaataggttctcagactatgagaagaggaaggtaagagaatgtcttttgtcctctgtcacttttcttctcattaaacatctcaactgttacatttgaggagacgagctcttccagcctctaagtcagggggtgaagtaacagttgcccccacgtatatcacctccccatggtctcacccagccttggtgggtgggaaggatgtccccactttacagatgagaagattgaggctcagagagattgagcccatcccctgcagctctcacgtcctaaccccccagagcctgtgccagcatcaccagggtctccgttcttgcaggaacagaagatgctggagaaacttgagttcgaacggcgcctggagctcgggcagcgagagcacgcccagctcctccagcagagcaacagccagaaagatgagatccttcagacggtcaaggaggttcgtgagcggctaagtggggtcaggcctgtctgcttcctctgccaggggcctcctgactcaggctgactcctgactccggtccctctgatgtgggaaggcagtggggtgacctctcttaggcccaccctccaggacacagggctggggaggagtcatccatacagatcacctagtccaggctcttcccatacgtggacaccctgaagcctagcaaggggaggacttggtccaaagtcaacacagagctggcaagacagaggaaacctggtctcctcgtctcagccctgggcccctggctgctctgcggtacctgaaagggtcccagcagaccccagacctctgcttgtcctgccgcaggagcagtcccggctggagcagggcctgagcgagcaccagcgcttcctggatgcagagcgtcggcggctgcaggagcagctgaagcagacagagcagaacatctccaaccggatccagaagctcctgcaggagaaccagaggtcaggctcccatctctccggtcctcagacccagagacctcccttaacatgatgcccacgtggggctcaatctctccctcaccgtctctgattctacccaaggtctcggtgctgcatttggcactgactttaagagagtctggtttccctgatgactcagcgggtaaagaatccacctgcaatgcaggagacatgggagacatggtttgttccctgggttgggaagatcccctggaggaggaaatggtaatctactccagtagtcttgcctggagaatcccatagtcagtggagcctgatgggctacagtccatgggttgcaaaaagttggacaagactgagcaactaacacacttgaaagaatccgatccagggatgaccaggtttgcctcttggggctgctactgattggatctttgcctcccaggcttcccatctgtaaagtgagtgggtttaacaagttaaaatcacatcctgctctaatattttggctttccagtcacatgtcactctgaggtcagccattcgccttacagtgagatttgccttaatagatcctgtccaaggccagagccacagggatcaagctccaatgggaaaaagcaggttggatagaggtctcaagaagcctgagaaagtttagctgggggtctcttggggaaagattccagaaacaggctctgccacaccccctgctgctccagccttctgtccactgtcctccgagtccttctcctccctcgcctgcggttgagtgccagagggagccggctggcctgccatgcgcagcgtgcccatccccgggggcacccaggaaactgccctctgttggctgcttcttacatgtgaagtactctgtctgttttcttgttcacactttaccaatactccatgaagctttaaaaaaattattcttcccatttcacagatgaggagctgggatttggagtggttgaggaattggcctgagaacacagccctaagtggccagttcctaagccgccctcagcagttctgttggaaacggacccaacaatgactgccggctgttcatggtttccttcacaggcagaagaaaagttccgagattctgaagtctctggaaaacgaaaggtcagtgttttgctctagcacattctcaatgactgcctgccttcctgtgggtgagcagacctggggagagaaggtcttgtgattcttgaggactatgtcagaaagatttcctagagttttgaggagattcaggcttccctggtggcccagatggtaaagaatctgcctgcaatgcaggagacccacaagttcgatccctgggtcaggaagatcccctagagaaggaactggcaacttccttcagtattcttgcctggagactcccatgagcagaggagcctgaggggctacagtccatagcgtcacaaagagtcggcccagctggcgactaacactttcactttatcatgaggagattcacccccttacagagtttgaattaaaaagaatcgctgc

SEQ ID NO: 27892 - DNA, 748 bp, Bovine  19866880707267
  misc_feature (1)..(1): n is a, c, g, or t
ntattgttttcctctatttctttgcattgattgctgaggaaggctttcttatctctccttgtaattctttggaactctgcattcagatgggtttatctttccttttctcctttgccttttgcttctcttcttttctcagctatttgtaaggcctcataagacaaccaattttgcctttttgcatttctttttcttggggatggtcttgatcactgcttcctgtacaatgtcacgaacctctgtattcttcaggcactctgtctatcagatctaatcctctgaatctatttgtctcttttactatataatcataagagatttgatttaggtcatacctgaatggtttagtggttttccctattttttcagtttaagtctgaattttgcaatataaagttcatgatctgagccacagtcaactcccctgttttgtttttgctgactgtatagagcttctgcaactttgcctgcaaagaatataatcaatctgattttggtattgaccatctgatgatgtccatgtgtagagtcttctcttgtgttgtaggaagaggatgtttgctgtgaccagtgcgttcagcttatctcttatttagcaccagaggattcataccagagtgaaaccttataaatgcagtgaatgtggtagaaccttcagtcagaatgcaaacctcagaaaacaccagcgaactcatatcggagaaaagccttgcaaatgtactgagtatgagaaagccttcagtgactg

SEQ ID NO: 27893 - DNA, 922 bp, Bovine  19866881091500
  misc_feature (1)..(1): n is a, c, g, or t
ncagcaccagcaagaaggtaaagccattccctagcggtgtgggagggtaaagagggatgactgagttcagtagtgggccttttaaggttcagttgcccacagggatgtcctgtgggcatatgaacagatggcattagatgttgttgatagagacctggaaagactatatggatctgtgagtcaccagcctgaagacggtacctgaaaccatgagggtaggaaagatcacgaggaagagcagatcaggtgagaaaggtgtcttgagacagagccctgagaagcatccaaatgggaggaccagacgggaaagaaggactccctaaaagaagcagaggaggtatagtagagatgcaggaggaaaaacacgagagagcagaggcacagacactgggggaggggaacgtgttaagagggcgcatgcgcagagtggcccgtgagctaaagcctggatgagtcacctagacttggtagcaggaaggtctttagcgaccttggcaagtgcaggcttagtgggaacaagaaaggagagcgttcaaaggcaaattaagaagggaatttgtagaactatcgcagggatcgaaaagggaatttagagtggctgaaatgtattcctaaagtaatggtcaagtcttcacatctattcagcaaacacagcttgagattatattttaaaacactgcaacataaagataacggcaaaagaccaattaaaagactgaggccaaaaaacatacgatccttttcttacacataaaggagcccaaagtaacggctttaatatgtaaaatacttcaatataaaaaaattagaatattagttgtggcatgaaactggaggccctttttggtaagttggtcacagcaggtgacactgggtttgggcatgattttccctaaattcacccagtggagggaataggggg

SEQ ID NO: 27894 - DNA, 615 bp, Bovine  19866881159486
  misc_feature (1)..(1): n is a, c, g, or t
nctctgcctgaccatcagctccatggcacaggcaacactgagcggtactccaaggccagccaccccaaagcactctactgccccacggactgctgactgacactcgtgccccagcctgcacggtgacctctacaagatttttatgaaaatcgcactcctttatatggacattaaacgtcccctcttcccatggtatccacgagagagccccagcccatggcggccacagtccagtgttgacagcaaggatcaggagatgttacactcttctaaccaggactcatcacaaggacttgtgttctcaagtcagaccccatgggaaagaaagaagaccatggacccagggttaccttgtgcaaatctggcatcaaatcctggtataaagatcgaatcaacatatccagagttcgtcgacgtttctgggcgaatgttggggtttccaaagtggctttttcaccgttaattactaagataaatcaagttacaaagggaattacaaatgttaggttattgaagaatgtccttctcaaggaaacttttcacagtaaatgccacccatttcctaatactgttattaccctcctttcatggaagaatccttaaaaaacttgctaa

SEQ ID NO: 27895 - DNA, 1288 bp, Bovine  19866881290685
  misc_feature (1)..(1): n is a, c, g, or t
natcttttctcctttttctctcttttacaaactcacaaacatactgaagataaaatgagtaaaattagaaacaaacaaagttgagattcagttgattggtaattgtattatatatcatacatttttgttcacatgtaaaatctgtgttttgctgaatattttaaatagtgagacaagaaagataaaataagtcagacgattaagaggaacgtacatttttttaaattagaaaattaagactagaaaagataacagaaatgaggaaaggattaaaattaacagtgatgagacagcatctgaacagttaaacaatgaagctaaaaaattagatgagagtataaaaaaagaactcaaaaactcaaagagtaaagttaggcaaaaagacaaaattaaacagtggaaaaggtttaaaagaactaacatttaagtgtttctaaacataattttaaagatgaaagggctagacatgctaaaacaatgaaaaaatcttagtatttaaagattaaaagaatataataaacataggaggtatttccttctgtaatgttccatgttaaagatgtatctgtatttactgatttacaaagatatccaagactggattagagagaagagcaaattacagagcgctattatagtctcagtacatatgtcacataaaagttgtgaatatgtagacagaggagtgatgggaatcataccaaactgaactgggagaggtaagggatcggaagtgggggtgtcatgcataccatcagatcccttcaccatttctggaatcttctcccctcccctcttcagtgcacttttgccctaccacccacacctgggtggccacccttcctaggtgggctaccctcgcgcttactgcagctgctctgcccacctgtgcagagagcaccgtgtgcctggagtttacagcccccaccccgcgacccagggccctcagctcctcgtcgcaggtgggacagctctgatgcataaccgacctcaagcagattgaaaagccagctctgtatgtgattttacattttctagccacattaaaatccatacactttatcttcaacatgtagtcaacataaaaattattgagacagtctgcatccttttttattcgtactaagtcttcaaagtccggtgtgtgtttcacatgcgcatgtcttactttccctgcctgcatttccttgctcagtggtcacatgtggcacgatgctactgcatgggacagcctgcctccacttgagttgaagctgttccttcacaggacttctcctgacaatgaaac

SEQ ID NO: 27896 - DNA, 1275 bp, Bovine  19866881309123
  misc_feature (1)..(1): n is a, c, g, or t
nacggggggagcccgtggtttttctcgagttcggcgggattctcgagttacgacggggaattcaggctgcctcttgtgttggcccaggcaagtccaatcttccattcgagttgcgaaggaaagctggggattgctctcgagtgactgcagggccagtagacctcatctaggcctggaggctgcagtgctgtactgaagcagaggggttgggaaaggcactgaggacagagtagaacacgggccagtgctggcctgttccctccctgggggccagcccgtcagtaataaggggtgaagacaagacactcccaagatccaggtgccccaccaagactgcaccaaacccttactgcacactgtgacatcacggccatagaaccatccaaatcctatcacatcccttagcaatgagtggaggcctccacactcccaggcagtggagtcgaaggtacaaggaggacagtgagtatgtgaaccatcacagacttatttagaaaaaggcagcatccgctggggaagggaaagctcggtctggagtacctgcagaggatggacctcatagccatcggtgtttagtccaggagtgcctggtttatctcccaacttccaattaaaacagccaagaagagccataaaaagagcctatgctggcaacaacgctgtagtcaaaaggaccaaagtcacatttcaagagtaatggcatagaggaagtaagcagtaaccacttgttgaattaacgaatggatggtttatgggaagaaattgagaaatgcattgctgaaacaagcctgtttctttctccggtgacacagtgaggaaggtgggaaggtgattctgggacaaaagagggcagctttgttaggaaatgtaagcatcccgctttttctgattggaattattttctgagccaatcaacagcattcttccctcatctctatataaagtgacacacacatccaaagcaaagaaaatccaactacttggaaatggaaaaataaaaatcaatcttagctaacacttatgtcaaaagggactctttatactgtcttctcaataaacactgtgatgaggcaaaagacaagagccttggtggtcttattagtgaggaagaggcctctgacagggagcccccatcctgctgccgggtttagatgccaagagaagtgactccacacagcctgggtgtttggagccagatgggcactacccactcccaagctgctacagtggtaccaattataggctgcaggcatgttgcaaaaaaaaaaggtcgct

SEQ ID NO: 27897 - DNA, 596 bp, Bovine  19866881362536
  misc_feature (1)..(1): n is a, c, g, or t
nttttcctagcagaaagccagaaagtattctgctgtcttccgacacttccgtttcctggttctaccttggggcttccatctgaggactgcagccaccctctcaccctgccggctccagcggcttggccccagggaccgctgggggattacacagcctttggcccggcttcagcttaccgctattcctcccccgcttgcggtcacagccaagtgaggcccggtgcccagctccgaggcccagatgttgcgggtctccgcaacgtcgggaaggacttacccgacggcttgtctgtggaggacgggaggctggtgagggtgggcatggtgggcagagggggcggcagcactttcaggttctggtcactctggatctcgttggtggagatctggttcatcatgcggttgtaggggggtggctggtagacgcggggtggggtggcggggggcggctggggcacaggccgggcggcgggcacccgctggcagtgctcctccagctgggcaatgatctcagactggttgtgggccagcgtggccagatgctggtacttgtgctccaggtaccttgtacttgctggccagctgcagcatgtcag

SEQ ID NO: 27898 - DNA, 790 bp, Bovine  19866881371390
  misc_feature (1)..(1): n is a, c, g, or t
ngcccccggggcaggtggaaccactgttgctctgtagataaggagctttgccttctttcttccttttccattttccagtatgatgtgtcagttgagtgtagttgagagtaaaagcgcgacattcccgtcggagaaagcgaggcacctgctggatgacagtgtcctagagccccgcagcccccgcaggggcctcgcccttgcctcctcctccgccgtcaccaacggactctccctcggtaagcgtccccggcctgcacacggcagcgggtgggccacggcccggcgtgtctgtgtctgtgtccgtcactgcagtgcccgggggccccgcaccccacccccgcatagagggctccctacaggcatcgccagggccaaagaggcctttgcttcccggtctccacttcacaaagggccatgggtcctcatcctgccagtggctctgagaggggacagacacgtacctgagacccactgtccttggcaggcgactgccaaagccttgtggctgctgcccccgcggggctccgtccctggggagccacaaaccctggcccacagggcaaaggaggagattctgcctggggacagcagcaaggcggccccggggtgctccccatgcgcttgtcttcataccaagaagccaaaataagggaggatgaaaaattgaccttctgggatgaaaatgtatgtctgaactccagccagaaatggtgcttatatcaatagaaagacagaggctgagctgctggggccagggttggcaggggtggtatcagacctaagggtggca

SEQ ID NO: 27899 - DNA, 2886 bp, Bovine  19866881489385
  misc_feature (1)..(1): n is a, c, g, or t
natccctctttaataaggtttagagtcaaacagttaaggggctagaaggtttctaacacacagcttcatggaccttagaattttgattggtagaaagaaaatctcaaactggggacaaaagaggtagagaatagtagtttccggccacactgtagataccatggtcacttccccttagctccaaccagagctagtttcttcttcctaaggttgcctgcaccatggataaaaggagctgtgaagttaccagatatactcggaaaaatcaaagtgggatttcaaacgtttcatctcgtcttcaaatcaatagcttaagatagtcaatactatttgtttatattaatatgttgaaacaaaaagaccaaagacaaaaagaaaaatggcaattaatcttccaggacagaaagcactaccgtttctcttaagtattgttttctgttttatgtctaaagtatctttattctgactgcaccggctcttagttgtggcgctggggatccagtttcctgaccagggatggaaccggggccccctgcattgggagctcggagtcttagccgctggaccaccagggaagtctcataagtagtgtggaataaggctgttttaaaagaaaagactcaagaatgagggccaatttttgtacaagatagtgataagcatgaaattatttgggaaggattctatatttaagaaagaaaaagaatgcacattgccctcatgcgttaccaacagcagcagacctcaacgattaatattccatttcatctgccagcctgtatctgttcctctataaaacaccttgtcctctatctttacagactgcaagaattcttccttgaactgcagggatagagaataatagatatttatcttgatcctggcaggaatccaagatgcggcaagtatcttaaattggtagatatagcatttaatggctctgaatcacatttcttgacttaaatgggggttaccctaaggattcaagggttaggaaaaatatactttggaaaaaaggggagacgagtgtttcatatcatcccagaaactcagagcagacaacagtctagtctagtggttctcaacgtggagtgatttgcccccaaggggacacccagcaacgtctggaggtgcttttgatcgtcatgactggagggtgctggggcactagtggggcttcccaggtggtgctgtggcaaagaatctgcttgccaatgcaggaggcatgggttcgatccctggtttgggaagattcctgagagaaggaaatggaaaccgcttcagtattcttgcctggagagtcccatggacagaggagcctggcgggctacagtccatagatcacacaaagtcagacaccaccaactgactgagcacgcacacctatgggcattgagtggggagggaccagggacgctgctaaataccccacaacgcacaggctcatacagcccaagatgtcaatagtatcgaggctgagaaaccctaatctagtccattttataaagacaccgaaccagagagaaatcaagtgacttctccatggcagcagtggtagaaagtggtagaaatcatcttacttccaaagtctgagattttgaccagctctaggatttaatgtgtcacagatcttcaggtctcagatatttaaacatgtgtaatctcacagacagacaaggccacaagtgcagtgctgccagtggataggtgtccaacggacagaagacaaaagccttggggggaagcttccagaaggcaggaggagctccccccacccacaccacccaacacacacaaaggcctagtttcgggagggctgctaccttctcccaaatccaggggctgcttacaagacgataccagaagaaaacaccctgctggacctgggctcaggctcacgcacaggaagagggtggagcccggaagagaagaaacactgaaaatccagacgagacggctgagtttgtgcaaaattttcaccaaacaggcagactgggcgacctcctccagtcagtcttccatactctatagagaacagaatctgcttcttaggttttcaattggtttattagttctgcaatcccatttttttaaaaaataattttaaaactttatttacttttggctgtgttgggtctttgttactgtgtgtgggtttttctccagctgcgttatctggggctactctccagctgcggtgcgccagcttctcgctgcaggggcttctcttgttgcagagcacgggctctagaccacagactctagttgtggcgctcaggcccagctgctccaaggcatgtgggatgttcccagaccagggatcgaacctgcatctccttcactggcaggtggattctttaccaccaagccaccaaagaagctccagtcccactattctttgttttctgtttcctcggcccactttccattttgctctgctgtttcacattacctcccatttgaactcttggttcattatttttatgtttgagggtgatttaattttccttatacctgtcttcttccagaataaattatttacctgagtatttatgccgcaattctgtcatttttccatatcaaatgtttacaaagttcctgtgtagagttttttttttttcttttttgttcaaatcacctagactctccagaggcgattctctctcactgtctacttgtaccaaaatgcacaggtgggctatctttgccccctcctcacttaccgaggcatgatttgaagactgccttcagaatatgagttgtttccacattgggccagcaccctttgcccagtcttccactaggggatcagtaggggagagatgactggtgaaatttgtctctccaaactgtaattcagcaaaatattcgggccaaagaccactc

SEQ ID NO: 27900 - DNA, 1117 bp, Bovine  19866880415125
  misc_feature (1)..(1): n is a, c, g, or t
nataattaccatttttgaaactattttggctgttaaaaatgtttctttttaataagctgattaaaagaggctgcttattagcataagctctttgccgttcagccctcttcctaattaaaagcactcatctgtggagacctcaatttttcccttttctctgtgatgagtttttggatattttttccttggcagtttgttttatttcactcttctgtctttggtagttttcggctcccatattccagagatagaagccactgagccaaataatacatgagaggaaatgtgcagtctgaatgcttgagagaggaggggaacatctacctgagtggttagtgttgaaagtgtaagtcactcaattgtgttttattctttgcaaccccaaagactgcagcccaccaggctcctcaattctccaagcaagaatactggagtgggtagccattcccttctccaggggatcttcctgactcagggagtgaacccaagtctcccacattgcagacaaattcatcacctgagccaccagggaagtcctaagaatactggaatgggtagccatggtcttcctgtcccagggatcagtcccgggtctccctcattacaggcagattctttaccatttaagccaccagggaagccccaaaagttgggtctaaaagtcttacgtttatggtagttgtatagttgtgtcaaatctcctactctcaagttaccaaatacgacgtgtaaaggtaaaaagcggtgaatacaaatccactgttctttgcatagtttatatccccaacatcaatagatatgcctttgcaaatgttgctactctaaaggctgctggaacacatacctgtgatgcccttagaacatggagatattcaggggatgacatgttatagattgtagatacagccaccccttagaaacagtccttaatatatgtgactaggaaacttgggaagcaagtatactccaaatgctgtgatatgtgtcatcatcatatatatttttatgggaagtttttaatataaacaagagtatacatcaagaaattatgtacattaagaacttattagcaaaaagagtggcttgctaaaaaacctggaacaaagtgagtgaaagg

SEQ ID NO: 27901 - DNA, 2561 bp, Bovine  19866880439368
  misc_feature (1)..(1): n is a, c, g, or t
nagaatttttagtttctccgctgttcttatgctttgtcctttagtctctggttatgtttacaaatgcagtctttggcaaaaagaacaggtaatgattcttcttgcaaatcactttaaaaaattttagaaattattctcctgatgggaatcactttatgacccctaaaacatggacgagagatatagttcagtgaagagaaagagaagaaaaataacgaaatagaaacaagcaaggttaaaactattaaaaataaaatgtatttggtgacattttgctgactgatatgtggatgtgtaaccgatatctggacatactctatgaagcattttaaaacttcactgcaggtagaaaacatttgagaagtttgttaacgtgcagatttgaaggctgcacccaagaaattctgatttagtgggtcttgaatgggtcaaaattttgtgtttttagtaagtagaaggaacaactgcatagaccaaatttagaaaaagaatattttgtagtgctctttgacagaacattctgcaatgatggaaatactctacacatgtgcttttaatgaagtagtccccagccacgtgtgacttctgagtactttcaaagcatctagtgcaggtgaggaactgttagattttatttcatcttaattattttaaatttaaatacccacatgtggctagtggctgtcatatgcggtttagttgctaagtcatgtccgactcttgtgaccccatggactgtagctcaccaagctcctctgtccatgggatttcccaggcgagagtactggagtgggttgccatttccttctccaggagatcttcccaacccaggaactgaacccagttctcctgcattgcaggcagactcttgcgctgctggcatattctttaccaactgagctagaagggaagcctggctatcatattggagaattctattttagaatatatgtactttgttttgggacaaggaccgtgcagttgtcttctgtattgtacctaccacagtaaggaagcaagagatactatattgaaataagaatggcatgatataatttttgcaggatatttccattcaatccatgaataaacatagcagtatgattttatatggtcagagtaaacatgtttatttgtatccttgtctgtaaagagtgaggaacgccattttcataaggtgaacaaaatgaaacatctgtggttaacttcattgatttgtacttaaaaataactgtacactagaaaggaggtatgttattggattatatggcaatcccaccaattaacttaacaatttctctgctgatagctgataggtcaagcacagaagccttgacgaggtgtcaggaatggctgtaccatagcttatgacagtctccaaatccatagacctcccttcctaagcaaacactaggaatatcaactgtcaagaaagtcacaacagaagaaactgagattccaagttatcttttagtgtttagtgcaatataaatattctaagtcaaagagcatcaggttatagtattcacacaccaaaaagagatgacacagcagactgtccctccaaaattagttggattcctgtgtcaaggttagcaggggtgtgaaaccttattttcactagacctgtgctgaaaaatatttagccagaaaagttataaaatgtacgcatacaaacacacacacagacaaacacacacacacacatagactaaatagatggggtttggcaggcgagggaagggaatggcggattgggatgttggaatgaaagtgcataatcatgtcaaaataactcacccccaagcagaaaagaaaataaaagggaagtagggcagaaaagaaagaacactaatggatccgcctcctttgcccccagagacaaaggttctttctgcacattcacattagcattttggcatatgaaaatgaattctagtgctggtctataacaaattactgctctgctagctgaaatcttagataatctcaatatggctggcaataagtggttttaaagaattgctcttagtgtgtgattggtgatacatgtgtcttgtgtatgagttggtattggcaatattccatgcagcttggtgaaggtgcctggttcttgacagaccctcttctggaaaactggctctggcctgaaaacagaggtagggagggattctgaagccagtgtctctacatctttccccattgatgccagaatatcatgagggctcacttttaatcagagatgggaaactattgcctcttataatgttttaaaaagctatcctcttcatggcacatctcagtatccctttggggcaatcccttgtgggttcaacttctttgataagcactgctttatagatgcaaaagaggaagcttctatcactaaaggtcatttaacaaatcagtgtgtttggtttgggattaaaatcctgattttctgatgcttagtctcaggaatattttacaattccacattattcccctatcttaataccatgcttctaaaaaaaatttttagaagaagtttacagatttcattcacaagacataaaaagatt

SEQ ID NO: 27902 - DNA, 1774 bp, Bovine  19866880478906
  misc_feature (1)..(1): n is a, c, g, or t
nacttggatttgaaaataccttaattccaccttatgggagcctagctgtttttatcgaaattcagagcttatcacttaaatcatattgtacctttaaatttaaatggatggtaaacagcattatttgttaagcctaaatcttcaaagatggaaaaactcattctgcttctcacgcatttgaccaatagtgacaaatcaccagctgtaggcagcccaagcagccaatgtttattaaatgtctcactcaaccccaaacctcatgaattgtttaacatacaagagagacaaaaagccagtatttttccttgtgtcagctcttgttaggagcatctctgctctgctcctctccctgctggctagcaacaacattaacattcattgttcttaaacacatgggggctttgggggcctctgtatacacagccaatcctgtgccaagtgtctataaatgcacacccaatgtgcaagcacagagaagcgaatctgaggaccacactgatgatatacatttaggagggcagggcagtgggcagaaagttccgtcaccaccaaagacaattcagacatgtgagagaaagaacctagtaaactcacaccaagaaaaatcccctgttaaatcaacagagataaaatgagactcttcatgtcgcccttttaaagttagcaaaaggggacctgggttaggtagctggtgacccacaagactgagactctcatccagcctcagggatagctaaagaatctcaccaattttgcttttccccctggctgctaccttccatagttggtgggaaagaatggtggtgctaaagaacccgcctgccaatgccagagacacaagagacacgggtttgatccctgcgtcaggaagatcccctggagaaggaaatggcaacccactccaatattcttgcctgggaaatcccatggaccgagaagtggcaacagtccatggggttataaagagtcagacacaactaaactgacttagcactgtttgggtggtaggtcatttattcagaaaatctccgggggcacttgtaatcatgaacccctgggattcaaagtagctggacaattttaataaataacctggatttttctctgagaatacaatattctagcattatagatgtgaaaagttcaaggaaaactttatttcaataaatgtctgcttaagagtcattcgatgctaccatatctataaacaggtttcagctggccccacaaaagtcaccattaagttaatcttaaaggattttttttttttttaaagctttgtaacagcctccaggaaggccaattatatgacattcatcattaagaatcaggggacaactcaagtgagttggaaacataaattgtgatcaacaaagacagagttctctttggtctataatatttgaccctattaaaatggaccctgaacactgaataagtctatctctttctggagttctttgatcagtgagattttgagctcaagcagcagccccagagcagctctagatgggagcacagcgcatggcctcgctttctctctcctcttctttcctgaacggagagctaggggtcttcttgttattacttcctgttactattgcaaaagggtctaagggatggatacattttcaaactgaataaatacagaaataaaacaatttaccatctgcacacaccaaccaactatataacataatttgtagtaatcagaggtcatccacagaaatacagaaagctggaggtggtattttccattcatgacatccaatcc

SEQ ID NO: 27903 - DNA, 2582 bp, Bovine  19866880501204
  misc_feature (1)..(1): n is a, c, g, or t
nttagcagtgaagctattctcttcattttacttcttatttctgggtcagagaagtaggaaatgggggctttccagtggtgctagtggtaaagaaccatctgcaatgcaggagacataagaaatgtgggtttgatccctgggtcaggaggtttccctagaaaaggacatggcaacccactccagtattcttgtctatagaatcccatggatagaggagcctggagagctacagtccatggggtcacaaagagtcagacatgactgatgcgacttagcgcaatgtgctcaaagctacagagatggatattgacacttagggcctgaattcaggaggtcttgggtttcccctaagtacacttttcactgtacttcactatgatgtccagctaaactatcaagatgccacctatatacaagtgcaatagggagaaagtgtgaaatgggccaggagttgatgtagatgtagaagataagagggttaggacatgtggaagaactgtgaatgtcagagtggtcagggtaagagcatgatacaactgctcaccctctgttgtatcttttattgtcccagggaacatggtcattgttcctcacaaacatcccctcaccagtgttgcccttctccatgtcctccctgtccccgccaaggaatactctcatggaaaatggaaccttcctgttatgctaacccaccactgttcaatgctataggcttgaatacaaacggatgtgtatccagccaatacaaattctgctggccaagtggttttcccagactaaaggatgacaaaggcaggaatagaaattacaattgaagtcttctgagagtaaagagagattatatggtataagaagcaagaatgtggagaaatggattgcagtcctgtaatttccctggactaattgtgagcccttgaagctcgatttcctctttataaaatgagtggatttgtcatgatgtcctaatggtgccaacgtgatgtaattaaatctattcaagaaataatccttatcttgattaggtaaataggagttgattaattccactctgattaaccacccacctctcactatttcctagaagcatttacctggtctacccaacatttcaccattttctcccagcagaagtgaaaaatgctccagtatccgtcacaatagagatcaagccaagatccaaatgctttaaaacataaaacacttctacagatggttgtggtttgcctcacaagtgggatggcattggtggggacaagatgaggcaggggggaaagggaggaggaggtataaaggagaggttcctttaaaacatcaaaaagtctttatagatctttcctgccctttcataaacacttcatctggcagccagattgccttaatggtctgcctagaaagacccaccctggcctgacatagccagacacactctccagttttgctttgcttctttgatgctgtcacatgttcttcattttctacatttcattcattctttgcctttaagctataaggataaaagtgcctggcatttaaaaaaaaaaatcagcttacattttttaaaggggcagaatttcatgcagcctttgattttcttctgggagaaagtcattacttttctttaaagaatactagagagatttttcttctgcctttcccccatttccatccttcaccccaactctcccgctttcaacagtaagaaataacactggttatagagcaggaatgggctagagaaaaaattgcctcctagaaagtacttatggcactgtagtgaataaaaaagcctgaacattcatttactgctaaacaattacaaaagataattagaatgttttaaagcattgcactatatttcacattctgttaaacactggttgagatagctatttttaaaatctggtagtgttgaggagaaaagataaccaagatagtatggtgctttttggcctttgaaatctataaaaaggttacacagaaaggtctgaagcattgtatatgaaggagagtataaacagaaacagagtaaaaccctgtagaacaaagacaacagcaacacaagagaattccagtgtgtggaaatactcaaataacaaatgcgtctataaggacatgctctagatagtcttccccaaaaaagtgagcctaactttaaaatacctagggatagagagaaactgtagaagaagaacaagtagtgataactaaaggataaaaatttgccagatatggagtgtctaaatgcacacattggggaaaaatagggaatgataagatttccaaatagaatagatgactatttctttttttttttttttttttgcttttcaggtaattttttaaattaaatttatttattttaattagttaaataaaccacaagaaaccttaaaacatttaaaatacctcattggaagttcatgataagtgcctttagagaatcaaacagaccaagcaaaactgaataaccagctaagtcaaaatgtctgtgttggaaggaaaaaaaaaaacaagcatctttgggagagagaaaagcaactagaaaaattggataatcaaccaactagagaaagcaccaaaca

SEQ ID NO: 27904 - DNA, 984 bp, Bovine  19866880516414
  misc_feature (1)..(1): n is a, c, g, or t
ntgggttgggaaaatcccctggagaaggaaatggttacccactccagtattctcgcctgaagaatcccatggacagaagagtctggcagtccgtgtagggtcagagacgatttagcaactaaaccaccatccttcaaataacaactccagcatattaccaactccttccctcagaacttagctaccctatcttccagtcaaaagcaaccactctgtccaagtgtgcccaaagcttccccacagccagtgatttggacatttttaccctttcatggggtttcttccttccccccaacccactctctccactttacttcaaatgccatttctctcagcaaccagatatgctttttttcctccattcaatcttcctggcactttgttctgacaacacttaaatcacttcctttaagttaagtccctttagttattaagttgttctggtaccatcctattagatgataggtaggttcattcctggaaggaagaggtgaagtgtcacacaaagctttccttttagaaggtgcccagtaaatacgtatataattgaagtgaacacatacaatgtgtatacgttttactgaaactccctggattgtttgaacatgaatgtatccggtgaagagtgccagctgtctctgggtatgagagatgcagcaaatttagccagagaatctgttcaaaatctgtttgaatgatacagtccaccatgtcccagattgctgcttcttactaccccaaaggggtctatattttccatggaaattgatttctacaaggaaaaagaaggatttggatcaatttacccatttgttctcatccaaaatgatactgatttgtattggattatcttcaaaattcccttggcacaaatagtcttcattagacaatgtcaagtgagtgatgtttaacatactgaggatccctgcaagcttagcaaataagggcagcatgatttgccagactatttgaggcattgttgga

SEQ ID NO: 27905 - DNA, 1507 bp, Bovine  19866880606495
  misc_feature (1)..(1): n is a, c, g, or t
ntgaattgtattaagtacagtgaatgtacaaataggccaggaatgtgtcatggcttgctcggaagtgcaatattactaatttgcatattttgcaagttatcactgagatttgatgatttgtccaagtaaaagtgcttaaaaatataaaactttaatgggttcatagtccattgcactttctgacattgcctgttgacatatcctagcatattttaatgctttttcacacttgacatggtactactgtacagtaattaagttcccataaatatgttcagtaatgattgttatttaaactgattagccattgatttgttcacatcaattcaatgacaactctgtttctcaaattaaacaagtcaacaagattatgacagtcttaacttacatcatttaatttgaagtagaagactaagaatagaccaggacaatatgctcggcattgatcactgtaaattcatttttaataactgttgatttttatacagcattggtacttatgttttcttacaaggatgaaaaatagggattcatgtgaaaagtactcaatttacaaaatgtctctaggaatccagaaataaattgtaaaataaatatgaagggcttatcacacattagcttcatctcagaatattcaccttggctaaattgaccagatgagtttatgttgttttacatgtacataactcttaaaattaaaaaaaaaaaaagtaagtattctgcctgaaagcatcccctaactgcttactttcactttgaattcttctgaaaattctcttccatctcagatttcttcatagcccagggacaatatccaaactatataatctggtatttcaagacccaaatttgattttttcaacttctccccaacatgagctctctttcagagaatttagtctactctctttcaaaccaaaactccccagaatctcctctaccactctcctccagtcaccgattctcttgccttgatttccctgtgaaatacatattttattttaaacagcacaaaaggagaagaacaaaatgaatgaagaaaatattgactccatctgtgtatctgcccaggtcagagaatcttcttctgttcatgatcagttgccttgtttctttacttgtttttctgagtgtacattgggaaaaccaatttatagaacagtttggcaaagctgaagatcctcatacatagaaagtctactcctgggtatacaccttggggcaacattggtacatgtgcataagactggtacaacatcatcaccatttgttgtgtttcaagtgaggcaaatggtgagcttggttgataggcagaaacagagtttggtatttagatcctcctcttgatctaggggagctatcttgaaactgggaatttgacctcagttatctttccaggctgtggctttacactgacaacaacctcatgccaagctcttttgttggttatttgtatgatacaacaaaattgatctctattttccaatattcctattaaaaaaaaacc

SEQ ID NO: 27906 - DNA, 1127 bp, Bovine  19866880623077
  misc_feature (1)..(1): n is a, c, g, or t
natattaaagtatttcaacttactcagcatggtatcatggatttactatgaattctcttccatgtcatcttcatctcaggatactctagctgatggagtagcctctatgttacagcctctatctctaacattgtcagttgggaaaaccaaatcatgaactcagttcttcttccaacaagatgggaatggataattttcctacaaagggaggggcagtgtagggtaggcaaccaaatatgaatgagcagtaatatgacctatactgaagtcaatcactataactataggaaagagtctaatgcagacttagacagtccagattcctaacatagggagctggacttctggctttccatatctccaaattacataaaaattggtaaaatctggtgattcccaagttgtagtttttaagttaatatcaaagtaggcttacatcttattttttaaagaatccttattccagaatttctttgaaggaaggaagtaactactagagaaaaatcacatactattgtccttctttttacctttccctttagctataaagaggaaaaaaaaaaaaaggcaaatcaaaatcattctctaaattattgatctttttgatattatataaaaatataatataaatacacatcaaaagctgagcttggttataaaaagagagtacatattcaataaatttattcagatcaaatgggtatagtgaaagctttaaataaataactgataagaaggaaatatctagcaataaagtagctaaaaaatgagtgtaaatctcatgtgaacccatgggaaatataatgttacagtagaagagctgacaacaaaattaaactaataaatgagaaatacgtagtgtatcaattcgtaactctacaatgaatgtgctagtttactttcccaataaagtagcttatttatgactaattttttttaggtataggaataaatatcaggattctaaaaaccagagttctttcaaattcctttgaaggaataaaataagaacaatgtaatttatttctagggaccatagaaaacttgtctaagttttatagggaacgaaggtgttcccagttcagatatcagcttaatttcagtggaactgcaagaaaacagaataa

SEQ ID NO: 27907 - DNA, 1089 bp, Bovine  19866880686477
  misc_feature (1)..(1): n is a, c, g, or t
ntcaagtattccctcctcaactcaagcatttccaagaatcaggcttacagtagcactgtagagatgaggaggtattagtcaattctactaaatacttgcttccccagtggctaatcggtaggtttaaaaaaaaaaaatccacccgaaatgcatgagacctgagtttgatccctggatcgggaagatcccctggaaaaggaaagggcaaccaactccagtatccttgccatagaaatcccatggatagagaagcgtgatgggccatagtccatggggtcacaaaagagtcagaaatgactgagtgactaaacaataacaacaaaactacttacaaaaaaaaaaaaaaaaaccagggggaaggagtcatgagagagtacattcacaccaagctggcagtggtcggaatcttggctgaagagttactggacagtcacaaaaataatgattttttacatctacaaaaatgttctcccatcaagtgtacacaatgatatccttatgaatattagtgttaaaatatgtgatcagataagtgaagagaaaagataaactctctgctaagttcaaagaaaacgtgctctagagactggaagatattataagtaatgctttttccaatattttattaggcaaagtgaaggaagagctgaagcagctagatattgaaagttgttgatgaaaaagttctgaattatccatgctaactctctaataaatcatattgcctagaaaatcactctcttcttccttctactttctccgaaatatctgattcttgtgttttgcccctttaataaaataagagtccaaaccaaagggaaacaactgaccttaaaaatttcagacttggaatcagtctccactgaaaggagctactgctgtctctcagcccaaaagtagaataccaaatccatacgggctcattaaaatcttagactccatcaggcccatctgtaatgatgacaagtggtaatcaatgtgattggagtatgtgcttaatgctttcgtatttccatgcatgcatacatgtagaatggttcggagagactggagatatttcaggattgttttatcacttaagatttcagg

SEQ ID NO: 27908 - DNA, 831 bp, Bovine  19866880739563
  misc_feature (1)..(1): n is a, c, g, or t
nagatgtaaaatcagtatgggtcaagtaaagcttagtaattttaattgcattcatttagggggaaaaaaaaaaacctcacatcttaacctaaaccttcacatttctttctgccaaatttgacttagggcaaagcaataaaaaactgccagcgttcacttaaatggacagagcgatgtaataagttattcagaagagcagatcactcaaagatcacctctatttgggtttataataacaattttcagctgatttactttcttaattatatttctcttaggttattaaatttgcaactcttcagaatatactaactgggtggcagaggcctggaaaaaaatcagctcttctgaaggagccaactcaggtcacataatacactggggggaatttccaaagagaataatccaaaacagagtgcatcaagtgtgtgctccagccttctagaactgctttcccttttggtgacagtctaaggaaatatcacggggctttctcctttaggttgggcctctaaagaaaatcctgattcacaaaaattgtcatgcagtgttattcaaaatggtaaaaaattggagacaacttaatatccaacagtaaaggactagttaaacaaattataatacatcaataagatgggttcttgtactattaaaatagcatttatggagaattttaatgacttgagaaacagcttatgatataccataaaagggaagaaaaatcaggttataaaattgcacagtatcatcaccactatgtggttaaaagcacaactgcaggaatctggctatgaacatctgattcctgatggtagcagttattaaatattt

SEQ ID NO: 27909 - DNA, 1739 bp, Bovine  19866880749566
  misc_feature (1)..(1): n is a, c, g, or t
ntttttagttcctcttacttcctgcctaagggtggtgtcatctgcatatctgaggctattgatatttctcccggcaatcttgattccagcttgtgcttcttccagcccagcatttctcatgatgtactctgcatataaattaaataagcagggtgacaatatacagccttgacgtactccttttcctgtttggaaccagtctgttgttccatgtccagttctaactgttgcttcctgaccttcaaacttacttcagtaaattcattaaaaatgaatgaaaaggcggtgatataaaccatccttgcttttgaaaacacagtgacagcgtttcccttctattctttattatacttacttagaaaaatatcagaaaacagagcttccatagctttttgattggcttaggactgaacaatataaaatttcctggggaatttaagatttgccttactttacactctcatgcaggtttttaggtcagctaccccagtaccaagatgtttccttcaaattaatgttggaacactattattacaaatctctcttaaaggggtggtgatacatgtattcctccatttgtctgatgcttttattagatgagagccatctactactaactttaggcgttctcaaggagccagtgaatttgagaagactgctgttaaggaaaatcccatggacggaggagcctggtgggctgcagtccatggcgtcgctaaaagttggacacgactgagcgactttactttcacttttcactttccactttcatgcactggagaaggaaatggcaacccactccagcgttcttgcctagagaatcccggggatgggggagcctggtgggctgccgtctatggggtcacacagagtcggacacgactgaagtgacttagcagcagcagcagctgttaaggattgattttattaataatgaacttaagctctgtacttcagtaatacttttcatgtaagagtcttgaaatacttgcaatttaaatgaattaagtcttctaagatcctttgagctagagaagacttggttttgaaatagaaaatctaaagaagagagatacaaaattagttttacattttaaaagtaaaaaaaaaaaaaaaaaaaaatcacctttccctgaccatcccctcacttagttgtagagtaaagctacatctttagctttgactctctgttctctggacccagccctgtgccagccactcagctccccagacttgtgggcagttggtggtaaattcttccagaagctgttttactgtctacttttcaggatttaaaaagaaaaaatacatataaaagttttaaaaaagcaaaatgcagagggcagatgtgatgacagatttttttttttttttacaattatgccttttaaaaaaatttagaatttgtcagttttactgtgggttggctgttgatgtttcatcaggacaaccatttctttgctgagttcagatgaggaggaagagccatgccaccaaaacaaaacacacaaaacaaaactacagagtcatctctaaccttttattcaaggtctcagttttccttaactttgcacacaagtttcagtgttgagttgaattgtgcctgctttttatatttggagagagtgtgactattgaaattgaaaacttaaaaaaaaaatcacctttctcccctctcccttgattttctgagttctgccccccttgctctctatccccctcctctcttttcccatgtt

SEQ ID NO: 27910 - DNA, 2495 bp, Bovine  19866880779532
  misc_feature (1)..(1): n is a, c, g, or t
nccttgacttacaatctgaaaacttcgatgtgttttaattttcgtagttcttgtgaccatctgatacttgttctgtattaggtgctatggtctacctaggtaacaaagggattcattcattgttattgaaaagttctgttttgagtccctactagtgccaggctctatttcaagtactaataatagagaagtaaatacgtcaaatttcctgcttccactgagttcgcataatatgaacagaggatgataatatgcaagtaactgaaaacaaaaacacacaaatatcgccaggtgccagcaagtgctacaatgacaaataaagccagttaagtggaatggagccaggggtaggggtatggagatgaatctgagatgaaacaaagggaaatattattttcaggggtggttttgtgctgagaaacatagttctggtggtatatatgaaggctaatttgtatggtggtgagatagggattgctggttaggtatcactgtaattgcacagggcagagctggcaatgattgtgcgaaggggctgacagtgaggtaaggaagagtataagtaaatggataggtctatatgtgtataattatgcatcatatacatgtatgactatatatcaatatgtgcatgctaagtcacttcagttgtgtccagctctttgtgatgctataccaggctcctctatccaagggattctccaggcaagaagactggagtgggttgccatttcctcttccaggggaatcttccctacccagggatcaaacacacatctcctgcgtcctctgtattggcaggtggtttctgttccagtagcaccaactgggaagcctctatatcaatatgtgttgttgtatttatctgtatatctaggaagaggaagagactgaatagagaagttgtgagccatgtttcaaaataaaaaaagtagactggacaggacttggaccctttttaagtctgttgggcagctgcttaacttggacaatgcgctagacacatgatacacatgtgtgggtgcacaatactttacataggaaggtctgttatgtgtcaaacaacatgtgtctacatcagagaatacttagcaaattcatgaactgtgcctgtcacattttgcgtgtcttttcaaaaaggagataattatgtttagagtgtgttagtaaaggaaaatatattttcaatttaaagtcatgcctgtattatataaacaagtcttcttttccctgcaggacacaaagcctggtcagccctactgactgaaggtagttaataaagtcatcagactctcagtaaagaaacaattgccttaaggatgagaagtgttagcttatagataaataaaaattgactgtttcccactcatactacaccccctcaaggatttagccaccaattccatgtacatacccatatgaagtaatttttaaagagggttctctaatgtgatgagtgtcacttcaaaatgctttttcttcccattagattggattattgagccagagagttgtgggtttgtccctttctgaccaggacactgatgagcctcatgaattaaaatttatgtcttcccttgttactgatttgccacctggctcttttgaattatcacagccaccaaatgaattttatagtccattgggggctgtccatgcttgttaaggtgatatttccatctctggcatagcacaaaatctcatcttctccttggtgaataatcacggtgccgaatccccatcagacatcttctgcttcttaaaatggcgtaagttatgcatcctctgcttcatagcaggccaaaagatggaattacaatcaaaccctaaaagccctgttgttatctctgctatgtatcagcttccagctacaccagcctctggtttagtgacatatgttccctagatggatttattctattcccatctgattttccctatttcttccctggtggctcggatggtaaagaatctacctgcaatgcgggatacccggtttcgacccctgggtcaggaagatccccttgagaaggaagtggcaacccactccagtattcttgcctggagaatctcatggacagaggagcctggagggctacagttggtggggtcgcaaagagtcggacatgactgagctagtaacacacattcttatttctcttattttctacttctctttcttccttattctattaaaatctcttgagttcactctgctgggagattttcttacattattgcatttaattctttcaagaatctatgagtaggatttctattcctatattgcaagtgcaagcaagttgcccaaggtcatgtaggtaataggagaaaaagccagaatttagcttgtgattataggatcacaaagactatgtgtttttttttgtttgtttgttttggtttttatatctgatattgcctctaaagaaagccatgcattttcctcattctgttatacctcactctggcattcccagtgtctcacagcaaat

SEQ ID NO: 27911 - DNA, 1364 bp, Bovine  19866880867755
  misc_feature (1)..(1): n is a, c, g, or t
naatgttattgcaaatatcaattagagaatgcatgtgagaatatttggaaaaaggtgatatacaaatatatgatatcattattcctttgctggtaaagctttggtcatttagttaatatcaaacattttataaatttacagtagtctataattctttgacaagatgaacgataacctttcagtatttctttttgccgccttttacagagaagttgttggaagtatgataaggtttaaaactgttagagctctatggaatatacctaaaatgaggaatgtgattcacattagtatttaaatgtacaccactctttgttctatttataaagcatcaattagcaattaaagtgcccacataattcctactttgttgacaccatcctttcccattacatggacaaactgaaacacatctgggtctaggagtgttactgtagattaccaagtatgatctggcacaagaattgagaatccctttctaactcagagctgccaatagaattgtctgtgatcaaagaaatgcttgatagtctgcactattcagtaagtagccactagccatatgtggctttttagcccttgaaatgtggtttatatgatggatgagctgaatttttaatttaattttgattaatttaaagttaaatagctgtatttggctagtggtacttactaaattaaatggcacagttttaaccaagtcactgtatttagcatgaggatttgctcattagccaaatgaacacttaaaaaagaatgatgatatgttattttataatgtgaaagaaaactccctcacagactgtcagcatggccagagatcctcattggaagaacattatgatgagaggttagtgtagggggcatagaatcagaatatgaaggtttattctgatgattagatgattcagaatagttataaaaactggggcaatggaacaaactggttttactgctagaatacttggcccaccagccaagactttccttggatattgctttggcaggtattgctacctttgctctggtgactctccttgttaagcccctttctggttgacaagtcctttctgctctttttctccaaactcatacttcatgtatactggcagagagaaaagtctgtctcatctttttggctttgctcccccataactctcagtcctagaaacagatctctcctttcatcagcgagagaaatgctgggaaggcacagaagggaaagaatatttattttaacccttctgataaggaaagaactcaacctgtctgggaagccattccttcttttccttcagacataccgtcaagaacatcttaaggtcagactgtaaatcatgtaaaatatctttatcttttcaagg

SEQ ID NO: 27912 - DNA, 2660 bp, Bovine  19866880880183
  misc_feature (1)..(1): n is a, c, g, or t
ntcctgaggagaaagtttcagccctcatgaagcttgcaatagtggaaaaaacatatttgaacagtcactacaatgcaatgtaacagagaccataatagagatatgtgtggaatatttcttcaatgaatcatcttaactgttttcaccaaaatactttccactatgttgtgagatcagaaactttcttttgcatttctatacaatcaccacagttcttatttcctaaaaaccaaggtcatatttaaatctattaaaaatccaaggccacttgtaatttcccaaatgttgtgcattgatttatagtacctgaagtcatagacttgtcactttatttttggagaatcacagtgaaaagtacccccatacacacacacacacatgtgcacacacattttttttctcctttctccatcagctctgtagttctctattatatctgatgttgtatgagcgttctttttcatcctcttaagatttcatgtcttctgcccagcattctttcccattctgtgatatgtactgtatactttctagaaatccatattttttggcattaaaagccatcatttggcatgttttcatttgagacactgcagcgttatcttcactctgaatatctacatgcaaaaatctcttccaaagccataatctttaaatttagaagaaaattccacttgcagccataatttctagtcttgaaagtcatagaattgagttcatgaagggaacctaaataccattgacatcaaccctcttcttttgacaataacaaaaacaaagcctggaaataggaaatgacttgtccaaggtaaaagttgctacagatacattccagggttcctctggctcaaccatttgttctcacttgaatcaacaaagtgggtggcaaatggtgggtttgatgagtcttgggaggcacagcatcacccttggagaagtgctctgggaaaataataaagtcttcaatcagccctgtcaacctacataaagatacttatgtaagtgactatgatcacgtcttacttctaaggtctatgataaggtgtcttgaatttattagtgcctataattcctcctgaataaaatgtggctcatgggatgtagttgcttcttcagctgctgtgggaaaagacaggatgacttcattttaagaaatacagcttttttttttctccctattttctgtgtcatatccgtcttctgaatctcccatttgtttattcattccacaagagattgttgagcttccaatgcgttctgaccatgttctttggcactgggcataaaagagtgaataagacagaatttgtctctgccttcatgtctgttttcagaactgttcagcaagattgttatttatgttttccctctgtattatttctactaggataccttaaagatactttgcttgtagagaaataatcttcattttttttttttttactatgcctgtgcattattaggacatctcatgaaagtaaactattgtgatagagaccctctcaggtactgaaatgataagtttcttgtccattctctgaggttccatatagaactgaagttctctatcattaatataccagtgtgaatttcaagggtcaactatttatttcctttttccctggtcccgttcacttgtgggtgcttatgcattcaacactctgtaagtcagttacatagtcttcagatattagcatatctatctaacaaaacactatatatccacattacttaaaccatgcctagaacttagtaaatgttcaataaatattgcatataagtgaaaggaaaaatgaatgaatgagcttcagaaatgtactgattctgtgctggctggtcatctccttcttcattcctagaactgacattaacctgaaaaagattagaaattagcattaatttgcacaaaccttgtttagttatagccttgttaaggaaaaatcattttatgtagactttcctacactattcagtaatgttttcccacatcctgctgcttcctttactcagcctcttttcctggaggtggttgtcatactggacacatgacccacctgatggagcccacctggaggcatcttagcaaggctttctctgggacaagggttggaattagcaaggcaggtctccttgtatagctactacccactatctagtatatattcccattgtttgctttatttctttgcctggatgatggcttattttcaaaaaggcacaaggcataaataaaaaatgcaatgaattaattttttttttcatttagtaattactgcactgcaccaaacagagctggatctgagtgaacgttgacatctaattttcaggttttgaattgcttggagaaaagcagatctctgtttttatctgctaacttttcactgtgaggtaattatgcataacagagtatgttcctgggcagtgtttaacacaggcaggtcataactagacagaaagcggacccttgcttttaggataggaataattaaagattcataattttggagaaacagcagtgatgtcacttaatagacagacatggggaattgcatgcttaaaaggcatgtgttttaccattttagatcattcataaactgtaaacataattggaaggaaagcctcttttctgtattcttgtccctatctccatagcaagattg

SEQ ID NO: 27913 - DNA, 1119 bp, Bovine  19866880886583
  misc_feature (1)..(1): n is a, c, g, or t
nttccttgtagtagaagcaagtacattagctaaataaatgaatgaataaagaactatgcgtttggatagaagtgtgaaatagagcatggaaggaacttaacagtttaaattaagtataaaagagaatacagagtcattgtaagttcataaataagaaagtgatagaatgcaattccttttttagaaaatttgagtcaattaccagcattaaagtgcttcaggtggaatgaagacaaggtctagcaattaggaagtcactgaaggaatctagcaataagacagggggagaaaaactcaaaacctattcatttgtctgaattagttgctacagttgtatctctccatgtcattacacctaaattggtgaagagtaccctgtttgtttctccaactctcccatcagactacaagcttccaaggtcaggactgtgcattatttgtcaccatgatgcaaatatttgccacaatatcttacaaatagcaggtaacacaaacattttgcatgagtaagtgaagaagaaaagtaacaacccagatgagggttatgacagtgagaaggaaagaaaggaagacaaagtgcagagtttcaaaggaagatctttgctgagctgttgccttctggtgttccagtcatggtgttctaggcaatgctcattcattacacattacctcttcatctcatgaggatgtctttttttcttgctcttgattgctaaatctccacttaagtgctggctagttttgtttttttgttttttgtttttgttttttttttttgtaaataaacattcaataaatcttgactgaactgtattctaagtgtaggctctgacagcctagacttcctacaaatcaatctaaattgtatccttaaaatgaatacttcttatccactttctccacgtcccactaaaatgccccctcagctcatctctactccatctggttgtacctctttgctaccagcacccattaccacatactctaccctcacatggccccagtgctctttcactcaagccatgactcaagccagactctacctggtccctctctactcagtgtcacctaagagtgtaatatctaagagtgtaactcctgaaaatgtgggccttacat

SEQ ID NO: 27914 - DNA, 2698 bp, Bovine  19866880886970
  misc_feature (1)..(1): n is a, c, g, or t
ntgcgtgcacgcccactcagctgtgtccaagtctttgtgaccccatgaactgtggcctgccaaactcctctgtccatgggattattccatgaagtaggctgccatttcctctttcaggggatctttcccatccagggattgagtttgagtctcctgcatctcccgcattagcaggtggattctttaccactgagccatctgggaatcccacgtggaggtcgcaaacgctcatttaaacattttccagagtacctgatgtgctgacacctctaggtctttcagcatgctcttctgccatctgggtgaaatgcttcactctttatgtcaaccatcaaggaccattatgaagaccccagctcccacatggaactttctattcctaaccagagcacatagagactgcttctcccacagcattgcttttccactttgcacctactcttagctaattaaaagcagacctttcagtccttcacacaagaccctccactctatcacctaaaacatagttttctattccacctcctactgttgtccacattgatcctacagccccatcctactgaacctcatgttctcctcccctctgctccctctccttcttctcctcccatgttcagtaaccaagcaccccatccatcaaaggccagcacaaaatcccattccttcttacaaatactacaggatatgatctctctctgttaaacctgatatcatttatatcacctgcacagatatttaattttgtggaaagattaaaatttacttgaggggagaaactttcaagactctctggaaaatccccttagaattttttttttcttcttggccctaatagtttgctttgagtgtctcaaaggacattttgtaataggtttacatggagaacttcatggcaatctgaaatgtggacatcattgtcagtttggacttcaaacaggaagtaactccccaccacaagaactttatgattcccttgtcattatcagggagtacatagaatgtgtattttatcaatgggaaacaagctagtgaaaggaagacagacacaagacattaggtgtgtagagagatgctgtgctactcagtcacttctgcaaccaagaagcagatcctactggaagaaagcaaggcctgaagaagtgttttgttaatatagatttgggactaaagatcatagtgtaagcaaagatttctgaaccacagctcaataccaagttaatattgattgtctaaatgacaataaaggggaatgtttgtggaactgaagactaaatacttcaagatgatactcagttagtaaaacacaatttgtcttcagagtgtctcctgggtgcctaacattgatattgagaccaagcaaggacactttggaggtagtgggacttctaaggaggaagagagaaaaagggaaggaataaaaattcaataactctgcaaaataaaaaaacaatgagtaaagaaattaaattaaaaacaacactagcaaaaaatttaaccgtatgaagactacatagaagacagcaaagaagcatctgtactcccaactggcagaaaacccccttgtcaccaccaccatcctagtttacacaccacactgtcttgctaggatcaacgcaacagtctgctaagatgcttgctggcctcagccttgggtcctgtgagcacatcctccacacagagcgctctttctgaacaaaaaccagttcaagtcatcaccatccccacaatttgcctgactacttctgcactcagccttttcactctctctctcagtacttgtttaggatttatgaggcatcaagggcacagaaacaaagcagaacaagcttgattcctgcactacaggagaaacgtttcctataattaagtccaaatgccttgatgtggcacaccagtctcacattccagaactttcttatctctccaacctcctagaccactttcctgtggttttgacactccattcttagactcattctgtattcttacttttctctattagccttctccacactcttttgctgtcatctttttcaaacgatactttttgtactgaaatacccttcccctcccaccttcctggacagtctcctaactagctgctacttctctccaggataccttttagaaccctctgttttctctttgcatgtcagctgcctccactatactgatagatgagagagatcccacattatttattggtagataactccaatactcagagaggtacctgatttatgtgggtgctcaattatcatcagttgggtgccctaattacagtttgaccttgtgttgctcatttctactagactgagaggaataggttcaaactgtgcctgaggcagggactttggtgcacagctatcttcagcttggtgaatcccaggcacagaataaatatctgttgggtgaatggatgaaagaatgaattaaattaaaagaaatagtattaaaatacatctacacaaatgtgattagaaccaaaacttgacattgagtattcttttgaccaaatagaaatctggaacattcaagggattaaatatcataagaaaaatactcatttctaaaaccttttggtatactccaatttcccctttcctcgcatggcacagtaaaagcactggagttgaaactgtgagaacctttacaattttacttctgaattatgaaatgccatatctaccagcct

SEQ ID NO: 27915 - DNA, 963 bp, Bovine  19866880929851
  misc_feature (1)..(1): n is a, c, g, or t
ntcctatgttaggaagctactgttacattttcaaccttcattctcaaacccgttacagttttgactttcattctcaaacccagtctgcaacaggttaagagctataccacgaggcacaaaagcagatactgaatccatttctaacttctagagtttttcatctgctcagctccaagattacagaatatagctcattaatacagctcaggacacaactgaacacctgaaagtgttgggaatctaccaccttctagaaatctgctgagccagccataatttgctcacaccaatctctcctggattcattacagcatgtgcaatgtaacctaatgggcttacttttgtccccaggcactcccatttattgtcacaaactggtgcaataccttcaggtcaatatctgcaacagtccactctgattttgcatctagatagaacgtcccatctttcctttcctctccttttctctaagaagctctataaattactggcattagcagtaacagaaatttctcagtagcaaaggtaggttctggtcgcaacaagaagtggatttaatcttcgtgtatgaatactatgattatgaaacccagtctccctgtgttccaacactagcactaatagttggtatgctcaatcttccagcatgattttctcaagggtcttgcatggttgcacagtctcctctgttaactggtttctgcatgtgtagggtggacataatacagccaacacttgatcaacactcgtgtcctgaagtaaatgttgacctggtagtgaagaggacagaccacgtgtggccttatgagacgtgtgcttggggtcacgtttagatcccagaccgaccacttatcaggtaaatctcaaataagttgcataacttcctgaaatttcagtttcttcaagtggagaaatgaaaaagggcaacattcatctcgtggagttaatgtgaagagtaaaatg

SEQ ID NO: 27916 - DNA, 1311 bp, Bovine  19866880942660
  misc_feature (1)..(1): n is a, c, g, or t
nctgtccatctcctgctttgttttatgtcattctcatctagctggcaaaaccccaaacccagattcattctttagccatctttcccttctaatttcaaatacctgattcctggtagagaaaaccatatacaccacagcatatatctatggtctcatgtccatggggtctcaaagagtcagacgtgactgaatgactaacattttcactttcacttctcataaaaatagaccaacagcctaaaattaggtatttgtgtgaacatgtaaatgtgtattaaaaaatgagctacgtttttaaaattataggtcaaactattagtaggttgtataaatagttttgtagttaaaatatacgtttttatttttagcaaaatatatgagaatagaaagctgaggtcagactgtcttatttacagtaaatcaatgtattgcttcctaatatgtgtgtgcatcatgagctataaagtataacgaaattcttattgtggttcataatcaaaataattcactgatctaaaactacacaggatattggtgagaaagaaagaaagtgaaagtcactcagtcatgtcaactctgcaaccccatggattatacagtccatggaattctggattcccagaatcccgggcctggagaccgggcggattctgtaccagctgaaccacaagggaagcccagaatactggagtgggtaggttattccttgtccagcagatcttcccaacccaggaattttatcagggtctcctgcattgcaggcagattctttaccaactaggctacaagggaagcccaaagtgaaagtgaaagtcattcaattgtgtctgactctgccaccccatggactgtagtacgtggaattctccagcccagactactagagtgggtagcatttcccttctccaggagatcttcccaacccagggatcaaaaccaggtcttctgcattgcgagtggattcgttaccagctgaaccacaagggaaggccaagaatactggggtaggtattggtgagaatggggaacaaatggaatgctcattcaccatgggtggaaacataaaagtttctcctctttggaagaaatcatactttcttataaagttaaacgtatacttaccatatgactcagtaatttcacttctaagtatttacataagaaaaatgaaaccttatgatgacaaaaagatttgtacttgactgttcaaagatgctttattcacatcagtgaaaatgttggaaacaacccaaatgtccactgactgatgaattgataaacaatttgtgggtagatccatatagtgaaata

SEQ ID NO: 27917 - DNA, 861 bp, Bovine  19866881073914
  misc_feature (1)..(1): n is a, c, g, or t
nacaaagagtgagacactactgaagcaacttagcacctatattgaaattctggaatataagagtgctgtgatagcaaagatattacaaactcaacattagagatgttttacttatgtttttcctatttgcttcaatgcttatgcgtatgtaaattttagcatgtccttatttaagatgaattgacaatggcataagatcattgtgatattttgatgaggtaatgcatgcaaaagcacttggtaaactgaaaacaacagcacacccattgtatgtacacatacaaacaaataatactaatcccctcccttgttggttgctctgttcagttcagtagcacagtcgtgtccaactctttgcgactccatgcactgtagcctgccaggctcctctgtccatgaaattctccaggcaagaacattggagtgggttgccattcccgtctccaggggatcttcccaacccagggatcaaacccaagtctcctacattgcaggcagattcttcactgtctgagccaccagaagagcccaattctctcccttattcttttctcagtgtaggtcaactctgaaggtaacctacaaacctgagatgccagtttttctctttacatttcactttgtaaatttatcagaaactgcaattgatgagcgaacaccccatcttagtccccccccactcatttattcagttctgtcctcttgcttggcttattccctagactattctgaaaagtttcctctcttctctcagtgtttacattcttcaaacgctcatagacagttatcatacgccaactcagttgttgctttgccaagctatacagatttcatcctttcatctttcctcataagtcaatg

SEQ ID NO: 27918 - DNA, 1015 bp, Bovine  19866881120602
  misc_feature (1)..(1): n is a, c, g, or t
ntttttgttgttgaaagatcccctggctgcagagcaggagctggatcggaggtgagcggggtaaaactggaagcaaggagactgtgcatgatgaggatgacgactgaaatcagagagccatgatacacttctctccccaggaggagaaaaaggcagaattacaccaagaagtaattaacggggaaggtagaaaggcagacagagttcactgaagaaagcagatatcctatcctgactcaggagcctgcagaaggaagattatcagaatcctgcgtgaagggagcagttacgaaggggcgagccaagggtactgttttaaagacagactctgtaggaccatccatcaaaagtggctcagccgctcagtttcactgctaacaggtgctgaaacctgatccataaaacattcccagggtgtcattgaattgaaacattggagggttttactcaccctgaataagaaatcactttcagggattgaattttaacagattatctttttctgctgcttgtctaacacacacacatatacccttttttaagtgtatggttgtattaactatagggctttccttgggactcagatggtaaagaacctgcctgcaatgcgggaaatgtgggttcgatccctgggttgggaggatcccctggagaaggaaatggctacccactctagtatttgtcctggagaattccatagacagaggagaccggtagcctagatgagatgggaaaggcaacagacttctcattgtacgtgctgctgttatgatggattcaatcattcatttatacattcatgttcagaattcacagagttcatttagggaggtttagatactgtgatggaaacaaaaggagtaggtgctcaaggatctcttttcaaagctcatagagcttaaaatcatcaaatcgcaagtaaaatttcactctttaaatcatgtgtgaaatttcacaacagtattcggttaagtagtggcccagcctctgaatcatgcctatcataatagatttc

SEQ ID NO: 27919 - DNA, 651 bp, Bovine  19866881196580
  misc_feature (1)..(1): n is a, c, g, or t
nttttttcctcccctctgaatttaaaagtcttaagtctttgcttgttctttgggtggaaagagaagatacttaacatgtttctgacatatataatctatgtccttatttgctacttcaagcctaacactatttctttggaatacctctatattctaatctctggaatctaaattaggcatttataagctaaaaagaaatccccctgtggcttaatgtgtttaaactatattttttttttttttccccaggatcattttaggttccagcaaaacaaacatttataaaatgctttgttgtttacacagtgttttcatatgaattttcacatcagggcctcctagaaaccaaggttcagaaaaggttagtagcttaaccaagcacacagtaatgagatgtcaaatcaaagcctatgttagttagttccacttccatatacatatattccatatattgtactcccaataagctagaaaaaagcaatgatagatatataaattaaatttgaatacaattatatatgttcaagctggttttagaaaaggcagaggaaccagagatcaaattgccaacatctgctggatcatcgaaaaagcaagagagttccagaaaaacatctatttctgctttattgactatgccaaagcctttga

SEQ ID NO: 27920 - DNA, 801 bp, Bovine  19866881198298
  misc_feature (1)..(1): n is a, c, g, or t
nctcttttaaaatccccttgaagtctttgaaacctgggacaatgttttggagttttacctaatgtattagttctacaaatgaaccatttttctcttatgctttcttttatctttctctggctcttgctaatcctttattttattctccattgctgtcttttctctccttccttgttttgaatgtatgccttttatatctgcagaattgccatctcctattattcttattacccagcccaccttgcttgtgattgtagggtaaagtacattctctggctggggagcaagtcaggtaatgtgcagaaacaccatccctgaggcaaggggaaaatttaatatggtttctactttcttcttcccctgtgcccctcctctgctttcctgtgtatcaaagtactaagagtaattattttttccccctgttttcttttctcttgccttgttttattttgtcagcttgtggaagactgagaaccaggatgtatgatgaaagagcctgagcctgacagtctgagagcaggaaagcaacataggggtgggcaggattgaggaaactcctgctgactgctgcccactcctggcattctccagcttcaatcaaatctatttatttacttttcgttaaaaatgaagccaactacctgtggttttattgccctctttcctaggctttgtctttcttatgcccagtgcttggccccctctgctttttcttcccctcttcctcttttcctagataactatcctccctttcctctagctcatatttctttcaagaacagtataaaacctcttcatttc

SEQ ID NO: 27921 - DNA, 806 bp, Bovine  19866881211298
  misc_feature (1)..(1): n is a, c, g, or t
ncccctactatctttgcttactccccaaagcctttcattgcctcggcttttcattgtcatcatctctcattctgttactctcttcacctgggggcaagctgccagcacctcctaaaagacatattcaatttaaaagggacaaggccatccaaaatctgtttcaaataattagtgcttttaagcagtagtctctgataaaactactgcacccccaacacacacacacagctggtttcatcacccacccctgaagctactacccttgtctctgcctttcccatcctgaaaagaccaggagagatgcaaatggactgcatgaatgcagactctaggcatggaatttataactttgtccttgtcactccttcttccaaacatctcacctccaatattcacatagagccagctgcttcaagttgcagacagcatcactttttttttaactacagtgccaagcaatcatggtttacaaactagtatgaagtatacaaactcaccttactcagctagatcggctaagttacaacgctccagactcagcgtattaagttaaagattgcttaaagctctgtgccaactcgtcaaagccttccctatttcactttctagacagggcagcagatttttgtaaccaaatgatttggattgttctctttacttctcagtacaatcttaatttctctctaccaatattaaaccatctactttatttttaataatgagaatcttctggttcttcagaacactaggaaactgagagctaggggaaatatagtttcattctacagatgggcatatgggcatct

SEQ ID NO: 27922 - DNA, 1050 bp, Bovine  19866881240444
  misc_feature (1)..(1): n is a, c, g, or t
natgctgggctctaactgccatctttatgaatattatactgtattctcatacttaggcaggaggatttgtttgtgaggggactttcccccttcctgcatcacttctctgaaactaaactgttgatgagagaagtatgctggactaagaagaggttgataaatgtcatcagtggagtgttgcactctcaaataatgagtgaggcagctgcagtgtcactgaatgctcgatggcatatgagcatgaattttgaggtttctttcatttgtttcatccaagcataaactgggcaatgacaagctgacttgtggcaggaatttcagcatcagataagaatatcaactggtcctttaggttccttctaacactgaaaatcaacagtcctctgtttgatggagccacataaagaatgcccaaatgatcaagaaaaatatgtgccacttctggaaaaatagcactgttggattcttgcttcaaataatcaaaaagagatcgtctttcagtgagcttcttaacccttggccagtgagggcaacgttaggaagacaacctctatcaaaactaatgctcgggctgaggaagaaagtggaggattattctcttgatgcttaggacatcatgtgaatagctaaggtaggaataggtgtcatacatacccagcaatcatttgagaggaatttctagcagctgagatccagagtgggctggaaaaatacaggtaaaggtgtgtgtgtgtgtgtatgtgtgtgtgtttatatgagatggaaacagacacccaaactcctctcttttactgccatcattttctcctgtcttcaaagaaaagttttttaaccccaatttatgagccactttctttctttgtcctttgtcaacggaaagagtcaccttctaagccaatgcttctcaaatttatctcaattttagtgggtatatgaatccctggggactttgttaaatggagtttctaattcaatgcttctcaggtggggcttgacattgtgcatccctaacacactctttggagaaggcagtggcaccccactccagta

SEQ ID NO: 27923 - DNA, 1121 bp, Bovine  19866881278147
  misc_feature (1)..(1): n is a, c, g, or t
nagatcatcacatattatgtaacttcccctcttgttcataaagaatagacttacactctcacaatgtctatagagtgatgctataattgataactatccaggttcatttgaagatatcaggtagctgaataatccctacctggatgaggctgaagcaaaaacagactcagcaggctggcttgtcctgcctgtctatgcagttcagagtgacctgcattctgccttcagcttctgttgtgttgatctgggctgtgcctcttggaagctgaagaaatttatgagacatggcaaaaatagttcctatgctcggccactaatcaacacagagcgcatgccttcagtaaaccccgagtgacctgaatctatcataaagactgcctgtggccagcagtacaggtcactttctacatggcatgctgcattctactgaccatgtggagctaaactgctgcctcaggtgactctcttgtttccattaaagcacttgtattaggaaattacctgaaacctaagaaaccattttctttactattagaatataaataacatgtggaccctgctgattattttattgctttcacattccccatcgatcccttcaggacggtcagtggcaaatctagggtaggcttttgctctgcctgcactgcctactttcagggtcacaaacctgtcctctctgtaacttaggggctctttagtgacccatgtttcactgtgtttgctctatagcagatgtctgactctttaaagtttcccctgagcaagatattctgtctttgcaaatacatcacaagtaggtgcaggaatttcacattttcttcccttccactccagagatcggtgatggatggtcactgcagtttctttttttttccttcagatacgcccccctgcccccttttgtttgctaatcctacatatttcatcactcactctgttcccaaattgtatcttcctggtattgtgaatacttaacacataatggaacaacttttcatttctccttcactctctttctcacattttcactttggaagaaattcatcaatattgactcctgaatcatgaaaatgatcctccagtcactgaattatagagtcatagaatgttagagctgg

SEQ ID NO: 27924 - DNA, 838 bp, Bovine  19866881304985
  misc_feature (1)..(1): n is a, c, g, or t
ntgtgttttctgtctaaaactgaccagtcctggtgattagaaagtgatcataatgagggggctggtctgagtcatgctttgataaatcagaattacaacaggcagactttggtatctgcggtggtagtggtggtagcggggcagaaggcaaggtatcagatttcaggggagaacaaagctctaggtgtattgacaaaattggtgttgggttaggccaggagtagcagaggaaacacaggatttagttgcattaatggactctatgattgttattctccatgttactattataatcaaggatagtgttgtgtacatatatcagtgttgaatacaaatgatcatttagttgcctctcattcttgaggaattcgagtctttttctgacttacagtgaaataactataagggaaagagtgggttgagactcgggagatgttgttgataaacacagaccctggatgtttgcccctgtaataagcttccctcttatatgactgtcctctcacctcatatatgtgggattaaaatgacctgttctgaataaagagaggaatgtagaaaggaaccggaaacatttgcataaagatacatagagccctcagtacctggagtcagaggaccgaattcgccagtcctccagccataatagcatcattttcaacccaggacacattcatgaagcagcactccagtgcaaatgaaacaactaaagcctcacttccttgctgttctaggtgaatatataagtgtatagtctcatctattcttaatgccaccaacctggcaatacaccttaagctaattagaaacagatttcccattccaccatggctttatg

SEQ ID NO: 27925 - DNA, 1205 bp, Bovine  19866881333078
  misc_feature (1)..(1): n is a, c, g, or t
naatgacagagccaggactatcagactctgtaatccttgctccacccacagtgctttgcatgatttctggccatgatgcatgtcctattcaagactctgtgagtcaggaatttgagtagggcttaatatggacagtgtttttgtgcttcatgatatctgggtcttcagttgggaagatccaaagctgggggtgactcaatggcttggagtgactcactatctggaggcgtctgtacttagatatataaccagtgacgcttgctgttgactggttcctcagctggggcagtcagcaaaatgcctacagtgatgacttctgtgaagtgtagcagcctgagacttctcatctggtaggtggatcaaggctctgaaatcaagtcttaggagaatcaggcagaaactgtatcatcttttatgacctgcacttggaaatcatttagtgtcacttcctctgtgctcctttggtcaactgtttcctaagatagcccaggttcaaggggagaggatgtagacctcccttccccttgggaaagtgttcattatcagacatatttaaaacctttataattcaagttttgatgtgagttcttaaagaaatctgtttcttatggctttggttgttatagtatattcttaacaatggttgtaattcatcaacattggttgataaacctatcaaattctgaactctactccaaagattctgaaggggaggggagcttgggagtctgtagttttaccaagcttctcatgattcttagaaagttggcctaatctaagggctaaattttacttacactgcctctataggtgaagatgttttcaaaagcctacagccaggccctctaattgattgggctgtcccaacctagtaaattcctcagcctctgctattacggctgcttgtttgtcattctcatctcttctccctgccttggagaggcccctgaagcttcacagaatacctcctctagatttacaaaagcagtcctgatcccatctcatcagggatagaggacaggactttaagcaaaatctctgctgaagctatcatggcaagaggtgtaccagtttaaagctgtcagttgataatcactctactatgaatggttgggctggtagcacccagtgatttgatttgcatatttataacttgacatatgcacagaagtgccactttcggggtgccactgcagcagctccat

SEQ ID NO: 27926 - DNA, 1203 bp, Bovine  19866881387588
  misc_feature (1)..(1): n is a, c, g, or t
nttgaacttgggtctcctgcattgcaagcagatgctttactctctgagctaccagggaagcctataaaataagggatcgctaattattgtgcaagccagataaatgctgtgctttacatacatattccaagctattggaaatcaacctaaagaactatttaatgccatagctcagaagagggtccagggtaaaaaaaaatactcattcagcccagttctgctctgatagaagtgtaaaagaaagttcttgcaaatcatgttagtattccgaacctctgatgcctacattctcttcttaagccactatgtgcatgcctgctcagtcgctttggttgtgtccaactctatgtgaccacatggactgtagccctcaggcttctgtctatggaattttccaggcaggaatactggagtgggttgccattccctcctcagggactcttcccaacccaagtatcaaacctgcatctcctgcactggcaggtggattctttactatggagcctcctgagaagacctaagccactatatataaatcatattttgagcctaattaagtttttgacttcttctacctttggaagcagtcaaatgtttatgttagtgtcctaggaactagacgtcaggttaaaaaagatgaataatcaattatttgttgttaaagaaaccattctgtgatctgaagacagattgttataatatagtgaattaagagagttgaaaagggagaagtaatctagcctaaagagaaggaacagattagaaaagctacacaccagcttttcctttgtcttaaattcacctgttagaaggttcaagaagctagttctaacattggctagtatgaacccatctatgttttctctaagtaaagttctcattacttataaagccaatgttatttattcctcttcaactttcatagagaatccttatatatctgagatttccaattctgaagagacagaggatccattcaaaatgcttgtctgtcctctgagtgggcctcacagagacaagaatagtttaaatatttccccataagagagagagctgcatacctttacaataacaatgagaaaaagtctttcccttacatagtttcaaagagcctttaattgcatccctttagtaacttggaggatttttctaaacatattgacaacgaggctaagaagatgtgtaacacgtataaatatgcag

SEQ ID NO: 27927 - DNA, 695 bp, Bovine  19866881462260
  misc_feature (1)..(1): n is a, c, g, or t
ntttggttcctgggtcgggcagatcccctggagaagtgataggctactcaccccagtattattggatttccctggtagctcaactggtaaagaatctgtctgcaatgtgggaaacctgggatccatccctctgttgggaagataccctggagaagggaaaggctacccactccaatattctggcctggagaattccatggactatatagtccatagggtcacagagaatcagactcaactgagtgactttcacttttatttacatccccaaaatcaaatattctggtctggcaagagcagaatgactatgtgagtaataattcaatggaaaagaatatgtaggactgatgagaggtccccaaaagatcaactgtgttgaaaacattgtcaaaatttaaacactgcagaaatgcctagacaaaagggcagtcatccatgtgaattgtggagaaaagtttatgaaggaacttaaggccctttggctttgcttcagtgggttggtggtgaggttggcaaggtgagggagtaatttgtaagtttatgcatgactgacttaataagaaaccaagtcatttgaaatgtcaaggaaaagcagactaatctcccatgcaggtgggaatttacacccctcacccaatcctctttatttggcatggtcaagggaaagagaggagacgggaaataggactccacca

SEQ ID NO: 27928 - DNA, 2995 bp, Bovine  19866881520679
  misc_feature (1)..(1): n is a, c, g, or t
ntattggtctgtctagctcctggaagagtgaatagaatttagcaatggctcatcacaaggcaaatgagagcataaatgacaaacatgtgctaagaaaatgaatgatccaaatgtgatactctcatggaagaatatcttccaatgggctcatccagtgtatcaggtcttatattgctgctgttacaaattagcacaatctttgtagcttaaaaaagcatgaacgtatcatcttacatctctgtaagtcagaagtctaagatgagtcaatagggctgcatcccttctggagactatagagaatctgtttacttgcctttcccagcttctggaggctgcctgctatcattggcttgtggctccacgtcactgacttctacttcattgtcacatctcctctctgactcttctatcatcctctcccatacctcatgattatattgatcccaccaatgtaattcatgatagtctccccatctcaaggtccttaattaatcacacctacagaatccttgatgtcatgtaaagtagcatattcacagactccagggctaaggatgtgagcattgttgggggaatcatcattctgactgccaccatcccctggactaaaccgtgtcttgatatgacagatacttttaggcccaattttgaaaggaagatggaaagtagccttgtagggaggaaatggctgctactgaagaaatcagagatacacctacaaagaccacctagggctcacaggcaagttcacaggcttatacgcatgcccatggggggcatgcatgtatttctgccagccccttcatagccagtcttttctgatccatctccaagtcaaggccttctattgtgctcactagactccacatttcccttgtgcttttcctgagaaactttttctgaagatgaacctcagcttgatttcatgtgttatggtgcctgatgaaggtgatttgcttcagcttctgcccactcaaaagggctcatgagggtaaaaaagttctgtttctcaagctcacttcagtcttcttgacatggcgaggcacccctcagatctctactgttcaaaactcagttggagcactggagggaagaatgtgaacatctttgctttgagatggttgtgattttccaaagagtttcttgttttgtttttcctttgaaaagcctcaggaaaaactgtcagactgattccaagactcatagcctgaaattcaacctgcccattgatctatgcctgcctttaagattctctgtcactcctctgaggtcacaggttgtgtctgaactttaaatacagttttgttcctgcacgactgaaagcttctttgatgccgttgttacaccttcagctgggagtcagtcagacaactgttgaaatggctctgcttcttttcccttgagacctcagggtcctccctgtcccaactcatcagtcctctctctcactctatattctctaaagtctgtttgtatacttgtgcatgtatgtgtgttggtatcctgagagtgaaaagccttgtctctccccacttagctggattcagactgtaataagactgtgttctgaaatagcggcactaatcctcttgccctgaaggggatggtgtttagaatcttgaaagtcctttatcagactaaactctctttctttataaccaggaaccgccttccatcataaatattgtcatgctactgtcttcagctgacaagataatgccttatcaatccataaaattcccaagttatgcagatgtctccttctattctgtttgtattgtcatttaagaagaaaaaaaagaagtatagatgcgagactcttaatcgggtcacttcctccgtgtacttgaaaagtcaaagacttgtttctcactggttttaagaaacattgtcactcatgcaaaatcagttaatagtcattagacactcagtttattaggggcactgagtgagggggggaagtggcatggggtaattttctggcaaagtcaagttctgcagtgttgactgaatttgatttttgtagaatagttaacaactcgagggcattatccagagctgccagttatatatcaaggagttctctgaatttggctaagcttattaggaatagcattatcatttatgagaaaaatccatgaggtttttttaagtacatggagtcctccagcaatatgaaaaacacacacagtgaaccacgagataggcagtgctcagtctcaggagaatgacaggttgtctcgacccaggctggatttgaagctgaggttcatgatactgcagagaggagttttagatcactaagtaatcccctctggctcgtcttctctgcttagtctgtgtcaattttttttttttaagtacttgaattacatttttatgttgctctataaataaagtgattgcaacatttttaatacactgacagttcttgtaagtcactgctcctttcacttaattgaaaggcaggttgggtcatttgaatttggtaacatggtatgaaatgaaattcaaatccaactcggaaataaacaagctccttcaaatttaagtacaaatgaagctttagggctgttcaaaccataactcaaaagcatctttatttaaggaacctaaatcattgtagaatctattagtgaaatccacaaccaaatataatggagtgttagctctgaagttagtcacctcattttatttttctttgcttttcaggagcccagtagattgatattcatttaattgtccatttaccaaacattaatgcctgctatatatctgaactgttgtacagcctagaaatacagaaataaatatctcaattcactcttttaaggagaaatatatagaaagagttgtgggacaatgtaggacagtcgctgcctagccaggggaagaacaaaacatatcctggaagagagaattcttgagctgagcttgaaaggaaggaggaggtagccaaaccaagcaatggggattagaaggggccatgctaaga

SEQ ID NO: 27929 - DNA, 955 bp, Bovine  19866880429600
  misc_feature (1)..(1): n is a, c, g, or t
naataaattcctgggcttgtttcagaagggcatagtatgaccaaaactgttgctgaggagcatgggagaaagatgataatgaaaatatagtaataggctttccatgagtccaaactcatggcttctctctgttttcagttcctatcttgtggaaaatttttgctgttttcactctgtcacagaacagatggaaccatgatttatgattcacagtttatgaagctaatttatattctaccccacttcatgctctatcacgtttcccacatttgcaatattttttcttctgggacatttgtcacaaaaggcacattgggatgttggaatgggagaaggaggcaacctaaagtgggggaactagtgacattgcagggagcattcatgcgttcaacaaatgtttagtgagccctttcatatgccagggactaaacatcctgacaatgagtctgaaaagtttttactctgaaggagaaaaaggatgaacaagtaaataagtaaacaaacagcagggtcatctcatagaaatgctttgaagaaaataaaatatggtaacattataaagagtcactggagttggacagcattaaatagggtggtcaaggaacgtctgtcacaggaggtactgttaggagatgcctaaatgaaaagaagggattagctcttcagaagtcataagaagtgtgttccaagaagagggagcagaaagcacagaggtcctaggctgtgaagaaatctggagcgcatgagataacagaaacaagagcagcggtggttacatgcaccatctcatccatagctccatcctgcccctgctctccacccggccactgatgtggatgccacggggcacatgggcccaggatgtcggctttatgttgtttcgtgcatcaaataaaatacttcctggctcgaattcagaagcgttagtgtggctctgatggaattctatttccca

SEQ ID NO: 27930 - DNA, 2317 bp, Bovine  19866880441688
  misc_feature (1)..(1): n is a, c, g, or t
nttgtttcataatataaacacttcagtttaagaaaggtaattgaatctgcccttttgagtggagcatagagccaggatgagggcgagactggcaaggcttccagggtgcttgttgaacctggaagtgagcgcctctgtaaatccgtgatccgggtgtcttgcttacctctccctagtccaggtcctcaacatactgaagaatatgatgtatactggtttattttatgtgtcagctgaccaggccacagagcacccagacatttgatcaaatattattcttgctttatcggtgaagttgttttggatgagattgacattcgaattggtagactaagggccaatgtgggtgggcctcacccaatcagttgaagatctgaatagaacaagaaggttgaccctcttaggagcgagaggggagaactccacctacctgctgccttcattcagaaagaatggctcttcttgggccttgagcctgccttctttcagactggaatgtataccactgatgctcctcattctcaggcctttggattctgattggaatagcaccacgatctctcctcagtctccagcttgctaactatcagcctccatgattatatgaaccaattcgttatagccagtcaatctatttatccccttggtttcttttctctggagaaatctaacacatctagttttccatgtcagctgcctaacagtgggagaagttaccatcaaaatgagacaaatgaaaacctcggccaaatcctgatagacttaaactcttggggccttcatttcttcaagtactaaaagaaaagaatgaatttactttgtaccgtggcagcaaaatgcagttgcataatgtgtacaaagtacttgacacgtagtagacactgaaaaagtaaggccttttcttccctttgtattaatgagctgttagtgctaaatgggagccatgaagccaaaggaaggtagtcagccagatcccaggcagtgagcgtgctggcagggtgcccagattccaccccaagccatggcagctcactctctgaactcaagagtgtcacactgagccggcctccggagacctggcttccggcctggtccccacaccatttatctggttcctcagacaagtatttcattttctttctcatctgtaaaataagagttcctttcagttctaaaatgtctgtgatttattattcatcattaccatttctgcattgttcttagctttatgtctgaattcaaatcacaggaagaaaaaaacagtttggactgttcagttaattgtaacaacaacaaaaataaattttaagcagaattaacttttcaaaatcctgtttgccttcagaatgcagatcaaatctcctaaaatctattttagacaacttttctctggttttcttattagcttgattttagcctattcagtttgactaataaactgagaggctaaactcagaggcaggtaagacagggcagctatagtattactattgattatcctttaagagcttctccaaatcataacatttattcctggcttggctgtttacaaagaatagagaatcaactcagatcttgtctcactgttacaaattgagatttttttttttttctttgcaaactgtctttatagtaattataacttgcaaaacccaatactcaggaacataaactaggcttcattagagtttgtagtacttaatttcctgggtgtaactatttctttttatgaatgcttatagttttcttttaacttcattatgtttttccatcataaactagtacactctacatttttttggaaaatacagaaaaagagaaagaagaatagggaagtcatgtatggttaacttatgttaagaaatgttaatattttggtgttttttatagaacatacttatggctactaagtggggaaggaatgggatgaatagggagattgggactgacatatatacactgctgctgctgctgctaattcgtttcagtctttgtccgactctgtgtgaccccatagacagcagcccaccaggcttccctgtccctgggattctctaggcaagaacactggagtgggttgccatttccttctccagtgaatgaaagtgaaaagtgaaaggtgaagtcgcccagtcatatccgactcttagcgaccccatagacggcagcccaccaggctcccccatccctgggattctcctatgtataaaatcgataactaatgagaacctactgtatagcacagagaactctactcaatgctctctggtgacctaaatggggaagtaaatccaaaaaggaggaatatatgtatacg

SEQ ID NO: 27931 - DNA, 3889 bp, Bovine  19866880457976
  misc_feature (1)..(1): n is a, c, g, or t
ntggaatgctactcacctataaaaaatgaaatattacccactgtagcaacatggatgcacttagaggacgttatgctaagtgaaataagtcagagaaaggcaaatgctatattatatcagttataagtggaatctaaaaactacaacaaaaacagttgtattgaactgttacagtgaatataacaaaaaaaaaggagtctcagagatagaacaaattagcagttaccagggcatgggggaggggcaacatcagggtgaagaagtgggaagtccaagcaattaggtgtaagagaggctgtaagaacgtatggtacaacttggggaatgcagtcaacattttgtaataactgtaaatggaaagcaaattttaaaaactgtataaaactaaaaaaaatttttaataaaagaatactttggaaaaaaatgtagtttaagtttattggttcaataaaaacaaacatgtcttcagagttgttgacattaaatgtaataaaaacatacaatttttcctacttgggtttgctctgtcacataagctcatgctatctctatgttacaaaatttgtcaataagaaaaataacttaagaggacgtttagttgtttgatgtctaacaactaagaatgattgttaaaaacaagtaatttaaataaacaagataaaagtttatactaagttaaactaaataacagatattcattgaatatctagattatttccaaataagataatatactgagacattgatcattaaacatgttcatctacttttggctttttaatttttattttacagacagacaaaagataattgggtctattaataaatgtcttttaccatagtaaaagttatactataaaaaacatatctttaaaaagtacaagttttcataattatacatttataaatttgctaaactactggaggtggtgctcagatgctcagtcatgtctgactcttcatgaccccaaggactgtagcccgccagggtcctctgttcacgggattactggagcaggttgccatttcctccttcagaatgatctgggtagaatctacccaaatgatctacccaaatcattcccaaatcagggatcaaattggtgtctcttactgtcccccctattctaaaggagatcggtcctgggtgttctttggaaggaatgatgctaaagctgaaactccagtactttggccacctcatgcgaaaagttaactcattggaaaagaccctgatgctgggagggattgggggcaggaagagaaggggacaacagaggatgagatggctggatggatcaccaactcgatggacgtgagtctgagtgaactccgggagttggtgatggacagggaggcctggtgtgctgcgattcatgggtttgcaaagagtcggacacgactgagcgactgaactgactgtctcctgcattgtcaggcatgttctttacctgtgagccacctgggaagctaatccaccacaggatgctaatatgtgatagacaattggtaagtacctctttcctagccttcactggaaggcaaaagctactatatgtaggacaaaactataagaaacaatgaatgaagggaaacaacttttcatacaaaatatgggaagaaaatgggatgtatttttatatgcagagtatgcaagggatataaaatgtgttttttgttaaggaaaaagagggtaaaggtgtctgaaatatagtaactacttgttctagagtaagaaaggaaaagaataagacaaaacctaaatgaatatagaaagtcacaggtttgtggaaaggaattttatgttgtgaagtgaaagctggctgaaattgaatggacttattataaaggtttttaaaataatctttaataagtagtgtcctatgtaaagctaaaacttaacatgctttcatctgctaaaaggacaaaattgtattagaccattggtctgttcctaataagctctgccaggtcttccttatccttaaagtaacctgcctagaaaacaaggactctgtgttttatcaaaatactttctggggcttcacattgtcttcatcacatttttgattaagaaaactgagttctctctattaaaagagctaaggttttttataactatataccttcctcaattattctttgaaatcctttgtcactctggttgaatagattaggtattgtttacaatgacctgtaatcctatttgttcaagtgtttaaaccttttgacattttggacaaacttccccaaatcaaattctgaattatctttttgaccttaaactaactttgggattttccagagagggcccatggaagatcccaagagatactctctctctccttataaaagaaaaatgttagtttatttacgcttatttgatatgttaagttgcatgggaaacatggtaaaataaaaagtaatgtttttttagattacatcttagattacatttacatggctatataagtgctccagaaattacacaaaattcctaaaaatctgatatgtcctggtacaatgctcttagtcataattccagttattactttataatactatatattataaaaataacaattggcttttcaattgtatcattcaggtgaactttctctcaccagatcctgaacgatggtgtttttaaatctttttatgctctattcttctctgaaagcatttacaatcgactatagcaaaatgaatctgcaaacagattcatggaaaagacgctggcaagaactttagaatacaggtttctgataactttaggatcatactactgaactgggcaagaatttctgaagtttaatggaaaactgatagaatcataaagcttcaaacccaagatgaagcaaaacaaaaattaattacaggagactgaatgaaccgatgaagatgattataatttttatgacttcatttaaaacactgttggttctttaatgttttattttccagatttgaagggccctttttctcctctcttaaaaaagctatttatactcatacctgtttgataaagcatacttctgtaaacatgagttaaaacatttttttctctctatccaatccctccagaattcagaaacctttattaaatatattttttttcatgacaatatatttgtttatataagtccaataagaatcttttcttcttgtagcaggacacaattagacaagttcttagcttggtttcttatcctaaagaaactttaaaaatttaatctgagattccttattaccagacagtgttaaagaactaaggttgactttaatcaataaaacttaggctgaaatgttatatttgagaatatgcataggattactattgttactacattgatatgaatattaagactagaccttttgttttaacaagttagtttcactgtcaatatctttggcagaaatgggtaactataaaaattgtgtctcaatagaaaactgtagcatacccattctcagattctggtccagtttgttgtcttgggggctgtgttattgactttaaacttcagagacattagcacagtaaatttcacacggacaaccttcaggcctgttgctgtgtgggccactcaagaatgttcaacagaacagctgacgacttcatcaaagatagtcaaactgcttgatgtatgatgcagggaacccaagtcagtactctctaacaacctggagggatggggtggggagggaagtgggaggggggttcaggagggaggggacaaatggtatgtctgtgggccgattcatgttgatatatggcagaggccatcacaatattgtaatcatccatcaattaacatatatatatagtcaaacggcaaaccagagaaatccatccaactgagactgccaccctcattccatctgctaa

SEQ ID NO: 27932 - DNA, 1857 bp, Bovine  19866880536246
  misc_feature (1)..(1): n is a, c, g, or t
nctctttatgaggattttccattggagcaggcagatcctccttgcttgttatctgtttatattgtgaacaacttcttcacagcactgcacgagtcccggaatttgtgaggcagacagcagctgtcacgaaatgcgtcacctttctccttcctagcctactgcaagagctaccacagaggccatggtccttgctcctccccttccctccatcgttttctaactgtacagttttcggttatttcattaacttttctgaactcctataaaacaggaagaaaaacacctacctgctgggattgttgggacaatttgttgggatcatgtacacacagctggccaatgggtgaggccctgtaacccagcagccttgcccttagtatgttagcatgttgatagtttccttttgtggggctggtttctaaacagtgattgatgaggttttaaataatccctggagggccatcacaagccctattcttcagtgagtagaagggctgaggttagtgttttgatgctgtatggcccctcatgtggaaggaaacagattattcctttttttgttgtcttagttaagacaatccttttttgattcttaaaaaacagtgaaaatttctcaacatacaagacctgaaaagcaggctagctagtactagcttttttaaagtctccaaatagtcatttttatagttttatatagtcattattcatgtttattttccagtgttttttattcctccacatttttatgatcttataccagagataattgttctttctgcctaaagggctcctattagatttctttgttttaaagcacaggtctgctggcaacaaatcctcttactttttgtcttaaatgtttttatttcaccttaatatttgaaatatacttttgcttggccgttattttcttttagcatttagaagatgttatcccagagtcctttgacttccattacttctgtttctcattgttctcctgagggtaatatggaagatagtctgactgattttagggaggattttctttttttgttttgttttcttggaaatttggttatgctattcctagatgtgttttcctttggatttatcttgctcaaggtttgtagtacttcttgaatctataacttgatccctttaaatctataacttgatcccttcaaattgattttgaaaaattctcaaatattgcccctattgctccaattcagtttcactctagaacccttctggaattttaattacacatatgttcaaccttttcacaatgtcttacatatctttatgctattttctgtatttttcacctttttcttctttttttgatttggatgcttccatctggatattttctattaaccaatcttctgaattgctaatgcatttttcatctatctaaactgttgttaaattcatttactgaactttaatttcatctgtctaaactgctattaaattcatttattatattttgcagtttgggaatttatatttggctttttatttttaatacatagatttcaaatctctgatgaaattctccatcttgtcatctattttcttgaacatgttgatcacagttattttgcattctgtgacagataattctagtgtctggatcatctctgtatctgtttctattgtgtattttttctcttgccccgtccctttgtatgtctggtaatttttgattgaatgccagacattgcatatgaaaagttataaagactctcaatgatgttaactctggcaaatggtcagattaaaagcagaataccttaaactaataagggaataagctgacttgagccctggatttttaagcctttacagggctgatctgcatctcagaga

SEQ ID NO: 27933 - DNA, 1920 bp, Bovine  19866880606988
  misc_feature (1)..(1): n is a, c, g, or t
nttatgaggatatggcaaaaattgtgaggaaaaccttctaggtcttgaagggttgggacttatttgttagctccagaagatccaaagtgaagtagctttctcctattctttatgtctgaatatgagaagagagccatatcttctgactctctttggggtatctagaaatagaaggggtgactgatgagaggaagaccttggtcttttcagagtggtctcattgtctttggcattggacttcccagccttcagaccctgttgtttttctaaacaaggacagctatctgggaaataagagtccctgcccttgaggaatgtttaatgtactacgaaagattaaaatagacttcagctcaaattctgtcttcagtactgaccatatgacctcaagcaggttattttctgaaccttagtttctgctggaacacataatccccagatcccagtggcttcagccactgaaattttatttcttgcttgtattgcctgttcattgtctgtcagatgggaactctgctccacgtctcctactccaggattgtggttaatggagcagccatcatctaattatagaacattgctgatcactgttggagagaaagagagttctggagagcttcacgccagcaattaagtgatctgtcttagaagtggcacatggtatcatttctgttcacaacttcctccccaggactagtgacacaatctcatgcaaccacaggggcctagaaggtacctggaaaatggagattcagagtgttgtggaaatatcactaatgactaccacatataggaatgcctacctcagggttgatgtgaagattaaatgatattagatacagacatggacatgaacttgtgtgtgccaggcgcttctctagtagcagttttgtgaggaaactattataaattccagacttacaaatgagactttcatagctcagagtaaaccttgtcaaatgaaacctagctagttggtgagaaggtttaaatttgaactcaagtactagaaaagcaaaactattacataaacacaacaaaatgaaacagtcaaaaagactgaaaaattctgaaggtattttttaacagtaatcaaaagtgatttgtttatgtgggttttgcttttctgttggcactttttaaatatgaagaaaagctttttaggtgaaacacatgtaatgtagatgctgtggactgtgaaatcaatgtataatttagaagaaaaaggtattggtgatagaagttttaaaagattaatgtgagggacttccctgatgacccagtggttaagaatctgccttgcaatgcaggggacctgagtttgatccctggttggggaactaagaccccacatgcagcagggcaactaagtctgcatgatgcaactgagcctctgtggtgcaacgactgatccgtgtgcctcaactagagaattggtgcgccacagcgaaagatcccacgtgatgcaacgaaggtccctagtgcagccaaattaaataaatattaagaatagattaatgtgagaatgaataaacacctgcatttgactagatgactacaaaacaggaatcctgggaaaaaagatagcatttagtagagttaaaagtaacatcagaagatggacttatatctgggcttccctggtagctcatctggtaaagaattcacgtgcgatgcaggagaccctggttcaattcctgggttgggaagatccactgaagaagggataggttacccactccagtattcttgggcttcgctggtggctcagacggtaaagaatctgcctgcagtgcaggagcatctgggttcgatcacggggttggaaagatcccctggaggagaatacggcaacccactccagtattctgccctggagaattccaggactacaaaacaggaatcctgtaaaaggtagca

SEQ ID NO: 27934 - DNA, 1332 bp, Bovine  19866880640534
  misc_feature (1)..(1): n is a, c, g, or t
nctgtgataccaaaaaaaaaaaaaaaaaatacaaatttaagggtggaatgtggtggataatcattgttttgggaaccaggataccaaactctttgccctggccctgttatcttcccatcactgaagctctctgctcaactcagaaatgagccaacctcaccctagattgctctgtgaccccaaaaacagataacaccaaagcgtggctcaggaagaaacaaaaggaatgtgagtgagcatgtccctacttttctggaagttctggaatacggcattttcacctccagctgtattatgtccataaaacaccactgtgtttgctctagccatagtttctgaagttgtagtgggttcagaattaaataatactgacttactattttaactttcaacctctaatttatttgtggggattttttcactttaatgagtaatagctgaaatgactatttttttttatagagttcaaatgaaatacttctgaagttttcatagaacatgtaatttaattgtcaggatgtggtttctgttcttgttaattaccctgccccgataaagatatctctgaactaactcccctcaattttctccacacacttacactcagactttgtgtacttaattggttcatgtttatgaatctttgttcatgggttcctttctcttcatggacatatgctctttcatgcccttaggtttatgacctttccattggcagagataatgttttctactctttttttcccctaattgcaccaaaaatgtgggcctttgaaagctcttgattattgccatcacaagttatactcaaatccttttaggaaatttttttttctatcgccagaaccatattaccaggaaaaattaaaatcggccttggattgaaaagtgcctatagtgtaatagagacaaaaagttgaattatatatcttatttttaacatgagacataattcacatacataaaattattttaaagcatacaattgatattgattatattcacaaagttgtacagcatctatttctagaacatgttaccatcccccaaagaaaccctattcccatcagcagtcactcctcatggtcctcaccccaaacccctggaatccactaatgtacttagatattggatatttcatataaatagaattatacaatatgtggccttttatgtctgacttctttcacttagcctattttcaaggttcacctctattgttacatatatcattacttccttttacttgctaaataatattccattgtgtggatatatcaacgacatttggtttatccatccatcagctgatgggcacctgggctgtcccca

SEQ ID NO: 27935 - DNA, 932 bp, Bovine  19866880820999
  misc_feature (1)..(1): n is a, c, g, or t
naagaaataaaaaatttaataggggagttggaaggtaaagttgaggaaatattcccaaaagcagaacaaaaagacagagatgaggtcatgagggaaaaaagggtgtttaaaagagaaatccaggaggcttaaaatagcattccataggatcaaaatttatttactcagcatttttatggcttaatattaaaactgttttcgatttttgcaattatcggcagttcttgcagtgaatgcctttgaagctaaattttgatctgtgccatgattatttccttgggataaaattacagaatgaaattaccagattaaaatatataaacatgttaaaggcttttgatacgtgttgccagacagaaagattgtttcaatttataataccaggatatgagaacagttgtttgtgactttttcttaaattcaatcatctttgtctcaatctatctggtaatgggttcccactgtatcaacaataggtatgggaattggcagttacaatttacttttatttcccaacaggattaaacaaattatcattggctaaaatcctgacttgtctgggtacattctgctttgttctataaataaaaaccccagagaaatccagtattgcttacaaaaaagctctgtgataccgagctcgctgactttcaccattgctgtttcagtgtttatctatttttgtatttctctataaactacatattttggactgcttatcaggtttatggacttcttattggttcatataaaagatagagcgcctagtttagaacaagaagactaggtcaggcaaaaggagaaggtgacagaggggaagaaagacattccctgcatctccaagtatttagttttcttggtagctttaccagtgaaactgactggaaaagagaacctgattagacatgaaacttgtagcttacccactggta

SEQ ID NO: 27936 - DNA, 1647 bp, Bovine  19866880875146
  misc_feature (1)..(1): n is a, c, g, or t
ntggcggctgccgtgttattgttattactgttccgcgtcttggtgccgcggcccccggaccggtgctgctgctgctcttcctctcgaagcttcttcagcttcttgaggtagaccgggcgggtgctctccgtcactgggccaggagataggccgtaacggcggagctgagagaaaagctcctcatccgagagctgctgaggcgccgaagccgctgccgccgccattttctctccagggtgttttacaagctccgcgctaccggaagtgacgcgccgccctagaccctgaactagaccgggctgcgtcgccctcccagcgccacgggcgccttggccaatgggaggcacgggaggagctcacctgagcgggaaagggccacctgagccgcgcgcggcttcagcggccgaaagtttttctgcgcttgcatctcggggtgtctccttctccgtctgttctccgccctgcccttctcagcgcctttcccgggagttgcctcttgccaagccacaccttgacctcttctttccaggttcctgccaccgggcagtaataattgaagggaaatctgccttgaagttcttggcattaattttcttttcatccagattcccgctgccaaggggagcctagagacttaaagaaatcttgatggcaaggtgattggcaaatttccctgagccctggtgctcttttcactttgtctttccgcttgactcaccaaaaaaaaaaaaagtttctctcgcggctcattttgagaagcagctcctctaatgtttcaaggaaaagatacagagtaaaccagccccaatacagttttcttcaagagtaatgcttattgattcccgagttagttgtaaggtatcatcattttttcgcttttaaaatctgataaccttgatataggtcgtcatttggggaattgaaagagccaatcacattatatgactgaagaaacaaaaatgttccatcttgcttattttcttcttggaacctttccaacctatagttatttgtttattagtgattatttttatgcatttgtcttcctatttatttattgtcttgtgcctttaaactgtaggttttatgaacagaggaaccttgcttcattcaccccattagtgcctgagagtagaaattcagtagatacttgtcaaactaatttaatgcattgcaaagctaagacagtgtgagatgaatattttcacatgagcatagtggcagaagagaagaaaccatacacagtcaaaaaacggaatcacttaagacctggatatccaaccctctcatttacagaataggaaatgattctcagagagatgagatttgccctgtttggtaaagaacatttcccttttcctctaaccctggcagattgacacttcttgaatactcaaaccctagcacctgacctgcctcttgagaaacctatatgcaggtcaggaagcaacagttagaactggacatggaacaacaaactggttccaaataggaaaaggaggacgtcaaggctgtatactttcaccctgcttatttaacttatatgcagagtacatcatgagaaacgctgggctggaagaagcacaagctgggaatcaagattgctgggagaaatatcaataacctcagatatgcagatgacaccac

SEQ ID NO: 27937 - DNA, 2097 bp, Bovine  19866880956265
  misc_feature (1)..(1): n is a, c, g, or t
nttttaaatatatatataaaatgtcactttttaaatgatcagcctaggaagtgttttaattttttcttatcaaagttgtatagattttttctatgaaagcagattcacaaacaactttgcacatttaaagtttaaaaaatttttaaatgaaaaagtttcaactgtatataaaaatagagggtatagtatagtaagcacatacgcattcatcatctagcttttactgttatcaatactttgccttttgtttcagttttctgtttttgcttgaattatcttaaagtgaaatacatttcatgtgatttttaaaacctgaaaattatgaattgtgttgacttattgaaataagtcagttatttttctgaggttttcatttatctcagaaatttgagtcacatacgaattcttatggaaaggatcttgacattaccgtgtccacattcagttggagattttggaagttctattcatgtggtgaaggttaagaaaaaatcagaaggtgctgaattaattctaatctgagaaccccagaattgttctgttctcaagactaatttgatgcaaactttagctaccgtctagctgtgtcctctatgtaccgagttgtatcctgtttaacccccatttctgtttataacccagtgacctaaaggtgagctttgccaattgagaacaatcagcctaccttgtttctaaaggagttttaagggttccattttaatactgtttcctagttaatgtactaatgttgcttgtctatgatcctgagtagttggtgattttactaatagagtaaaacagacttccttttatgttcagaagtagcaagaggcagtgctcttctccccacctcccaagaagggaagttagttgatgctggaggaagcagaacactgagtttcgtgtagtgattaaacatgaaagccatatatcaaacctcaggagaaacatgcttttgaaagaggcagagaactgtggagcatattgcgtgataggctatgtcaacagagccctggaggtcagtgtgtggatgcaaaccaattaaataaagaccttactggctttgctttctatcatctggatggggagaatcacaagttaacatgcacagggctgaagtgtaaactttgcttgaataagctaggcacctttggaaacttcattaactctttcaattcactaccaagtttggttggggttttgtcttgtgtgttgttgtcgttttttaaaaatttaacccaagtccttcttaaaacaaaacccagactgtatgctctcttggcctttccgtacatacctatcagcaaaggtgccagtgatgagcagaaccgaagacaaagcaaagaatgcattgctgaaaagatcaaagttggctgtgtagtcaaatttcagtgacgtgagcatgtcttttaaaaaacaacccgtttggaaaagcagagctctggcagaataactggaaaaagatgttttttctcatctcctgaattctgggtatgaggaaaagatatagttagaatttactagctactacataacatcaggatattgttatttctgttctattaaaatagtttttgaccaagaagaacatgaaacctgtaagttaaaaactgtatggtaaggacttcccagagtcttacattttgtggtcctcaccttctcaggcagtgtttgggtgagaaaatgaaataccaagttaaatggtatagtttcatggtccataaacattcaaaacaaagatttttttttttcctgtagagtcatgttggctgagaaagtgaataagcttatgtttagtggttgttgattctggactgctcggaatagcagtactaaggaaatgggctcatagaacacagcgactcaaaggtataagatgtcatggaagcaaattgtggagggttaagaaacctaatgagcatggtttagtgtggagagtggaggagagagctcactattaaataaagtccaagagtgtacaaggttaggagatcctaaaagacacgataataaaaggcacaacagaatataattatcctgaaagagagagagaggaaaaaaaacccaaaaaccctcaaaagctccagggaacacaaa

SEQ ID NO: 27938 - DNA, 1589 bp, Bovine  19866880958413
  misc_feature (1)..(1): n is a, c, g, or t
nataattagttttatttcaaatagtcaaaagatgcagttagcagacttaaagagtgtagtgaaaatagtgtaagcctctgtttggatatagtcaattctaagatagtcaaataatagattatgacagtccttaactatagagggattagaagaggactgaaatccagcactcacgttaaggtgccctggaagcaagagggatatatatatagagtcctaccccagatattacagagatagacaagaaataaagtctagtatctagaagttacactagtgaaattcacataaatgacattacctatgagcagtacctatctgcatgcttgtttctgcaatggaactggtctggtctgtgaactggcccttttttaagaaataaagggtttgcaagtattattgctgaatctgcccagcaaacacagaggcagatggtgtcatcctcactttataggtgaggacagtgagactcaaagaagctaagaaatgtacccacagttaaacagctagtgagtgacaggactaagatttggtttcagattttttttcaactattatgcccatcctactttgggtattatttatagaaagctttctaaattagaggatacttttattagaattaagaaaataattgaatacttggtaggatttcatacagaatttctgtatgaaaggtgcacaattctcaactaaagtgacttacacatctttcttgtcactgttaagatgaacgactaatattttcttaggcacgaaaattttaaatggactagaaagggataggattgctagggcttaggtaaccgccaatcactttcacctgtgtggaaggaaggaaattataaagtagtttgcactttaataagtggtaaatgtaaggtagcctggggggtggaaagaacagtagctaagagacagagaatccaggtcttaggacttgtcaaaatgaccttaatcaagttaaccctgagccttgttttcttacatattaaatgggaaaaacagtttatgctgtatgtcacagttgtgaggatcaaatgacacagtttgtaaacaaatgtaaagtgatattcaaaagtttggacagcagttgtattcctggtaaactacagtatatatgtgaagagaaatggttgtcattttttttatatttactagagtatttcttgcctattcaacatttaatttttattgaattctgtgaaatacatattatagatattgatatagaaatttgagtcaaaatgtgatgaatccttaaatgtattatatacttgacctactgtatatactggtagaaagaaggtgcctgttagttcagttagtgtgcacacctaacggtgagtaacttcactccctatatttatgtattctgaatcctttgtcacagtataatggttagtcagtgcttaactgtaggtttcgttgatcaacctgtgtgcttatggaaatagtttactttgagtaataattttaccagaagattgtacgttaaatgtgagaggaagctttagcgagcttttattacttatcttttaaattatgtataacatatagtagattagcccttttctttaaaaacttat

SEQ ID NO: 27939 - DNA, 2551 bp, Bovine  19866880965358
  misc_feature (1)..(1): n is a, c, g, or t
ntgaatggcagccggcttctgccctacagctgccgggaaaactattcggactcggaggaagaggaggacgacgacgtggcctccagcagacaggtattgaaggacgacaccctttctcggcatcggcccaggcggggccacagtaagcctctctcgccgctgcctgcgaaatcggccggcggccggctggagacctcagttcagggagggggaggaatcgcgatgaatgacagggcggcggccgccgggagtctagacagaagccgaaacctcgaggagtcggcggcggcggcggcggagcagggaggagggtgtgatccgctggactccagccccattcctagataccgcgttaacgctaagaaactaacccctctcctgccgccgccactcgcggacatggactcaaccctggattcgtccacaggctcccttcttaaaaccaataatcatatcggcggcggggccttcggcgtggactcccccaggatttttcccaacagcctccctcccagcgcggcggtggccgcctcgagttcactcaggatcaatcactccaatcatacaggctccaatcatacctacctgaagaacacatacaacaaaccgaagctttccgaacccgaggaggaacttctccaacaatttaaacgggaggaggtgtccccaacggggggtttcagtgcccactatttgtccatgtttctcttaactgctgcgtgcctatttttcctcattttgggactgacttacctaggcatgagagggacaggagtatccgaggatggaggactcggcagtaagtattcaaccccgtggtgaaggcaacaaagggaatgctgttagtggccggctctagccgcactgggcattttacccgaggtgacttcaacctgcaagcacatggtttaatagtgcaacacaacacattgagggcattcgtgttatctttctttaagaaagaatatggttatcgtgataagaatgataaccctgtggctggttttaaaatttttctgtattatgtattggggaattcaaaacatcttctaaaagaacaaaatattataagcaagcctgttagtagagagcattaaaaatgtgtgacttaaattttctttgggccttaagtagtaaccatatgtggagataccagtccagttactcaaaatttgaagttattttgactgttcaggaatcataaaggcagtgggtttttttgtttttttcaaattgagttgttctgaaaggcagtgtaagatctcttgaaactgtagttaaatattttgtaatattgcagtgttatattttgtaggattaagtatatgtgtaggtatctctaatttctttaaagtgaatgaatgcagaaagtcagaaggcatgcttctaaactgattgatttcccagcccagagcagctccacttccaccagtggaaaaaagtagtggaatggcagtgcaggggtttgcagtcaccttaatttgggttggtctccaggccctgccttttgctttgctgaatggctgtgggcagtcacattcactcattcattaagccagcatcatctgtattgagcactcaggatacagcagtggttaagtcaaggtgtccctgcccttcaacacaggaagaagatgaatactgatcactttatgttctatgaaggatgtaaggatggtgtaattggtgtactgtactatagacagggctctactatatagggcttccctcatagctcagttggtaaataatctgcctgcaatgcaggagacatgggttcgattcctgggtcaggaaggtcccctggagaaggaagtggcaacccactccagtattcttgcctggagaatcccatggacagtggagcctgacaggctacagtcttcgggatcgcaagagtccgacacagcttagcgactacaccgccactctagacatggtgatggtgggaactttgtgaaatgagacctgaagcaggataagacgacagccttgtattagacaggagagcattctgggcagaggttacaagaggaggaggaaaggccttgatttgagcaagggggagtgagctagagtgtgagcttccctgacataatctgtaaaatgatgctaatctggataagaatgatgcctgggaagattaaaagaatgtaaatttagtaagatgtactttagatgtactttaaagaaattagagatatctacgtgtatacttcggagaaggcagtggcaacccactccagtactcttggctggaaaatcccatagacagaggagcctggtggactgcagtccatgggggcgctaagagtcggacacaactgagtgacttcaatttcagttttcactttcatgcattggagaaggaaatggcaacccactccagtgttcttgcttggagaatcccagggacaggggagcctcgtgggcttctgtctatggggtcacacagagttggacacgactgaagcgacttagcagcagcagcagcagcgtcacacataatactacaaaatgtaacattttgttagattcagcagtacattta

SEQ ID NO: 27940 - DNA, 1107 bp, Bovine  19866880999083
  misc_feature (1)..(1): n is a, c, g, or t
naatttagtctgaatcatgtccaatgttaccctgactctgggacacagtgattgtgacagctggtccctgcacaagaggaagcacaccaatggcacagaaattattcaagaacaattatacccaaagtcctcatcatcgaatgttttctctctatggagaggatctttggtttgtcgctttctcagctcttgagcctgtttcctgtttcacatttgacagattattttcagagacaaatcgtatctgcagtttcttgggggaacttcaaagggggcccagatttttcctggatgagttataagggtggttgatgcagaaatgattgtcttgtgaggtttccaccaagccccatgtcgccaggggctcttagaggaaacagctggtcttcagtaatccttccctaagagcttcacccattttctctggcatcatggaatctttttatttaattggcagtgctatgtggaccttgttgatgctgcttctctgttatcgctaccagtaccttgtttgttttagtaggtaaataatacatggggagtttaaggagatggtggatgtttcattcacttggtaacataaatgaggctgtgaacaagtctcctttcaaaacttccagagtgtttttggtcctgcttagatcagaactatctggttatattttattggcttggtgtagcttttcagggaggtggacctgggttcaactcccagctccaccacttattagtcatatgaccttgggaaacttacttaaccacttcatttgttccttcttctttcctttcttccttcaggaataaaaaaatttaaaaagtacaaggaaaaaatacaataaattcctatattcctaccactcagaattaactatttatagttgaatctattttcttttagtcatttccctgtcatgcttagtaaaaaattattaccctgatgatatatgtgtacactctccctttactccccacttcttggggaataatgcttaccttgtggggttaaaataagataagagacctaaagcacctagccagtgcctgagccatagcagacagctggtgcacggtagctgttattatttttctccttccatccttactgct

SEQ ID NO: 27941 - DNA, 893 bp, Bovine  19866881046411
  misc_feature (1)..(1): n is a, c, g, or t
natggatctgtctttacagcccataaaagccaacacaaaggagaatgccagctggaatcattcagtgaagataaaggctttcaaagccctggctagcagcaggtggaatatgcattaggggttcttttattgttcaaatagtatttattttccatgggaagcaaaatgattcttatatagtcaataaagagcatattcaggagttttgccgtttggccagcatggctgatggtttgtaatgactctggcatccattacccatagaactcagaagaccaaggtaccaatggccatgggtcctggcttgattcttcagacccacgtcaaggtccatacatatacagcctaagggccagaacgatttcagagtcttgggctcctggtcagtgattgcttggaaaactgctcctccaagccaaactagcttctctctgatcactgcttgtttggccagcggcaccacttgggtggataagctgtgtatggaccagggaggttttgagtaaattgtcttgtttgtcctgataacatctttgtttaggagttacagaggtttgcatcctaaaaataggtgggtggtggtggtgagcagatagaagaggaggggattcctaagtggtcccctgccttgggaattcagggattctaggaaaggccaatggtatccaatgccaggagactcagactgtatgctccttggggggaggccttgctggttttgttccccactcttctttcagtgcctggcacccagtaggagcttcttaaatgtgtcatgttgcccaagatcaagtagcatggtagagggtgataccaccaattgtgacaacagtaagctggaaagctttactaagccctacagagggatgctcaagggacttaaaaatctgaaa

SEQ ID NO: 27942 - DNA, 890 bp, Bovine  19866881085258
  misc_feature (1)..(1): n is a, c, g, or t
ntaatgtttattacagttaagaaatactggcctgaattttattagcttcattataaatcactgagctgatatttactcttcgttttaagttttctaagtacagctgtagcatgatggtatagattttcttgtttcggtgctttgggaccaactttatgttatgtcagttgttcaggttaaatttttgtcttttcagtgtgtacttggcagataatttccaaaagtgcaatgcattcacggtattgagaggctgggcaacattagagaagataaatggaataaaaatgcataaatcacaagggtttggatgaagcagttaaaagtgctgaagtcttcgcatttcaatttattttgtcatgtatttagacacttgttacattttttgaattccccttaaactcataatacattttaccttaccatgaccttaccatgattccagagaattcagtattaaaaaagagagagaaagaaataacactgtggtagtgacatttaatgatataatatattgtaaacacaataaaatagggaatatatgtatgaactgttggcattggcttgaagcaatataatatattgtaaacaaaacacagctcttacataaacattttatactgtttgtataaaataaagatgctgctttagttttctgagtgtggtatggagtggtctttgcatgtgctagtttatggaaataaagttggttgcaattgaatagaagttaaaactttgcaatatcataaaaaagagaagatattctttccctgactctggactagctctccagccccatctttccctcccagttctgcctctgcttcagccaggccaccctacactcctctgttgtcagagcctgcaacactcctatttatgtcagctcccag

SEQ ID NO: 27943 - DNA, 1289 bp, Bovine  19866881217249
  misc_feature (1)..(1): n is a, c, g, or t
ngtgtatatatctgagaggtaataactacatacattgttttgttacttgctttttttttttttacttacttatagtagatgtttttccttgtaaaaatcttcattctccatcattttaatgacaatatatagtattcttaattttcaatacatgagaatttacttaatctcattattgagcatttagattatttccaactttttcatacgttccagtgaacatccttattcatatatcttcttgcctttgtacaattatctctttaggatgaattcatagaagtgggataactgggtaaaatagtgttcataattttaaagattttgatacatctcaccaaattgtattgacggtggtatcaatttatactcctatctgtacaattatttcttttcaaattctttctgaaaatttgaaaagcaaattcttttcagcaatagaatgttgtgaatcatttgaaatacaaagtaaaacggtccccttacattaactcagcaaataccttcctaactctaaactcattctgcaacataaaatgctagccatggctaaacacacagtgaagtaacaagggtggaggccaagggaatgaagaggagaaagaggttgtcaacaacgggcttagaagaacttcaccttttttcctcttgccagtgtctgacccaacctcttggacaatgagcttcctcccaaagaaaagtcgaggctggaaagaaggggaaactagaaattctatttaaaattccactgggtcttatatttgagattggcagcaccgaggcattccagatggctctgtctattcttttgaacctaccttttgatcttatttaaatttcctcctcatttcacctgtctgggtttattgcctggaaaacaagcaggtgaacatattagctcctccttaaggtgcccctagactacaggaaattgatgttcaggtcaggaatcatataacatgactacatgctccacatttatgggcaagttaagcaacagggaattttatgctgggatttatgacacaaacttgtagcagacacattgtgaggtgggagggaaatttaaataaggaaaaactctgccattaatattgattcaagttctccacttgatggaaaaaacatggaagaattttattctggaaattgcctgtgagttaaacaaggggcaggaaaacaaaaatataataaacacatcacccctccttccccatatattgattcccctctttcagatgaagtcagttttctagtcagtcagtgtacaggccagaattatctaaaag

SEQ ID NO: 27944 - DNA, 1333 bp, Bovine  19866881246443
  misc_feature (1)..(1): n is a, c, g, or t
nctattgaatatagttccctgtgctatacagtagggtccttgttttttattttatatgtaatagtgtgtaatgtaatgcacgtgcatgcataatgtgtatctttgggatctcatggactatagcccaccaggctcctctgtccatgggattttccaggcaagaatactggagcgggttgccatttccttctccaggagattttcctgacatagagatcaaacctgtgtctcctttattggcaagcagattctttacctctgtgccacctggaaagcctgtatatgtgtatttgtatccaaactcagatttaaaatgaagaaagtaccattgaggggaaaaaaaagtcagaaacagaccattttgctgacaactgactcacatttttgctaggtttttttttttaataggatcactctactgacaggtatctataaaagcaactggatcatcccctagagagcttgttctgcaatatggtggttgatatgatgtaacactgggccccttaatttggttgcaattccaagtctcaaatttccccttggactggttgtgttaagaagacctgtattaaaatggtattttctttcctttctccccttgaccaaaatcaacgaaaaacaatagagagtgaattttcatttaaatacttcctctcgctcttcaaagcaactgccaaatgcccttaaacacctcctcccaactctgaagttatggtagtgcttattgtcattagttaaatccttcaatgtgtactgtccacatttttttcctgatggagttatgattgtgttggtggttacaacccaagtagtttatccctttgcacccttggagtttgcagtggttttatgtcaccaaatgaaggaaatgcctcgatttttgatccctgtttcatggtttccaagtgagaatgtggaaacgtttacatactgtgggcatgatttcttcttttaaaaaagaaggtactcatatcaaaagcacaactttaaacctttagtgtttagattctgctgcattgtggtattttgcattgtggtgttgtggacgtgccaccagggatcaaagagtaattctgcagagggcccatttcattaagcaagcaggcatgtgccagccatctgttgtatccactgatagaaaacagcagtaagtttctcaaacttttgccagggaaaaaaaagagactttatagcttagaggagatgagttgcaaggtaccttgtaagcctcgtctggttctagagtgatttatatggcatacacgtaaaccctgctgggtcttcctcacacagtggtgtcaacatacataaacaaaccttttgctgttat

SEQ ID NO: 27945 - DNA, 1139 bp, Bovine  19866881264032
  misc_feature (1)..(1): n is a, c, g, or t
ncctcattagacactgaccaaatgagctcttcctttgtctttccttctctcgactcgagaactcaagccttgagaacaaaggacttggtagctatcaaaccaaagtcagtgaccattgactaaatttcccttgtattaatatcacaaacacaaaaacagggaggaaagtagaggacaaattaagggacaaatacttattgctttatgcttcaatccagtcaagttcctcagttcctgcttgagaaggaatttacagctttaagtttacagctcacaaggaaaagctgaatttcagaattctgtgaataatccattttaaccaaaaagataatcttgggtttttctaacttctaactgatgttctttattaggagacaggaaggcagaaaactggctggagttgagatcttaagtcttacgataaaaatcaagttcatctccacccatggaagcttgattcaatgaaaagccttatgacactctccagaaactccgaagacaaatgtcctcacagtccaaattagtctctcctcacttccaagaaacaccccaaaactaaaaagcaaatctgtgatctttttcttactttgtaaagatgaatatttactcagagtttgcatttaaacctaaaatataacgcactttgggaagtaacaaacactggccctgaggaggcaaagcagccacaggcaccgggtccacggggcacgttggtgaataatgagtctttggcttgtgtcacaagcactgaacctcaaggatccaagtggagttttaaagctgttttgcttttcagtcatttggatcttctgccctggcttgtttatttggattacgtactaccttgtttctaaaccaaaaccagactgagaaggcagcttcagagtaaccagccgaggtgagccttaaggctacagccatcctggctccacatttaaagccgcccttgaaaggaggatgtgaacacaggttattccatgacaactcgtctcgatgtaagtggctaaaaatgctccaaaggaaattactgccacggctgcgcctttagaagaaaaaagaatgacctttgaaatggaccatcaggttgaaatttaagcaagttgtagccttcctggctttgccgtgtgtccacgctttta

SEQ ID NO: 27946 - DNA, 1440 bp, Bovine  19866881370965
  misc_feature (1)..(1): n is a, c, g, or t
ntagattgaacataactcacatggcattcaagtacaccctgatgtgccaccaaactgcacacaaactaactcttctatagacataaacaacaaacttattctgattaaatagctcttctacactgagacaggcacagtgctcacacagcctcagccttggtcatgcaagccactgcctcccaacaaaggaagaaatgagaaaggcaggctaggccagagctcatcctcaatatcacatgattatatgctgctccatgaatataaatcattcaacacaaggtagtcatccatgccccacgctgtgctgacagccattcattctcccagcaatacttactgagcatctactctgggcttcactttctgctcagaacaggggtcactgagaagaagatggtcctcccagcattaacacctatatgacagttcctactcattggattcctgatggtcttggttgagaaacattcctgctgccttggtttcatgggatgacagagacagagtgttccaacaggccaagccttggcttgatggaaaatgttttttgttatccaactcaggtattttactggaccatccagtttgtatttcctctttttgttcccttctgatgccagaaggcaggcacttcctaactgttaaagatcaagagttttctatttcatgcaatgcttaggcacataggagtctgtaggagaaaagaacaccttagcagcttgaagatattaaacagaccagcagagtaatgaatgctacctggatgcttaggagcaagacacactgatttgattaatttttaataattcaagttaccctcattgctcaggctgggggtactgagcttaatgaggcaatgaataatgccctgcaatggactaaaattcccataaacttcctgcacctgcatttctgcaaaaaaaaatcctacacctgcttccaaaaacctactttggccacctcatgtgaagagctgactcattggaaaagactctgatgctgggagggattgagggcaggaggagaagggaacgccagaggatgagatggctggatggcatcactgactcaatggacttgagtctgagtgaactccgggagttggtgatggacagggaggcctggcgtgctgtgattcatggggtcacaaagagtcggacacgactgagcgactgaactgacctgaactgaaggaggggaggttatctgtgtaaagtgtatgtgtgtgtgcatgcatacatatgcatgagtcgcctcatcccagaaggtttgttctttttagtctcaccttgtctaatgcatcatccactttctcctctacatttgatttataaagattctaaattatcagtaaatgatgttttctctaaatgtaactgattgaaatatatattcaaaaccttacagtttcaacatcccaagaagtagattttcagtaag

SEQ ID NO: 27947 - DNA, 830 bp, Bovine  19866881420962
  misc_feature (1)..(1): n is a, c, g, or t
natattgtgcctttgaaaaaatgacatattgagtgttattcactaatgataacactatgtatttctggtacaagttcacagactcaaagtgtcatacaagaatgtttgtaaaatattggaagctattggttttttaataccttcacatgaaaaagaaagctacactgtatttttatgaagaagcattccttttatttcttagcatattagcatctttttttatgtttcagtattaaatgacctgtattttggaaaagaaagggaagataaaatgtaagcttagtttcttttgttcaattggagaatttactctagaggacaaatggtaagttaataaattcttctgctcattagtgggtaaaatgtgtctacttatgaaaatcattgtaattaaaatcacattttaggtctttttattctaaagctgcttaaatggctattttcataaagaatgtgatccagaaaacactttataaaaagtagttactttgaattgagacaccactttggttctctctaattacctgctgtagtataggcatgattatttaagctgccttttccacaggtctgttctctcatttttcctttcaactctagatccttcaacacttacattgtcatacaggaatagatgttttgggtccagagttcctaacaggagggtcatctattctcatacccccattttgcagataagctcactgaagctcctactgctctctgaggagggtattccttccttcccccactacagtttcctcttcatagatactttatggacagctaatcttgaattattggggaaacccagtgataaatcaatgaat

SEQ ID NO: 27948 - DNA, 566 bp, Bovine  19866881462320
  misc_feature (1)..(1): n is a, c, g, or t
nagggaaattgggaagtttttttttttttttttttgcaactaagaaactaactttctttttgcagtttctgttctagccagctagtgtgtgcatgcttgagtattaataacacccagagaactggaagttttggggggttgccactgggaccctgaaggccctcagaacaggagggaaggaagaagagttaacagtctagatacaaagtcttctctaaatagctcacaaggaaaagttgggcaaacactttaaaaccacaatatttattttgccacaagaacccactgtatcggtaatcagaagacatcccgattctagtgccaattatacaatttccaattcccattttttaaggaccgctgctcatctctgaacctctggattcactctcagtggacaacgggagctgatctggagccatccatccagctggaaccctcctgccaccgtgaagaggtgaatgtggatagtttctgagagaaggtcaccgtttctttgtgctgctgttgccactgccggacttgctaaagctcctgctcatgtgaggaaagtgcacggttggggt

SEQ ID NO: 27949 - DNA, 1736 bp, Bovine  19866881720552
  misc_feature (1)..(1): n is a, c, g, or t
ntttgtgtatatatgtgtgtacaggaaataaatccgatttacttgagacagtttgcaatcaggttatacagtagtcttctccattcgttaactgatctagatacatcactctacggttttgacaaaaatatattttaagaatatctatattcagaacaccagataatttatcttttttcaattatttaacttcttggtaagaaattttagctatcacattaaaatgtatgaggaagtgtgtatcagtcagcacccaatctggatacagaagccacacaataatttgaacaggaaagtctaatacagagaatgactacatgtgacagagaatggtggtgatgagggattggtaggtaagaagcaaatagaaattctgaagaatatagagacagcaaatataggaagtgaccatgacccctagggctgagacagacctcaagggaaagcttcccctgcaaactgcccctgtttccaggggctgatggcccaggagtcactatggggctacgatggtgcaactttctgggaatctgcctcctggaatttactggatacctcctttctggggtgctggggaaagctctttgcagggaagtgtctcactgggggccctccactccaaaactacctgagggaggtgccagggcaggctgctggccaccaggcgctgctcatccccgtgccctgaaaccagcaccttgctgcagaggagatactggagtcacaggagccatcgccagagaagcagcgtggctcaaagtgtcggcaaccagagaggctgtgtataccagggagttgggtgctggggaagctgtccccattgctagggcctgcaaatacgggacactccatgcaccacgtgagccacatgccagggaggcagcgggctctgcaggagcctgtttggaaagcatactgaaaccaagaaggaaaaacctccttctcctgtatccttctcctgtgtcctctactgacaaagtttaatatcgtgttggctgacaaataaaaaaaaatatttaaaggtcccagctccattttagcaaagcaggtgaagaagatacatttagaggtgacaggcaatgtattgataactggcacagagtcgctgttttattcaaaattcttttagggattcgtgagcaaaagtttgaaagccactcagtagtctagtgaattaatggcttcactgtcagaccccctcttgatatagctggtttcatactttgaacacaaagtgtgggaacaattaacttgggttagtatgagtgtgaatgagaaagtgtgtggaggttttgttaggagggagtgaggagagaaaattcggcagaaaagactaaatagaggaacaataggacaaaaaacaatgggaggaaaacagataaataaaaagtaataagaaggaagtgctgagtttaaaatcattagcagtatgaaaaggttgtttttccagctgccatttctgttaccttactcacactcattttgtgtgtgtatgtgcccacattcacatatatgtataattctcttcatttacttgactgatatatatatgtatatataaaatacttccttacataaaaggccattcaaaacttgtactctcccctaagtacattccctctcaacaatatactgcttttttactgcttaccaagtacaagaacgttattcacaggctgctttataaaccaactgcgtaatttattccatggttcacgttttcttcacattcacaa

SEQ ID NO: 27950 - DNA, 1963 bp, Bovine  19866880342081
  misc_feature (1)..(1): n is a, c, g, or t
nctggccgtgaaaaaactgtcgataagccccagaatttacttagaactcggtcagagaaatgttctctgggcaagagcaatttctcctcttcctctgcatcccacagagatgatctgagcccggagcctgctttgatgtcagtaagaacttggcaacctgatcagtttcacggggagcagaataagacaagcaagaagcatagcgaggagcccctgccaactatgaaaatttctaaaatgtaattaaaacacacacagagatgcaatacacagcattcacatacacattttgcagatgagaaatgggatcaatataatatcaatattttggcctctcccaatacacgaatgtcatcagaagctatggcagggtgcaggttggatatgaatccatcctgtttcacccaaaggagaaaataatgttgactttgaatagccagggtgaaggaggaggaagaaaaaagatgctgtaaatccattatgaatgcactgcttgcctccattcttgtatgatgtttcttaaagctgtacaactgtattatgttcatgcaacatgcaggccaagttataatggcagctagtgtggttcactctcactgtgcaagaaagccttcagtaaagctgctggcccctcacatgccattcagccccagattttcatgacccagggtggtttaggagcagtgtgcatgtcacgtggtgactgtggccccaccatccacagagacatcttcaattccatgggaggagcctggtctctggcttcaacgttaatctagccaggcattgcttagatccaacttcagactctgatttattacttagaaattaggactatccattttgtatctcttcctttcaggttgtccccccctctccattctacctccaccacaaaagacacagccaagactcccatggtgcagtgaaaagaaggaatcattgcaaatataagttgacgatgaggcaggggggaaagtgaagagggtcttaagtgtcaggccaaaaaaaaaaaaaaaaagtaaagtttaccctagagaaagtaatttttgattgagagtagcagaaagtggcattttagaaaaattaataaagaatctgcatcaaaaattgattcagaaggaaggataactgtctccaaactggtctatccctttggagacaattatcctagaggaatgcagaggtgataaggatctgcaggaggtaaaagcaggaagaatggcaatgaggtcagcattcaaaggatgtttgtgtgaggacttactgatgatagtaacggctaacacaaatgtagcacttacaatgcttctaagtattttatgcacattcaattcagttcagttgagtcactcagtcctgtctgactctttgcgaccccatggactgcagcacgccaggcttccctgtccatcaccaactcctggagcttgctcaaactcatgtccatctagttggtgaggccatccaaccatctcatcctcatgtccacttctcctcctgcacattacaagatttaattatctcatccctttgaggtgaatactgttaggaaatagaggtacagagtgctaaagtaacttgccagcacgacccaggtagcaacagagctaagaagtgagcccaggcagtctgactccatatccttgcttttaaccaatgtactggttatactgcactgcccttctcagtaaagagtcatccccacaggatcttgtgagctcttaatggggtgacacgaataggcattaccaataatttcacagagggcagactgggacagcaatgtcttcgcccttactcttgtaaagcacacaactctcagccagtgtatcagtcccctcagggagacaaaacctagatgctaggaacacacacacacattccgtgactttcctgtgtgatagataagccagtgcttgaggagaatcactgatttcccagtagatctaactgcttctcc

SEQ ID NO: 27951 - DNA, 1315 bp, Bovine  19866880381491
  misc_feature (1)..(1): n is a, c, g, or t
ncctttggcatgaacaaagatgcagactatagagaaaattgtagggcttcagtttccacagtggtgtccgtttgaaaggtaggtgaggagagtcccatggttttgcatttaaactcaagccacttatttaaggagatcatggcacaggtccttcacccttggttgttaatgaccttgctttgaagtcctgaatggaatacgcagtagggtcaattgcagactcagtgacaagaattaaagtgcaaagctccctaatgagatctgtgcttattccttgtggttcaaggaacactgtggtgaacggtttacagcctgcagggtcaatccccttgcagaggcagagttaacttaggcattccccaggctgtataaacaacactgtctgcagtaggaagcttgaccctccttttatcaagccaggaaattcttggactgcagccacactctaatatttatggttccataagcatttgattctgaaaaacttcctaattctggaaaatgaccacccgttagctgttaatgcacaagtgatagggggaaaagccaccctttagaaggagagaagggacaaagagaagagcttacgaggcttaagtgtgacaagcgtgacatctacctatggagcaatcatatacacatgtttaatacatgcatatcaaatccttatatacatctttccacacagagaagctaaaatggtaaaacaaacgcttacattttttttaatttaccttttttttgtatttaaaaaattgtggcatataatgtttctcaaaacagtggtataaagtaatttgaattcatataggcttcgaatcccagtataaactgactttcttgggctcttttggctgaaaggaattttgagaggttctttcatcctttcctctcttctctacactaaacctctacactggatcttcaatgcagcccagacaattgtttacttattatttaagaaatgtaaaaaaaaaaattttttttaaacttctttggacatacacatctccatatcttaaagaaaaaagaatatcctctattttgaatccgttacctccctttctaaaggatatttacattaagcatagagaatcacctgtatcaaaacctaaatcagaggcagtggtttcatacattttccaaacgtcctgtctccaaggtaacctgtttcttcctgacaggctggagggctggagagaagtgagaagatggaaacatggatgaagtcgcatccaggggatgaggtggccactggctggatgggatcaattccgacaagaataaaacaattcatagaaatcaatgtcaccga

SEQ ID NO: 27952 - DNA, 2134 bp, Bovine  19866880581310
  misc_feature (1)..(1): n is a, c, g, or t
nctttctataaatgctagatcttttctaataagaagaaatgctgtgatctcagagatgccttggatattgtgacaaatatctgggcctctgggctatttatctaaagctggacttagactgtatgcttctccatatctatgttttcctctgtatagctcatctttgttcacaaagtaagtgaaaaatatgtattctgcccatttatcaaaaaaaataaaatggctaaaaaagaaatacagtcaactatatcaaccctattagagagatacagtgggggttactttgggtaaattcaacccatgaggtcttattgaacacacataaatggagataaatctgccctgtgccaccatatcccatagctctctgttagaagaacttctttcctgttttcttccctaagaactcactaacttaaaaaaaaaaaaataagaataagataaatcaggatgaattacagtatactaatgcaataagcatttataagaacttacatactagaaggcattttgctatgtactatgaaggaaagcagaaattataatactagcaccacatttgctctgaggaaatctgtagtttcttaggctcagatgttcagttgtgtctgattctttgtgaccctatggactatagccctccaggctcctctgtccatgggatttctcaggcaagaaaactggagtggggtgccatttttgtcaccaaagcactctaatcgagggactgaactcacatctcttagtctcctgcattggcaggcagatgaattctttaccactagcaccacctgagttattaaccactagttatttcttcagaccgttaaatcagctcttggtcttcagaatctaggcacgaatactttagcctttcactttcatttcacactcacacaagccccctccattcttctccacagttgttgttttaaatttttaacttccaagttcacaataatagcaacttttgttagtaaccatccccatggaaaagaaatgcaaaaaagcaaaatggctgtctggggaggctttacaaatagctgtgaaaaggagagaagccaaaagcaaaggagaaaaggaaagatataaacatctgaatgcagagttccaaagaatagcaagaagagataagaaagatttcctcggcgatcaatgcaaagaaatagaggaaaacaacagaatgggaaagactagagatctcttcaagaaaattagagataccaagggaacatttcatgcaaagatgtgctcagtaaagaacagaagtggtatggacctaagaaaagcagaagatattaagaagaggtggcaagaatacacagaagaactgtacaaaaaatcttcatgacccagataatcacgatggcatgatcactcacctagagacagacatcctggaatatgaagtcaagtgggccttagaaagcatcactacgaacaaagctagtggaggtgatacaattccagttgagctatttcaaatcctgaaagatgatgttgtgaaagtgctgcactcaatatgccagcacatttgtgaaactcagcagtggccacaggactggaaaagttttcattccaatatccaagaaaggcaatgccaaaaaatgctcaaactaacacacaattgctctcatctcacaagctagtaaagtaatgctcaaaattctccaagccaggcttcagcagtatgtgaaccgtgaacttccagatgttcaagctggttttagaaaaggcagaggaatcagagatcaaattgccaacacctgctggatcatggaaaaaacaagagagttttgctttattgactatgtcaaagcctttgactgtgtggatcacaataaactgtggaaaattctgaaagagatgggaataccagaccacctgaccagcctcttgagaaacctatatgcaggtcaggaagcaacagttagaactggatatggaacaaaagactggttccaaataggaaaaggagtatgtcaaggctgtatattgtcaccctgtttatttaacttatatgcagagtacatcatgagaaacgctggactggaagaagcacaagctggaatcaagattgctgggagaaatatcaataacctcagatatgcagatgacatcacccttaggcaga

SEQ ID NO: 27953 - DNA, 1731 bp, Bovine  19866880607152
  misc_feature (1)..(1): n is a, c, g, or t
ntgtatgagagttaaaattcagcttttacaaaagtgctcggttgtaagttttatccttgtgaagttcatttaatctccttaatgcatctggtgtaagtcttctacatcaggcagaaattagtataaagagtcttaaatcatgttcatcctttcaaaatggtttaaactatgcctatgtacagtcactaaatacaatcaagtatttttattgtaataagtaatttgaaaattttccattattaatcatctaagaacattcttgctgaaaacagaacttatcatgagtttgaaaatgtacttttggttttcaatttcttagtcctgtgttttgatttaggtttttaatcagatctatttcagtaaatcaaaacttaccgtagctgtgcccaaggttatgcagtttaacagagaacagccttttgtactcagcaagttttacagggtagaatgaaaacatgtttgtagattaatgatgtagtattctttgtgattaaattttcaagtgaagagtcgcagcatcaagtagtggaaataacactggggctggagttagaagaactgaatcagagctcatttatgggttgagtaaccttgggaagtcaattgtcctctctgaggctgtttttctctttagtctaggggatgataaaatccaactcatagcatcattgataggcaactttacagaagtcagtgtcaggtttcttctagttagtcaataaatatttatgttttattttataagaatcaggggcagttatatctaataagatatatttaaagccttaattaatgcataacttcagtatttagctgcccaatatttagaagtttaacattaagaggtttaatatgctcattaaatgacaatatgaatttttagttttggacaaactaccacatttgagataacaatcctgattttatagctttacttagaaaaaaatgtatatggtcactttatatatacacagccaagtttagtacataaagaaaaatatctacaggtttatagaacctctaaaattttagatgtttattgtttcagctgaggaaaaaaatgttaagttggaattatttttattttttagcaaatctaaggcagttcagcaactctgtaactgtaaacttttggggttgcttgggaattggttgaaatcatatggaaaaatctagcttgaagttccctccaggtttcatttctctagctgaaagaggaatgcgtttaggaagcagtgtatttaagctccaggagattaggatgtgggaatgagccaagacgtgttggttgctacttgatgaggtgacttatttgtggagtgggatgggcagctgtattggaatctaggtgatctcagcccgaggcactgtgctataatggtagacatgtgcaagaagattaatgagaaactaggcttaacagagtgaagtgttaaagagggaactcaaagaccttgtccatctggattgaccttcaggttgaaagtaggtagagtcgaatgcactacatgtatttgtcttagagtgctcctcggtcacacagaaatatgatttttttctgatttgaactcttcaacatgaaatgttaacaaaaatgtctagcctagggtttagcaatgtattcaatgcagaaagtcttgataatatttaatacttcaaataattttccctagcctttgagatatcttgcactaaaaatgtcttcttgctgaagcattctctaaaatatta

SEQ ID NO: 27954 - DNA, 1638 bp, Bovine  19866880644695
  misc_feature (1)..(1): n is a, c, g, or t
nctgaatagaaactggcctacaattctgtgtgtgtaagaataaggtggttgttataacgcattgagttgaaagaggtgggggggggggtagctgtttgttacatatcattatttctgtagtaaataactgatacagatacacagcagtcttggcttcagttaccttctgtgaaagtgaaagtgaagtcatgtccgactctttgagaccccatggactgcagcctaccaggctcccctttccatgggattttccaggcaaggacattggagtgggttgccatgtccttcgccaggggatcttcctgactcagggattgaacccgggtctcccgcactgcaggcagatgctttactgtctgagctaccagtgaagcccttaccttctgtgagcaattataattttaaattactccactaaatataattttcaacagtattttccctgtatcttaaccctagacatttctctactttgataaatgttgaaagaactgatcaatattgagaaaatacagtaaagttttgtacaaataaattccttaaaattaaggccgataatctggataactcgctgtttcaccatattttatttactgggtttttaaagctttattgaggtattatttacatacaaaaactgctcatataaatatatattcaatttgatgagtctggacatttaccaaaaccctggatgacatagagtgttcattttaaaattgaaaatatttatgagtggttaataattctcccaaagtcacttgcaaaagagtgagaaagatagtatctatctcagctactacaattgtgatcaattggagtgtccagagactgacttttttgcatctgtcaaatttttgtctaggttttgactttttgtgcctgctttagaacgtttatttcacagctgattcaaaatttcaacaaaggatgatcagaagcagaagagactgttatatactaaccatgaactaaatatcatatcaagtatttaaaatatattgtcttattaaattctccaaacattcctatgaattatttatgttttccccatttataaatgaagaatttgaaccttttaacttttcctaattttttcaatgacatatcatactaatatatgatagagttggagatgtaagcttaaaactaagggaggcttcctccagagtccaggtttccttcattaaaccaggcagtttccacaatcaatgtaaatttagtaacttgaattaataaaacggaggcctaaatcaagggctaaaattaagtttaaggatgagagcacagaaaatggattatgtacacacacaggtatttgtgatttcatttaattttcctcaatttttattttatattggatcatagttaattaacaatgttgtgttggattcagatacacagcaacgtgattcaggtatacatatatatataatatatatatatttacaattctttttccacttagattattcagttcagttgagtcctcagttgtgcatgactctttgagaccccatgaactacagcacaccaggcttacttttccatcaccaactcccggagcttgctcaaactcatgtccatcgagtcagtgatgccatccaaccatctcatccactgtcatctgcttatctt

SEQ ID NO: 27955 - DNA, 965 bp, Bovine  19866880671182
  misc_feature (1)..(1): n is a, c, g, or t
ntgaaattgaaggctacttcctccccgacgtctcgggtggaggaacaccagaaaagaacagcctcacaacgggcacccgctgcccttgctaacgtgggctccatgtgcttctgtaaaaatggctatgtgtcaaacagtagagaaatgtaatcattatttttagaaatttttagacattttccatttcctagctgactatcataatttatttcccacagggttgttcatcatccataaaaattgtgtaggatttgtgaagcaatcttgagtttgtaccctctgggatattttagtgtagaactagaagaagcctagagtgattttattttattttttttttcattcaacctggagaagaaaactatctgttgatgaattgtactgaaggcgctcagtacagaatcacaattgcaagggctttatttttctctctcttgaaagtttaatatctggaggtcattacgtagtttaggggctatgcaattagactatggtgttcaagaaaggcttgtcctcaccacaagggaaatgagtagaggggcttgggggtgttgcctagaggaatgcagctgagaagagatattatttttgccgtcctgtgttgtatattctgtcagaagtatccctcagtgctttgcctggagaaagcccaaaatggatgtgagacctgggattacaagtcaaccgccattgctgctgaagtctgagtttggattcatatgcctgggaaggagttcgtgtagccatcgtgtgaaatgctgaacctcagaaaacccggtggttaggacaggtttttctctattcccttggaaccggtattcatagaatcttaaataatttacattggaagagttagactacctccatgcattatcaactgaccagttattttttagagtccttgacaaattgctttttaaccaggtgcaaaagtaaaaagcaaaataagacaaaacagaacaaaa

SEQ ID NO: 27956 - DNA, 2246 bp, Bovine  19866880709415
  misc_feature (1)..(1): n is a, c, g, or t
nttttggtaattctcacagtatttcaaactttttacattattattttatttattatggtaatctgtgataagtgtcatgtgtgatttttgatgttactattgcaaaaacattacagctagctgaagacttagatgatggttaccattttcagcaatgacgtattttttacttagagtatgtacatttttcttttagatgtcatgctattgcatataatttttacatgcactaggaaaccaaaaaattagtgacttgctttattgatatacttgttttactgcagtggtctagaaccaaatctacagtacctctgaggtatgcttgtttacaaacttagcagttttgaatctacttttattgctagtaaacttagaagataaatctctctttttctttgcacatttttcagcttgtgacctaaaatattgatgctgaactatcaaatgcgcagtaattttcaaatcctattccttggaaaattagtatttctgactacttctctcagaactactttgggaccaaattttgtttagttggtttattttttgatatgcataaactttaccaaatataacgttagactttagagttctgtaccagagagctctaacattaacttttgtcagagtacatttgaaaatgtcattacaggaaattgtaagctgtccatcatggaattatacagtgttttagctgaaagaatcaataaacttggagagcctttcagtttttcagataagaaaatttgtggcctgctcctggttgtgtatctgattatttagagagtaggaattaaattaagatcatacaagtctttgcattaaatacagtcagctctctttattcatggtttctttatttgcagatttgctcacccactaaagtcgtatttgtaagccgagtatctgtactcactggactttcattaccgttcaaagacttgggtggagtggtgaaaaatttgggtcacctggcactcacatccacaacctggttcaaacaaggctatgctttgctttgttttagctctcatactctaagctagtgtcctttcacagtttagtgccatacttttcacatttttgtgcattttgttgatgatttcattgtttgaaacagcctacaggtgtagtgctgaaatgctgcttacattgtcttatattcctaagtacaggaagactgtgatgtgctttacagagaaaatacaaatgataggtagtctttattcaggaatgacatataggaccattggctatgagttcagtgttaacgattcaacaatatgtactaaataaggtgtccctaaacagaaacgcagtgaaaccaagttatatgttcaagattgatgaagatgttctgaccagaggctcataggaacctaaacttgtatttgccctgggagttctaattcagtgttcattaactgagtatttcaagttactgtgtagaccgtgtgtgtgtgtgtgtgtgtgtgtgtgagttgctcagtcatgtctgactttttgtgaccccatggactgtagctcgccaggctcctctgtccatgagattctcccagcagatatactggagtggcttgccatttcctcctccatgggatcttcgcgacccagagattgaacctgcgcctcctgctgctcttgtagtggcaggcagattctttaccactgagccacctggaaagcccatagattgatagggagagacaaaaggaatatatcatgccaccatgatgctgatgtcagtccctattggagtttttaaccaagaaaatgttttaattaaaaaaattataatatatttataaattaaaatttgaaactatatacatgcatagaactttgtgcatgcttagtcactttgcaaccccatggactgtagcctgccaggcttctctgtccatgggattctctgggcaagaatactggagtgggttgccatttccttctccaggggatcatcctggccagagactgaacccgagtctgctgcattgcaggcagattctttactgtctgagccaccagggaagtcttcacccactgtttcaattctgcagttcacccctgtcaaagtcctctgcacaccaacttctacaaggttctatccttagtttttcaatatatatctcttgctaaggccacttgacacaccccctttcttcagttatcttctataatatgtctcctcagccagatatttttcctgaactctagattcataattctcaaatgaacattgagca

SEQ ID NO: 27957 - DNA, 1352 bp, Bovine  19866880781085
  misc_feature (1)..(1): n is a, c, g, or t
ncctcatctttagtgctgaggagcaaaaccatgaagaaatataaaaatgcttgttttttaaacctactctagaggctgtatttggttatgctttattctttttacatttttgtcatctttaagtggatccaaatctaagtaatatctgcaaacaaattagtaatgagtttccccagtggctcggatggtaaagtatctgtctataatacaggagatctgggtctgatccctgagttgggacaatcccttggagaagggaatggctacccactccagtattcttgcctggagaattccatggacagagaaacctgatgggctacatacagtccatggggtcgaaaagaatcggacaggactgagtgactaactatttcactttcacttttctcaaagagaataaagcatttaaatcagtactcttttggtctcagaatatttccagtgtgtgggggtggcgtgggggtggggctttcctctaaacacttaatttgaatagtagggtggaaatggttaatgatgtatttctggaactgcttatctaatctaatgacaatgccaaaggcctactttagaaagttcaacatattcttttgattaattttttactatatcattaattacaaatgaattctgaatgaaaaatggtgtgtatctttctgttagcacattttcttgacccgtatttccagagataacattttccagttcattccaagttttgatagtcacctctcttaaggtcaagataaagatacaataatgagaaaatagaacaaacagcagctaatggaagaagcagtccataaaaagctgtaatggtaattccacccagacagcaaaggaatgcagcattttcactgagcactacctgacagattcaataatcaagggaaagccttaattgatgacacttcattagcataatgagtcgaggctgggaaaagagagtcccttattaattaatcaagcaaagcacgaactgtttcagtctcctacactctgccattttccattaatcaagaaaatgtgtattaaactcatttgaaatcctggcatgtggagtatcattccaaagaagagcaatggcaaaaaggtttgcccagctgcacacatctgctctggacttatgtatgcctccataagccttcagatctgcaaggctgaaaccatgcacagagggcccagagtaagtggttctctaaaacatgtaaatcaccatctcattaggaaaatacacaaaaccccatcatcttcactaggaaaaaaagaaagagaattaacttcatttgccgttccttcacctattgtccaaaacctctattgcataaatattatcaaatatgcatata

SEQ ID NO: 27958 - DNA, 1703 bp, Bovine  19866880805452
  misc_feature (1)..(1): n is a, c, g, or t
naaattattttatgtgtaacagtttaacatcttattataatcattaaatgcaatattattttaaccattgtatattatctaattattatattctagattatttagtgaatccacaaatgctcaggttccagaatttctcccaagtaaattgtcttataaaaattttggccaagaatttaatagagtatatttgggaggacaagagtaatagggagaataaaagaatttgagagggcacactgaaccacacaccctcccagggtatatttctagctccagtattcctgactcatataccaaaaaaagaaaaaaatataatataaatatattcagcctgaacattcaactggtttaaagtcctttgatgactcaaagcacagttccagacatcagaaatgaaatctcaatctgtgccagttaaatgttaaataactgtatttcattattaataccaataatattttattcattacacataccaaagagatcagagttcattcagtctttcattcattaaacacggctatgacagccttgctgtgtccctagaatgagaggaaaagagaaaaatgaatatcatcatttttagtgtgtgaagtaggaaatggaggcaatttgggtggtcaaatccaagtaacttatagttttctttcagtgcccagctgattggaattgctttagctgggcctgctgcttatctaatcaggctcttctacttctgtgttccaaattgccttgtatgtccacccttcatacctttggtcttgttctttctttgcagaaaagaaaactgcattttagcaatgaagactcaactgcttcttaaatttttcttcggtccctttcgaagagttttttaaactgcattccaaaatttgctgtttacaagtaattgatatctttgtagtggaaatagagcaacttccatgctttaaaaaagtctaaccacccttggaaatttgtatttaaataattttgaggggtttcattgtattaggacttaaattctttaatgtggcagtaacatgaggaatcctcaggcctcctgttttacatattcctggaactttatactactcatttgcagaattatcctagttataatttaaataattgtttgtttaattcatgaatcccccataggaaaaagctccttgaaggcaggtaccatgttcaccttcatttctgtattctagagtgtaacatagtttgtggtacaaagtaggaactacaaaatacaggttgaatgaataaatagctgaatggatagtcaagaacaggacagactatatagtatttctcagatgcatctgaccaataaattatattaatacataattatatattaatatttcaccaaattgatgcatgtcttttatgtatatacatctatttttttaactttaagttgtgaataaggctcacaacagcttaaattttgagaataattgttcagccaacatagtcacataatttacaaacatcctctccacatctatcttgtccaaaaagacatcagcaaaacactccattaaatgtctcattgtcatgcagattcaccatgtctgtataatttaattagtttggtataatttattcttagtgaacttaaagtggctcttggtgattgccacttcctttctaggtgttcatgagccatctgtctaattatatgtcttggaattttgctgagaactgatgaa

SEQ ID NO: 27959 - DNA, 4050 bp, Bovine  19866880818781
  misc_feature (1)..(1): n is a, c, g, or t
nacatgtcttactaagataccctcttaaaatcctaagtatcctatgaataaaaaagaaaaacaacaggtggctaaagacaaagatacatacagctgattgggtggtatatggcttagagtggcattatgttgttaattttagcattaattgcatggttagggtacctaatgttattgtgtacatagtcttctaagtgttcagtatgaattaaatcaacaaattctcaaaataatcctaggggatcagatcaatatctttttttcacaaatgagcaaacggaagcaccaaaagatgaaataactttccctaaatcatacagctagtaagctgggattccaacttagctagctgcctacagtctcacagttactatgccccactgcctctccatatattttttcccagtaaaaattatctgtatatctggatgttgtacatattgaataatcacacttttggtgtgaggattagggttagatcaaagatgaaatcttgtcctaatattgtgccatgctatgacacaatctatcataagccacttgtatttccttttcattttctagaaaacaccacattttaatgaacttaagggatctatcacataccaatcttcttattacgaaacttggaaattccctggatagttcaatacaaagaatatagcattaatacaaattcctagtagtggaaacagatgttttgagaaaagcaaaagttgaactgtttccctaagtcttcgtgagctgtgtaaaattcctgagaggccctgaataaagatcattctaattttgaattaaaagcctacaaggagagtttttaatctcagaagaaaataccagcagattcatctacagacttcagggaagaatagagattgcctaggtcacgagtataaacagttttcttcatacatttcagttgtcagtggctatgttgaacagcaagctggggctgtatttggctcgctgggaagaatgcaacacttacttggtgacccatgtcttagatgcagaatttagggaagggcagcacagatgtcaggcttcactggtggctcagatggtgaagaacctgcctgcagtcttctgtttcataggaagctggacgtgactgagtgactaacacttccactctttcatttcagtgcaggtgtcatatttttgccatccttactagagtcaattcctttctttactacttcttctcccctctttccagccatcctcctagcaaacagacacatgcatacacatacatggtcacacacacatacacaaacacactcagtacttacaccaccagaaggagatccttcaaatgaaatcctgggctgaccttcagactcaaacttctgtgcttcacttaatttctaacgtggggtcagctaatgcttagcagccacctttatcagcatataaaaagtaatactgatattgagccaagaagattgacaatgtactttcctgatattaaaagcttacaatcaacttgtttctgttgaagtcctttaggcatgaataatacctctctgagcttacaggaagtcatgctagttttgcatgaacaacaccaagtaatgttgagtttaatggactgatgactggggacctgggggataggatgaaggaaacaggagggaaaagggtgggaaggtgctgaacccattttggagaaaggaagataggaagaattgttgtgtacagaaatgtgagagggaatactcagagtaggatggacatactacgtggaaaaaagaaatatgttaggagagacttagtgaccagtattgttttatgcaatgactgtcctgtgtgtgactatatacacatgtgactaaatgcacatatgtagtttgtatttaaagtctaatgggcacccccacacacacatgacagaagagggaaacactgaggaagtcaagatcaattttctctcattattatatgaatatatcaactttttcaaggcaagccattggttcctcttttcttgtttcaggaagaaaaggaaacaaggctgtcagtggtctgtcttgggaacaccacttaataagctcctcccagtgcagaccaagctccccagagcgagtacaaatggcttttattaaagcccccttctaaagaggcaccatgagaaccatgcaataaaacttctgaatggcctttgagtcaccattcataaaaggagaataacaatttgatagtcttttctatggcttagtgccatcgtttaaaaaatgggaaactggtcttagcaaatgcccctgggttgagagataagtagtaaaatcatcaatggcctcaggaactaatgaagctaaaccaaaactaaattattaatgctactgtagtatgactctgttctggctcttgaacagagctgttcaatggactggagagaacagtggctacattttaggcaacagaaacccaggtggtaccttgtttttatgtcatattttccacttcaaacatttttggggggtttcacaattgggatggggcattgtgctaacatttcaaccaacgttaagcatccctgaaaaggctaattcggcttacactaagtggaaatgaaatcaaaccaaacgaaatcaccttgacacaatccaacagaacattctgaccttggacaattggcctagtaatagcataataatcatcttgcaaaagcaggacaatcagttactggctgttgttagtcctgctttttctaagctctgtttataggatacaaaatgtgaggaagattggacaattatctgtctgatttgatcagggtaggcagccaaaccagctaattcagcagggaaatagaaccctgactagctacactgatcaaatcaagagaataactgccagatctcccctttactttatgccgagtagatgctgccttggggaatggcttacattcaaaggctctgactgtttgaagtccccccaaagtctgttaattggagctctttggattctttggacagttaaagttgcatagcttggctgggttggctaatcagttctcagacaccataaattcaagcccccttaaaatggtggggaaagaaaagaccttcataataaaaattataattacaatagcatgattttcctgctaaaaaggaagtaaaacgaacttgtgtgtaggatagccagctattctttcatttggcaaaccagccaggaaacgtagagatggatatttcagttcagaagagtgcttcaggcctgagtcctacaggcacggggtcgcatgacagcttctttgatcagacaccaagtttcattaatgtcaacagtgaatagacgaaacaacagttttgatgctatagtctaattttatccccccgaaattaatctggcaagttttttagggacatataagttttttttttctctaagaaattatctcctttataaaataaggagaagctagaatgaggtgatagtgctggctaactctcaacaaagctaaaggaagaaggtgtttggggttaataaaactaacagaattcaacacagggtggttactcgaagggctatgtgtttaatttatttttaagaatggttcattcaagccaaaacataaattcctaacaaaattggttagatccttctgttgcaaatatgtggattgttactccaagttccttctctcactatctctccatcatgtgttcaattttatgtcctcacttctcttaccctgagttatgttaccaccaccaaaagtctccatgcccacaagattcttaagacaaaagaatgggaaactctgacaaaatccttcctggatgattgccaatggaaatagtgcccctgaagaaacatgaactactattctgtattccttctttgaaggctaagttataactgaatcagctcccataaaacagcaaagtcaaacaacaatgagtatttattcatttgcaatcactgtcttctaaggcatatgggaccaaatcaatttcatccagaatgtggaaaacatatagagaaagaaaaaaaaaaaaggaaaactttatttaaaaaaattttggccacaccgca

SEQ ID NO: 27960 - DNA, 1215 bp, Bovine  19866880856024
  misc_feature (1)..(1): n is a, c, g, or t
nagagactgaaggaacttgtctacgatacttaggtttttaagtaggtagatgagtctagatttaaactaagatttcacagatttttcccttgcctgttacatacttgagaaaagtatatgtattttataaatgaatcaaatactgtatacatatttgtagatatttgatgtttcataaatgaatatctatattttcatttctattatatgatataatgagaagcctgctgaacatgtgaaagagtgtagatagaagcacttatatatttataatatataaatataccatcaatttaggtaagtggttctcttttcctagattttttaagataattctgatttgggagccttccctagtgactcagtggtaaagattccacctgcaatgcaagagatccaggtttgatccctgcatcaggaagatcccctagaaggaaatggcaacccactccagtattcttacttgtgaaatcctatagacagaagagcctggtgaactgtagtccatgcggttgtaaaagtgctggacacgacttactgactaaactaccatctgccttgtgtcagtggcgttgagtatagtctgtctcccttgtagcattaatctctctctcctattgcaacagtcttgaataaagtcatcttatccaggggaatatttctttgcttggaaatgaaaataatgctagtggtgatagtgatggtgatggtcataaacatcgtagaagaaaacaatgtatactagagtgtagtaggttaagtacagttttggtttactgaaatcaaccagactaaacgtgatactaagattggttaaccttgtgctaattcataaatggaatgactttagtttatcttaatcttctttggataactttagagaacagttcaaattcagaatgataaataacgcatgacgaagtacagaaggaattttatctaagaaagctgtaccttcactaatctaaactttttgtctattggagagagaaatatgttaaaagtctgtcccaccggatagttcaagtgtactttatacccctgaaagtttctgtagaagtttcaactgatcacatgttggttaagaaaaagcaatgctggctttcagctgtatgagtttcttatatattttggagattaattctttgtcagttgttatgtttgcaattattttctcccatactgagggttgtctttttatcttgtttatgtttc

SEQ ID NO: 27961 - DNA, 2909 bp, Bovine  19866881048502
  misc_feature (1)..(1): n is a, c, g, or t
nactggagtgggttgccattgccttctccaatattaacccttaggtaatgttataaaattaaccaccacaattgtactcatttcacatgctagcaaggtaatgctcaaaatccttcaagctaggctttcaacagtatgtgaaccaagaacttatagatgtacaagctggatttagaaaaggcagaagaaccagaggtcaaattgccaacatctgttggatcatagaaaaagcaagagaattccagtaaaacatctgcttctgcttcattgactacatgaaagcctttaactgtgtggatcacaacaaaccagaaaattctgaaagacatgggaataccagatcaccttacctgcctcctgagaaacctttatgcaggtcaagaagcaacagttagaactggacatggaacaatggactggttcaaaattgggacaggagtatgtcaaggttgtgtattgtcaccctacttaacttatatgcatggtacattatgcaaaatgctgggctggaggaagctcaagctggaatcaagattgccgggagaaatatcaataacctcagttatgcagatgacactaccctcacagcagaaagcgaagaggaactaaagatcctttgatgaggataaaagaaaagcatgaaaaacctggcttaaaactcaacattcaaaaaactaagatcatggcatccagtcccatcacttcatgacaagtagatgggagaaacaatggaaacagtgacatgtttgactttcttgggctccaaaatcactgcagacagtgactgcaggctgtgaaattgaaagatgcttgctcccttggaagaaaagttatgacaaaactagacagcatattaaaaagcccagacattactttgttgacaaaggtctttatagttaaagctaagatttttccagtagtcgtgtatggatgtgagagttggaccatgaagaaggctgagtgctgaacaattgatactttcaaactttggtgctggagaagactcttgagagtcccttgaacagcaaggatttcaaaccagttaatcacaaaggaaatcaaccctgaatgttcattggaaggactgatgctgaagctccaatactttggtcacctgatgcaaatagctgactcactggaaaagaccctcatgctgggtaagattaagggcatgaggagaaggggacaacaggaggatgagatggttgaatggcatcatcaactcaatggacatgaaactgagcagactctgggagatagggaaggacagggaagcctggtgtgctgcagtccatggggttgcagagtcagactggactgagtgactgaacaacaataagtatatagtttgagtttacttcaagtaggatttttcttttttaatatgggaaaaattgttgctaatttaaaacctgtcacaccaaagctttgtgctatatttgtataagagtaaatgtgggcctataagaatttagtcttgaatgcaattgatgcaattgatttttttttttttttttttgcagaatggaaagtgagagtgtaaatgggaaatcttattatttccccatgattatccatcatatttagtcctaaataactcactcattcaaatattttaagtgaaatttagaattattcagaatattgtaaccaaggcaattatcaaagctgtttcatagcaattataattttatagacaaactagcacaagccattgtgttccttgccatagggaacccaaaaattgaaaacaaaaatcatctcgtgaatttgtaataaaagtaatctagtacacagcaaggactagtctgagttttgttaatttataattttcagagtggcttttgggctcaatattttgttttcttttttcatttcagtgataagtaattagactcagaaaagtcaaattatttacttgaggtcataagtcacagatattaaaaatcagagctagagctatatgttttaaatgataatgcaatgattttccttcctcagaattacaatagcaaagtttgagtgaaagtttaactacttagagatacattacacattagcagtgcaacttaattaaactctcaaaacaactgtgatggggctcatagattgtaatttgctggagcttcaaaaacagattgctttattttctgagtaatgtgttattctagagtattttaaaagaaatataatctgttcttaataattcttccagtcttatttatactgctaaaatgcttccgactctattttcctgatattttacaaagataaacacatacctagttcttttctgaaataacataaatcccaagatagtcaaatcataattaatgaagacacactgaatgccaatgtatgagtctttagtatgtgatgcttattattttaactggcctgcataaatcaacaatgaaaaatggaaatagtgataaatagcatgctaaacataacaaagatctgagtgactgctttgtcctcagagatcttcaaagatttgaacaaataaagtattcatccagtagttcttcaaataaaactaaaaaggaaaagaggtcagttcaatttctataagtaagatattggaattagttgaaacatgcttgtggtagccatcctctggggagaatagttgttaactcaatgaatcaagtcctgagatggagcgggagaaaaacaaaccaatcaaggctaatggttcctgatgaacccagattaaacacagagattggtctggcttaaatacactcaagggaacagtccttcagataagagtatcaattttcactctgggtcaatagaatgaagagtgtgcggttaaaaatcagatattgcaaatgtatacagcttgaataaggaggcctgctggggggaaaaacaaactttgcaatcagaagagactttgaaaa

SEQ ID NO: 27962 - DNA, 1300 bp, Bovine  19866881126425
  misc_feature (1)..(1): n is a, c, g, or t
ncctcataagctagcatggtgccccagaagagaatagtagccctgacagatatcctaataccttatcactgctgcatcattcatccatttaaaaatactgcttgttaaaatgtaagccatttaaaaaataattcaaataaagctcttctacctttgtttatcttttctaaatctgtccctaatatgttttcatgtgccggcattcatatttgtatcatctgttgtccaatattatcctggccaatgtgtttagtcaattctgttacatataatgaaatatctaaatgctaagcatttatgccagctagtaatagctaatctatttatttttcagcatctgcataaactctttcagagtgttgtcacttctctatttagctggaaagactgacaaacaaaatctgaaaaagactaatgtttgcagaacagagggtttcatacctcccatctccctggctgcatattttcaaattttatgcctcatctgctaaaatctctttcaacacaaaccccaactgtgcagctgtgtaaatcatgcattcccgtgaccaggtatgccaaggatgactgtggagatacccctgttaaagtaatcctcccactagaagagacactgataacattgatttttggatgtcaacaggctggatggcttagaagctaaatagtttaagatggttccagaatgttttcatttgaagcatgatgattataactgtgttgttataaagtttgggaaaactagaagcaccttctctgtgctaataattactggagagcattgttctttgcagactcgggaatccttaacatataggctgaacttgccctgctaaaatttttctgtttcccttctgctgatgctgaaaaaataataatacgaatcatagtttttcatctaataagcatcaattactcaacataatcaaaagaagacattcatcttttaatctatctctgtcatctgtcttgtatctatctatcatggagctaccctgaggccatcagtcattacacaagttggttgtttatttttttaacttagttttacagcatgactcttaagaaatggctaccttggatatgcctgtgatgaccacagtgaagtaaaataacactgccttgctgcctcgagaggaaatcactgacttttattatagtagtgtggtttatgctagtgttctctttcaatgaaggtctaatatgaaaaatggtgttagcggaatattttaaatcatcgtcacaaatcagtatatattattccatcagtttgatgtttagatgtataatacatattttc

SEQ ID NO: 27963 - DNA, 1953 bp, Bovine  19866881158066
  misc_feature (1)..(1): n is a, c, g, or t
naaataaatgtttcatgaaaagtacatagtgactttttaggcttccatctagtcaaagctatggtttttccagtagtcatgtatagatgtgagagttggactataaagaaagctgagcaccaagaattgatgcttttgaactatggtgttggagaagactcttgagagtcccttggactgcaaggagatgcaaccaaccagtccatcctaaaggagatcagtcctgaatatttattgaaaggattgatgctgaagctgaaactccaatactttggccacctgatgcgaaaaacttactcattggaaaagacccttatgctgggaagtattgaaggcaggaggagaaggggacgacagaggatgagatgatcagatgacatctccaatgcaatggacatgagtttgagtaggctctgggagttggtggtggacagggaagcctggcgtgctgcagttgcaaagagtcggacccagctgagccactgaactgaactgaggctttatataactgtgtccttctgtacgttatccatgaaggttctcttcatttgagataccttgaaatcagtgacattatcattttgaaataattttgttgatctgtagacaatgttcatgtgatatactaaacagcatgatatagaatttggtctaaacctgttcagcactgtatccaaaagtttgtagagacttagagctaaatttcatgtgccagtgaatctactaagtttaaatagacagcagctatttcagtgactttaatgagtgggtgtccatactgtcacgaatagtttcaaaaaaagttacaaaattacacctataaagatgtctgtcagtgaattatgaaatttagggtttgaaaaggaagtcaaatatattgattctcacattgaccagaaaataaaatgtatgttgctttactataagtgggagtaaaaaaaaaattaagacaagagagagaattttaggccttttaggtggcattccagaatatcctttgcatttcaaataaagtatgaaattaattgccccatgacaataatttacaaattatatttcatcaaataccttcctagaagttaaagcttgttattggcttcccaggtggcccagtggtaaagaatccatttgccaatgcagaaatcacaggaaactcaggttggatccctaggtcaggaagacctcctggagtaggaaatggaaacctactccagtattcttgcctggaaaattccgtggctagaggagcctgacaggtcacagtccctgggtttacagagttggacacaactaagcaactgagcactactgtcccccaacaccatgacactgaaagatccacttgtttatttgctatacacaagacagtgaagttggtttgcattttggagactcaatttgtcttcaaaattttaaaggggggttggggatggggaacacatgtatacctgtggtggattcattttgatatttggcaaaactaatacaattatgtaaagtttaaaaattaaataaaatttaaaaaaatgtaaagggacaatctactaacaaatcacagactgaatgctggtatttttcatgccttatctgattgaagcttcataataacttaaagccactaactgaaaccaaccattaaacaaactagaaaacgggttcagggaagagaaataatttgcctaaaattacatttcataaaggacttccctggtggctcagaggttaaaacttctgcctccaatgtaggagacctgggttcgatccctgggtgggggaagatcccctggagaaggaaatggcaacccactccagtactcttgcctggagaatcccatggatggaggagcctggtgggctacagtccatggggtctcaaagagtcaggcactactgagtgacttcactttcactttcacatttcataaaaatagcagggctggaatttttatctaa

SEQ ID NO: 27964 - DNA, 964 bp, Bovine  19866881199101
  misc_feature (1)..(1): n is a, c, g, or t
naggaatcaagaagacattttctttttaatcagtctaagatgattagtaactttgcttgtggaatgatcattttccaagtacagcaatgcaatggtgtagtaaaatagagggaaaagattaaggagtttaatttacttggcatgttataactatgtttattaaaacactaagaattacagcaaaactttattatttgttaatattacttttgcctcaatgggggttatattgagaaaataatattctagacataaaggccattgccaagccatattttttaaaaacatatttttctactttcttataaaataaccccctgggtacttataatgaaatctatttctttgttggaatgtaattattccccctccctcaataagctttccatctctggtttattgctgtaatgttgttcaaataaaaagacaggttcagaattctgatatattaatcagcatgccttatatcataaggaaaaggataaagggactgtgaattatttctcaacaaatgttttgtttgcataatggcacacttgggatcttctttctggttttatggttttatcatgaaattaattgaattcagtatatacatgcaaagaactgtattaaatgtggaaaatccatgttaaataaaaaatagcattccccaaaataaaactgaaagttttataaagaggtcagtgattttaacttactggttcttgtaactttggcttgttttagtagtcagagagtctttttcagaatcaataggtattctttgatttccaagaagaaagttgacagaaagttggttccaataggattgaaatatgcaaaacaaaaaccaataaaatatggacagctttctaagcatttctcatgacagtggtatattatgtaataataccttatgatggaaaccatctttgctatgagaaacatggtatatttagaaaggacaataatatatttatca

SEQ ID NO: 27965 - DNA, 1353 bp, Bovine  19866881334770
  misc_feature (1)..(1): n is a, c, g, or t
nttttaaggtatgaagtcttttaaaattgtatacaaagccacttcctgccccacaaggacctcgtggtgttagtgaatcaatgactcaggttattgtgttttgagctccttggcaaggttctaatatcccaaggtgttactctctgtgcaagatttcctgactccagttggttcgacagcagttacactgaatgccaatctctgagctgggacaggtagaaaactgggatttcctttgttcaaccaacctatgacctaaggcagtctggcacagaatggttttgtggatggatgagcatctgttattatttacaaggatgctacagagtactgtcatgctccttgcctacctcctgggactttcgtgaggtttatcatgattactccagcagtgcaccaaagacaagagctttagaagtataaaatatatttagtgttttctgatgactaacaacactttcagtttgccacttactttcgatttgtgattttcttcaaaatggaattcgtgctgaatatgctcagaaggcggaagctggtgaggcaaagtatctcgacattattttggtgatttttttttcataaaatttcacattgtttaaccataggtccacaagaagcttttatataatatcagtagatacactttcagtatggttcttcttaggatgttgtcacatcccctctattctctcttctcatctgcctgttcctgagtgagttctaatctacattcctggcttcagcggagctcaggtaagaatatgcaccatgatcttccactgctgccaatcaaagagtaaacactttttatttccaaagtaaaatttgtgtttcttctttctaactttgggattttgcagtttcacttaaacctttctttcacatccccaaggtccatttaattaccacgttgtgatactccatctactcatcaccgcagctatccattttgtcctctctatccacactgccaccaacctcggggatattgttaaaagcctcctaacacttctactggctcagtcgcacttacttctacaccctctggctgctgtcagcggaatctttttaatacaataacctcatcacgctgaacatccttcaatggttccccattgttttcatgcagaatctcttctgactcttctgtccattttcatctcttttaactcctaatactcactgtatgtgcccagtcataccaaagtacttacattttaaaaacagtcatgttctttcatgactctgcccttgggccaattgttctttctttctaaaatgactttccagccaccttgacttcttaaaaaaaatttttttttaggcttaacttgacttgcctttcaagat

SEQ ID NO: 27966 - DNA, 1524 bp, Bovine  19866881428802
  misc_feature (1)..(1): n is a, c, g, or t
ntgcttctgtttttctctagtatgtaaatagtcagagctgtagattgggaattgcttccttgtattgtgaaaactgactcattagaaaagaccctgatgctgggaaagattgagggcaggatgtgaaggggatgtcagaggatgagatggttgtatggcatcaccacctcgatggacatgagtttgagcaagctctgggagttggtgatagacagggaagcttggcatgctgtagtccatggggtcataaagagtcagacacgatgaacaactgaactgaactgactgtgaacaatctcaggggatatgtatgtaagaggatatacatgtctcaccccttgctaaattacagtgatcacctagcatctgttttccagttcttagcactctcttctaatggtaggcctcaagaatatttatttctgctatgctgctgctgctgctaagttgcttcagtcatgtccgactctgtgcgacccgctagatggcagcccaccaggctcccccatccctggaattcttaaggcacgaacatgggagtgggttgccatttccttctccaatgcatgaaagtaaaaagtgaaagtgaagttgctcagtcatgtccgactcttagtgaccccatggactgcagcctaccaggctcctccttccatgggattttccaagcaagagtactggagtgtgttgccattgtcttctccggatttcagctatggcatatgattaaattcgtgtttataagtcagataattatgcatgtattctaaggtatataacaatttaatattataatcagtgtctaatattgtgtactatctttcttaggcaatcttcaagcaaaaattgaacagactttaaagatgattgtttttagagttacatatacattaataataattcagttgtactaagcttagcactgtgaatgcatcccaggaaatggcagtgttagatgaatcagtgctatcacagtcaacttggcccagtccctttgggattgcatccccaacattatttatttaaattaattgatgtacaataagatgtttattggttgatagctttatatttctatatgctttagaattgttagaacaagttagaacagttttgctagggttgacctagattttgctagggtttttatatgatttccctcaatctgagaattcacttgctagtcacacagtaaaactggccttttaacataacccatactgcaaaccatgattactaattctttgtaaaataattagagtttcttcagataatagtatataatagcactaaaagaattttgggggtaaacaaaataaagagattagaaactgctgtgaaaatggaggaaagttcaggaaaggggccaaacatttattggaataagagtaaattctgccatactggctgatcagtgttgtgaagagccataaccacgttgctgtgctaaatccagtattgctgtggtcattcccactcagttctctaaaaagcctgttctcatccatttgctttctaagaccc

SEQ ID NO: 27967 - DNA, 791 bp, Bovine  19866881517498
  misc_feature (1)..(1): n is a, c, g, or t
naatacaggagcaaaaagtcagctactgttgaactttgctgcccgcctcaattgagtaactaagtttgcacactacctattgaccttgaggttcagaaatgtcaaagactgacttgatcaaagatggaataaactttcttatattctgacctccagcaatcactttgcttctttttagatttttagcatcatagtaaaatggtcgagtgtttcacatagctagcaagttctccatggtaattctcaggagcagatttagaaacagtggaaagctttcagcctcccctcttggcttgcaagaaattttgagggaattggaataactcctgccatccatcctcctctccttggaattgactgcacagcattctgagcctcacattcagttgggttcaatgcagagcattacaagagggttcacatgattttaggaattattactcatagctgggctgcttctaagccaacggaaggtgcatgctgtacttcatggagccaaaagttttcatcctaaagagcctgcctactccattcaattctaagcactactcagtgtttataaagagaagaaaaaaaggcataatgatgctttatgccctccacgtagagaccccatagaataagtaggtgtttaggctcattttaagatggcaaagaagtatctgtcaagtgttgattagtaaattaactttctctgatataagccaagacctgctaccacctttccctgtccaaaagcaaggagaaagtcagaaagccagacatgtgatatgagaaagctttacagaaat

SEQ ID NO: 27968 - DNA, 1608 bp, Bovine  19866881567456
  misc_feature (1)..(1): n is a, c, g, or t
nattgaggagatgtgaaaggaaactactcctgaggtagtaaggacagaggcaatacaattagttcaacagtaattaatcctgcctccaacttcttgtgaaggtttgctgagatttggagattgtttgctgaagctattagtctactctaataaggatatatgtatatacatgtgtgtgtgtgtgtgtatatatatatattttatatatatatatatataacaattgagcgtgcaggctttagcattagacagagaagagtctgaatcatggttccacagtttactaactgcaaaccattgggaaagttgtttgacacgttccttcctctattgaatgggaatattatcagaactacttcacaaggttgcatgaggattaaatatatcatgtaatgtttttagaatgataccaaaaacacactaagaacttaaaatggcagttattgtgctgttaatgaattaaatagctgaagatatacaattcatgaggtcactccccaaatccttacttcaatgaaatgacttatgataaaatttttatatgatagcaagagattaaagcagaccctactagtagtcaaataaatacagaaagggtagattatagtagtagaagaccacatgtcaatgttatatctgggagcttaataaactgcagagaaaaagtatacaaaagaaactccaagcttgttataaaaatgattaaggggagggaatgtcttagatttaaagccatagttgaaaagccactcaaaataaaaattataacatgtagcaaaaaatgtatcatgaaatttgaaaagaaatgtgtttggtcctagaattattttttactaactccaccaccccaccttgactacaatttgtttgggatcttcagtattaagaaaaatataagtgtgtgtagatgtccatagaattgctgaaaagtgaaagtgaatgtaaagatagagtgggtagtttatgacaggacacttaccctaaatcaagagtaaattaaacattattgtggaagtgcgaaatttccataataatttaacaaattaccaccagcataatttcatatgcattttaaaaagacatttatcatcaagttacaaacgccttatttcatttaattaaaacaaagctgaatgcattttgtgacagaaatttttaccaagaaacaatatattccaaaatcaaatttattatgttttaaaactagtgacctggttttaggcaaggagaaattaactcatttcattttatacttttctccaatttcaacttcattgttaaaacttgaaaaattatcaggaatttctacctcatggtgatgtatactttgagtagggcatttcacattttgtttgatttgcagatacatcaagaaaaaaaaaattgtcaaatgttgatttaaagtatctacttgccaattttggaaatggaactaacctaagcattagagaaaccaaaaaaataaatgtcattttagccataaatttccaagaatgtctcaattttatgaggttatttgttttgtttagttttgttttagtgagcccatttctcaacataaaagacaattagagcatcatcactttccttagcatcatcttatataga

SEQ ID NO: 27969 - DNA, 1487 bp, Bovine  19866881651228
  misc_feature (1)..(1): n is a, c, g, or t
ntttaactgtgaataattacacacttgaataagtatgtgattagcactatttgttgtggttgggactggagtgacgggacaagaatggagtgattgcattatttacagcttaattgtagacaagtaattacttatgtaagctgatggtgtggggtcagagaggaccggcagaagaatgcagccgatctgaaattcaacttcttaaaccagtcaccctgaccccctccccaccgccaaagctctccgagcttgataaagagaatcaactatgcatttcttgaatgaaatcctttagaatattaaacgccttgttcagtctaagcaaaagatcagcagagacattttttaaaaaaatctcagtttcgaaagtaataaatcacaaatgccacctagtggttcttggtatcggcggctgttttatctgctaagtgtagccgtagcccagttccgggcagttttctactggagtggggggtcttctagtcgtgggaactgaactgaatggagcagaactccaagtccatcccttcattcccagtttctctccttatccgcccccgcccccacacttctcattcacttcgccttaaaacctgcctacacagatcatcatagtctgaaatttgtccccactttacatcattgtaacttctctctacagtggaaatttgagtgcaaatcactttgcagtttttcctttccccaagccactaaaaaataaatgagagagccaacggttttcttgatttgagagtagactcatggttgtgtttccttacttcccacttctcattcaccaggtggttgaaagccactttcccaattactacactcttcgtttcaagtgttcacatctagatttgaatccggagggatcctgttgctaaaaactctcccggggaaagggcctgtttgataaatgcattaaaggggagtagcagagagaataatttttgtcaagccttgtttattttcacacactccctctccctgagcttcttctcatgatttcattagtaataaatagaaaagtcaattttccttaacaggtcaacattgtacaagtaaagttccttgaacagatcccagagactgttgctgtaaacccaacagtacaagttgagctgagagctgccctgctgtgtggctctgtgcaaatgctgtcttccacaatggacagggttgacattggagccgctgtttttcttgttgtaatacaaggaaaaactgtagtagtgactctcatgtcccagggtaccaacgcagcagtgctctttgtaggtggtggccactttccatttgagagagctacaatttcacacggagcttgtcatttcctatggtgggtccatttccctgtgtgcttatggtttcctttgtgagacacgctcctgcaggtggctcctcctgtctcacccagggagacgtctctccttcttgggattttacctgcaccctcttggatcctgtcacccctcaaaaatatg

SEQ ID NO: 27970 - DNA, 728 bp, Bovine  19866881850775
  misc_feature (1)..(1): n is a, c, g, or t
nctggcagagttggagcggaatataggcatcccagttcccctctgacagccttgagaggaaagggagttttcacagaggcttcaattctgtgaatagattaagtggaatgtgacagatggactgtgtttattgctgctcccatcaacatggacaattattgagatgttacatggtgtaaagtttaacatttacttgttgacatctatgtttttttactcattgtttattgtgcttcttggagaattctaaacattttataaatgatatcatttattttcctgaaaggttatctaatcaagcctcaccactaactggagatgaaaattgcaattaaaactttattttcaaagcaaattgttttctctcttttggtgacttgttttctggcaaccacatataggggtggaaaaaagtttgtatgtccccttgtggtttttgtttgggtcatgtcactccagcatgactttaaaaaccttcctcacccacagtggaagattctcatgtagtcagtgtgaatttgaatatattcatttctcttttgaaattacatcattagtttaaatgcctttgagcttgtttttctgtttcttggtttgtgtcttttttctaaacattcttttctttttacccttttctttttcttttatcctccatgctcttggccttaaaacaaaataactgcccctggagtcagactaattatccatctggctagagtctgtaaagt

SEQ ID NO: 27971 - DNA, 1405 bp, Bovine  19866880418543
  misc_feature (1)..(1): n is a, c, g, or t
ncaacatcagtccttccgatgaacacccaggactgatctcctttaggatggactggttggatctccttgcaggccaggggactctcaagagtcttctccaacaccacagttcaaaagcaccaatcctttggcgctcagctttcttcaccatccaacttgcacatccatacatgaccactggaaaaaccatagccttgactagatggatctttgttggcaaagtaacatctctgctttttaatatgctgtctaggtttgttataactttccttccaaggagcaagcatcttttaatttcatggctgcaatcaccatctgcagtgattctgaagcccagaaaaataaagtcagccactgtttccactgtttccccatctatttgcttttagggttacctaaaaagtcattgtcatatccaaggtcatctagaatttcactttttctgtcttctaggagttttataattctgcactttccatttatatctatggtccatttttaaaatcacattgattttttttaatgatttaccatcaaattgtctttaaaagacaaaactggtattaaaaaccagagtcctatatttcagttataagttatcaaactccagtgagcttttgactaacaatcagaagttggtgcattcttcgatttatgttccaatttccaaacctaagctttatttttctttaaattcacttttctgtcttaattgccagaggttagcttgtgaaaataaataaaatgttctcccttggattaaagtgcgagctgttacattcacacacaagtttctgtcaagaatagtcacagccatcaagctcagaggtgagtcatgcttggtttgatgtgtaagtacaagaaaattcaactatttaccaagtaataatactactggcttacttttatatttttcaaagaagttttacatccattgttttatttggtcttcaaattaatcccaagaggatgttatcattgccatcattttacaggtgaggaactgagatgacagtgctcgtggtcacaacatgagtaagtgcagagatgagcttagagcaagactgcctgttatgaccccggggatgacggtgatgatgacggctgaagtctgctgagtgcaccctctgtgctgagcagctcagctgcctatcacagttaacaaggaccaggtggtttgtcttttttagttgccctgaacccatataacaactgtgattatctgccactcatactgttgaaccaggcttagccaagcacctctgagtcctgtgataaaaagctacaaagagctcatgagtgggaaacaggaaagtaacgggagtgaggttggcattgctgctacaatctatctggactgccctctgcctgaggagatatagcaggtttctttcaaaggagcaca

SEQ ID NO: 27972 - DNA, 725 bp, Bovine  19866880564282
  misc_feature (1)..(1): n is a, c, g, or t
naccttttttgtatagttcttctgtgtattcttgcccctcttcatgacatcttttgtttctgttaggtctgcaccatctctgtagtcacaggtgggtgagggaactgagcctcaggtaggtctgcacagtgcctggggctcccagcaggttgaggtgagaggatcctccataaggcctgaagggtctctctctgacctggggcacctacaggcccgtttccaagggctgtccttgctggaaggccacggaaagcaaaggcttccaaagagggaatgttctagtaggggtatggggtgcagagagatgagcctcccaccccagggtatgaaggggcagctccgtggccttaatcatgaggaattgggtgctgctgggcggtagacaaagctccaccagggagctagaaggtttcagcgcagcctgtgacctggactagcaatttaacctctgtcatcagaacgtcagaatagctttctcactgggttgctgtggggctaagaggagattacaaataatggttgccaatatttgttttattgattactggctaggaaccaggcaggaagtcccagtcagatggaacatctgctccttaagaaaaatggtgttttaatgcctgtggactgggctctgaacctcctcctcaggaggaggctgaggaggctcagcaggaaccggggagacccagacatcctgggacccagctcctgctgcccacacatac

SEQ ID NO: 27973 - DNA, 761 bp, Bovine  19866880591927
  misc_feature (1)..(1): n is a, c, g, or t
ngttgcaggaacagctataaatctgagggtgtgctgcctgtctcggcggggggagaggttagggcgtagagtgatgggagttcttcgtagtgattggcaaagagcctttattcgtgccatttttggatttttcctttgccatggcaattctctggagagttaaagccattttgcaagatctgaagggttggaataaaccattcccctcttcctcgagtgtcctttctgcagcagccttgggtggggagaagcgagaggtccgactgcctcctagggggtgggggtggtctgtaggccatgccagcacagggaagcaagcaacggctgccccatcgggcagagatgctccaactcaccacacgtccaggcatcccaatggcacctttgtccccctgatgaaggaggcagaaacaattagaagtggccagagccaggccagcatgtgaggggccccatggctagcgacacacccaagatctggtttgcctgggtgcttgggacgattcccaggcatcgtgggtgaacttgccccttgagccccacagactggtcgcatccttgtcacgctcagcttcaaggcagggagagtgaatggcagctcccatctgacagaagggtgaatcattacccttgctctgtctctgtcagagctggggaacagtgctcatggtccccagctcctccccaagccctgtgtctgcaaagactaccaatacagtcccgcccctcctcgccaccaacccggcaccaacagtgcgcca

SEQ ID NO: 27974 - DNA, 1496 bp, Bovine  19866880607285
  misc_feature (1)..(1): n is a, c, g, or t
nattttaaaacatttttttggttttgttttcctcctttgtgtttataaggaaagctacataaacaatcccagaaagaggccaccagctccaaccagctgcttgggttcagggtcaaagtcattatttttgggaaatgggtctttcctctacccctgcctccatctagagtagaggccccactgtttagcataactcggggggcacgcatgcagggctgtgccctgtctactcactgtgcccctatgtccccagaaccacccaacacccattttgccactaggaaactcacttgcccgagaccacatgactggccagtagttggcagatctgagattgagatctacgctgtatagagtttaaatccttgccacaatgctaagggggcctcctaaaatgaagatggactgcagtgagaaggaggtggtgggggatatgggagagaccagtggggacagcagggctgtgacttccttctaaagaagggcccccagggtggaaacccacccccattcacattctgggaatactgtgcagtgtgtatacacattcctgcaaactcacacgcatgcacgtgagcacacacaccatcccctcagaagcacccacacatgcccactcacacagaaatcagccccaccacagcagtgcaggggctgctggaccaggccagctcctaggacacgttcttcccccacagacctcaagagtacagacccagggacccgctctcccacaggcagcacatagaggccaggaagctgctcgcttggccttcactttggcagttcctctcttctccttctcgtgccactgccctctgaccatttgcaagtcagagaacagaggccaaattgggaaagtgacttacctgggtctgtggtaggcccctgcccactcaaatgctttctgcagtcatttttcaaaacgttctagcttgggagtcctccttggcctagttgacaaggattaagagatttcctggcagtaggggtgagttggggcccctgaatgtttgctgaaggagtgagtaaatgaatggatgaatgaatgaaaaaattagtgaatggatacctgaatgaatggatggataggtggatggataaatgaatgaagtgagtgaatatggaggaaaggaaaaaagaaataaatggatgaatgaatgaatggatggatggatagatgaaaggataaatggatgggtgaatgaatgaatggatggatggatgggtgaacaaatggagtgaatgaatagaggaaggaagaaggagaagagtgaatgagtaagtaacacagccgggtcatccagggcttacaattcattcaactggaaatagcagacacaaaactatactttatcctcacagagtctgcattttcatggggaaatctgaaaaattttggaaaatgtacataaggtaagcattagtccctcagctgtgtccaactctttgcgaccccaggactgtagttcaccaggctcctctgtccatgggat

SEQ ID NO: 27975 - DNA, 1438 bp, Bovine  19866880691004
  misc_feature (1)..(1): n is a, c, g, or t
nctggagaaggaatggcaacccactccagtattcttgcctggagaatcccatggacggagaggcctgataggctacagtccatggggtcgcaaagagtcggacacgactgagcgacttcacttcactagggtatgaacttgggtttggttaccagagtattacgaactttgattctctcatttgtaaactgaggataacaatagtataggcttcacagggctgtgacgagggtcaaatgagatgaggcgtgcaaagtactcaatgaacaggaacttaagtactcaatgaatattagctgttcttctagaaaacaggttatcccaggggcactgtgacataacgctgaggcttacggaaatccatcttaggtcgagggctctcaggtcaactcttccttccgagaacctacctacccgctggtcgccacttctgactttccccgagcgtctagaaaaacatgcactcgtatctgaagccgcgagatcgagcgcctagtttcgctgctagactccagaaccctactccacccattgggctgcagcgctgccacgtctcgcgcatcccgagctccctacgagaggtagagcccgccccagagcgattcgtcacgccgaggcccgcccctccgcggccccagtcactggtagggcggcaccggatggccacgcgccgtgacgctacgaaggggtggggacgagcacgcgcccggaagttccggggaggggggtgttacgtatatccggcgagtagctggcggtcccgggtgctgctgggctctgtactctgagggagggtccaagccgcttgctgccgccggaggaaccccttgggccgtgagtcagggggcctcggcgaaggaggaagctggggccggaggcgcgaaggtggcgggcagggagggtctgggtggaggccggcgcaggcgaggttgggggaggaagtgacacgcaggcggttctgtggggccgcggggcttgttctgggcggggacgggccggcttggccgggtctgcttggttccctgctggcctcaacgggtatcgggtccatccgcatttcactcgggggtcttggcagctgttgggcaggataccagttttcctgtctttactgtgcgtccgggtttacgaatcggcttcacatcccctgtgtcggatgattctcagccctcggtggggtggattgaagtcttgataattatcctttttttttttttttttacagagattaaggcctgtagaggcatagtgaattgctcaaaaccccgcagatagcaagtgtgaccgttcgaactagatatcctggctcctagtcgagggccctccccacccccacttcagccacacttgtattatcatctgctgtcctgggttgaaccccgtgttttcttcttccgccaccctccttttccctctcttcagtgcatgggaaaaaaat

SEQ ID NO: 27976 - DNA, 1637 bp, Bovine  19866880725319
  misc_feature (1)..(1): n is a, c, g, or t
nttgaatgacgagtctggcaggtctctgtgaggaggtatagaatccatatgactttatccttaaagcaactgagatttcctacatctggataaacgtcatcatctggcttaaacggcctcttatgaacactatgagactagctaatgataactgattttgaaacatggtttagaattccttgtagaagaagtatggtataaattaacctcaagaagcataaagatgtcatctgtccaggaacatggaaattccatacactgggtttgctgatgccctaaaaaccatttttaaatgttctcaaatgcatgcagtgagtggaatgtttaacgggcaccctggttttgggactgttcctttttggacccatgtcttgctgcctcatctgcaggaaggcctggaagggaaatcgtgcatgctttatcccacggcagaaaatggagcccacgtacaactctgccctgaggccctggaaccccgggaaagcttaccttgttccagcagccctggactggcaagccatcttcaccctgcagtgaggaagaaaggcagacggctcagactcaccgggatggcccaacaagcagcaggataaggggaacaagggcgcggcccacctgatattgtctgtttctcttctctaccccagggcctagcctcggaaggaggcaggaagcaagcccgcctgtctgcttgcaggccgagctcacatgtagtgacagctcaaagctgagatgggctgtcctatcgcctgtgggcccgtgagcagaggcgacctgagcgtggtggagaggacagtccggaggcctgctggtctcctctctggctgtactgggtgtgcagtgcctgtgggcaagccactcagcacctggaggcttcagtttcctcctccataaaacctggggaaggtgcggctctatggaacgaacacaccccactctctcattctctgatttctctctcttccttagcagctgggggcggacatccaggcagctcccatctgttgatcaataaggaggaggagggttgatttcgcaggctttcaccgtggggctgaggtgccttcagcaaggaggcggggctcccggcacagcctttgctgtctcttgggacttggggggctgcgcagtggtaggatgagaacccaccaggggccacttgtcccctctgctggtgcacccgctgagcacctgaagcctcaggacatcctgagtctcctccgcccccggctgtcctggctgctctggtgcgccctgggggaaactggaaacccctgaggagcaggcagggaggatgaggctgaaccagggcagcgatctggttctcagtctgagtctattagaactgcagcccaggttctagaactccaggttccagggcagagaaggagatgcacacagggtttcaggagacccgagcaagtggtcagcccccgaggggctggaatgggagccccctatgcctgaacctactcatccacccatgacaggcgcggaaactgctcacctggagcccagcagacagctggccctgcacgggtgctgaagaagtctagttaccttgtactaaaaatcctgatcaatagcgccgcctctcccccacccccgcccctgccgcccactgccccacgcccaca

SEQ ID NO: 27977 - DNA, 1360 bp, Bovine  19866880737215
  misc_feature (1)..(1): n is a, c, g, or t
ntaataccagaacatgttcatcactactctcccctaaaaaagactccatatccattagcattcgtttctcattccttcttccctccaacccctgtaatcattaatctttctgtcgctatagatgtgcctattccataccttttgcttccagtttcttttgcctagcatgatattttcaatattcatccaagctgtaacttgtatcagtatttcattttttttatggctgagtaatattctattgtatggagatagcacactatgtttatcctttggtccactgacgggacatctgggttgtttcccccttttggctaaagtgaatgatgttgctatgaatgtataactctgcatgaacaaaaaaattctgttgagtatatacctgtgagtggaattgctgggtcccatggtaactctagacttcactttttgaggaactgcaaacccaccatctgattttactaatcatcaagccaagagaatgagcacagaggatcttaacggaatcttcccagatgcagaaatgtcagcataaaagaaggtccaagagaacagatgctccctgtccagcagctcctaagaaatgctgtctttgccccttccccaacacgcacacagtgtggtttatactcagattttctcagtaaatcctgtttcctctgccaaggacactcagcctgatcccaacgggactcttctgcaataaaacaaagggcttttaggaatcaactgaaaaacaaggaagttacgttttggccaaagctgtgaagaggtcacgcctcagaagacacacagcgggaaccatgtgggctctgatcaaagggtggatatcaccccagaattgtttcatagagattacaaataaaacccaccgctttcgaaagctcactggttatgcccaaggtagattccatagccatttccagagtggctgacctggatgagagggcctagcgtgcgtgtgtgcgtgcgtgctaagttgcttcagtcatgtctgactctttgagactccattgactgtagcctgccaagctcctctgtccagggagttctccaggcaataatactggagtgggttgccatttccttctccaggggatcttcctgacccagggatcgaacctgcatctcctgcattgcaggtggattctttaccactgagccactggggaagatctgaaagggcctagagagtgactcaaaacaccataaacatacccctccccacgggggaaggcaaaggggtgaatggcctcccttgctggacaccagggcccaggctgagagtgggcactccacagtcagctcctcaggaaacagatgcagaacaaaccccaaaagacaagtttccaaaagggac

SEQ ID NO: 27978 - DNA, 1842 bp, Bovine  19866880739263
  misc_feature (1)..(1): n is a, c, g, or t
ncagctagttggaactttcagacactgcaataccctgaccttcctaaacttcactcttcctccttaatttcagggtcctgctggaagacccggcctccccgtaagtacctttcgtttctttttccctttgcctttctctcacaggctgttcctcacttcaaggacaggagagggtgggtggccactttccaccaggtgtgtctggatgggaggcctctcttcagcatctctcacctacggctgagggtgaagcacctgggtacctttcctggggtcccaggcaggccaatgacagcatgcagcccctgcagggctgcacctgacttcagactgatggcccgtaaaggggggctggatgggaaggcagccccctggcttactggttatcctgcctaccagcgtcgttaaaggccactgtccctgctttgtcccctggtaagagtagactcaaacactttatttccccctcgagttaccatttctgagtgctagagaagctgggtccagtaaccacgggggctttgggacaaaagtagaaatagtactcataaccatctctcactgagaccttaatacatgccaggcaccaagctaaatgctctttatacatttgattcgttcaccaactcaataaaaggggtactattacgcccattttatagatgaggaaatagagagggaaaacagctggtccgattgtccaagcctcatttgtagacctgttgaaggccccatgttatcacacagcatcccacactgctattttctgtgatccatactgggtatatgagacccatctttaaagtcttcaaagacattgccctgtagagtgtagcctggggcatcgatgcatggagtactggataccatgggctctcagatggctgttggctcaggagagatgctctagccagccagagggccaaggtgggcatttagggggagccagggctggcaccaggctgccctctctccctgccccgaaggccacatcaattggattccagagcctcctgtgcatctttctatcccagttactcctcttttcaatgtgaattgtactataacctcttgactacaccagtaacttctagaattcaaatctagcaaggactctcttaatgaaatacatgtgggagaatgtttagctttgaaaatgaaaactgtcccagcaagtatgaaccctggagcaaagaaggacagggcaatctgtcccatgaaatccaaggagggggaaaagtcagatgactgggggaacgtgggcagactttgtttttttttttctgacaacgtccacctttaaaaagcatttgggggcaattcgcagagcaggggccgccacacaagaatttccagtctccggccactccatgcccgtccctaaaccaagcattttatggccaggactgcaaagaccattagtttaaaaaaaaaaaaaaagaaatgaaaccaaaacacacatcctgcaagatcattcaaaagcacaagagcaagtgagccattgggatgtcacaagcgatgaccagtgggcctggcatcctcagtgggaagggtcacagctactctgggagtgaccaacaaaaagatctgctgatgcttgttgtgaagtgcaaaagtgtgaagtacacacatgtttataacagtcgcttccccggaaccttgctgggctcagtacctgtagacgaagtctgcacggcactcaccaggtgacaggcacccagagttagattcccagagccatcgtctcttgacatcctctcagggagcttcagggagctcatggatcgtggttatgatccatgctcataacccttgctgcaaccctgccactctttcccaaag

SEQ ID NO: 27979 - DNA, 1275 bp, Bovine  19866880745101
  misc_feature (1)..(1): n is a, c, g, or t
naattatacaagacaattcaagccaaccaaatgatgccaagtcaaccaaacgacgccaattcaagaggaaagaaggattctgcagttcatatcaactccccaggaaatcagaggtaacaaattaaaaggttctgaataagtacagctttgagaatgccaccggagaacacatgccaattagaggtctctcctgtaacgataccgcataattggcctcgggctgtttgctccactgcctccagtcagagcccagctcaggcaggttactcagaagcaacacacagattagattttctgccagagtccaagtgtcaggacagaactgtagcaatttcctggtagaagtacaatgaatttatctatttctgatagtctagcatagaaaaaaagtaagactcagcacacataaggatgagatttcatctttattattctagacaaacactggaatgtgatatcacaggtattatgtattaacatctaaaagatttgcactcactgtgggtcaagcttcctggctgaatgaaaaacaaaaacctcaaaggtataaaaaagaatcagacatttgtccttgtgtcagttcctaaatatgtataaacttttcctactgggagggagcataaaacaagaaatggctttaaaaaaaaaactatttaaatttgcacaaataatacatgttctttgcaaaaagattaggaaagataaaaaggcaaaaatgaaaataaaaactaaaagaattaccagcaattctggtggtttttttttttttaacccaggcagctttaatacatttgtttctgttcctctactccttctccaaattatagctgcttcttctaaccaaaaaatctgaattgaagacagtctcctttttagtcaatgcacctttaacttgtagaacaatgaggcattttaagcacttgttaagacatataagaaaatccacatgtcaaactgagctgagcaaagagactatggtcagagaatgaagtcttaccttatctgcataaattggaatatcatgaaatggagagatatattgtcctttttcattttctgcaaaatcaattagaaaatattactcttatttgttaattacatttccagatgcatgaagtacacgtttttcaagactttttttaagaagaacgtttagatttacaacaaagttgagaaaaaggtatagagatatcccacataccctctcctccccatatcaacaccactcgccagattttattcccaccccagaaaaactggctttatacttgactg

SEQ ID NO: 27980 - DNA, 2410 bp, Bovine  19866880748906
  misc_feature (1)..(1): n is a, c, g, or t
naatgaggcagagagaaaagctctactggggtgagcccatgccaaggcttggctgccaagggaacctatcagccaattcagcataaaaggaatgattcagcttcctttacagggatgttaaattatttacctgatttctctatcgcacaactgaatacaaatatttcccttcctttctgcatctaaggattgaagatttgagattaagcccttcctgcgtgtatgtgcgctaacacatgtgctaacacaacacttgagttgtgtctgactcttcatgactccatagaccatagcccaccaacctgctctgtccctgggattctccaggcaagaatactggagtgggttgtcatgctctcctccaggggatcttcccaacccagggtcttccttccacaggaaatttggcttgtaagaactccacaggagagggtaatggatagtccaaaggagtgattgtctaatagtgaaattttgttaaacatagccactaggggagaagggattatcagacatccacatctgtagttactctcttcatggatgcttaagtcccatcctgattatcatggcctagaaaagttttccagcagtttctcagacccatgccatgctcttttcacattttctcttactaagccatgattctttgcttctagaaacataatacctcttccgagagaagtactatggaaacctcaccacaaatacactcttgtccctgattgtacccaattaaaggaagacgttggtggaaaaatgattttaaggaaacacagctttattatttttaagttaatccacttgctcaagtgaactaaccattaagcattccacagagctggtctgtaggggacctgctgtaatggatttactggatgatccattagttattaaacatttattgcacaaccgccatgggccaagggctggggattaaaagctgagtaaatcccagcgtctgccctccaggagcgcagtctggagggggagacagacatataaccatgattttaaagaggagtggattggaaaagaccctgatgctggggaagactgaaggcaaagggcgggagaggatgagatggttagatagcatcaccaactcaaaggacatgaatctgagcaaactcagggagatagtgaaggacagggaagtcgcagacatgactgagcgcctgaacaacaaaggtgtgatgagagtgatgtgtatggagactgctggagcacagaacagggcaactgtagaagggtggagactggggttactagggaagatttctagagggaggaaaagcggacttcctacttgggtaggatgaatagatcttgcggtggtaaagttggggggtgagatagagctttcaggggacttctcaggtggggcacagcatgtacagagtctcacaagggagaaaaagtgggatgactagagacactgaccacaaattggtgttcctgggatgtagcatgacgttgcgggggaggtagtaagacctgggtctagagtcgtcagcagaagccagatcctagaagcccaaaatccttggtaagggtttgagcttcatcatacaaacaagggttgggggacattcaaaagttctgagcatggaaatgatacaaacaaatctgtgtttcagagagaaagagacagcatggaggatgcgctggaagcagtgggattggcggggacagactggaaaggaagtggcagggcctctccctggtagcaggaggaggaatggaggggaggagatgtttctgagaaacgcttagggacagaattagtaggacctggtgatttatggatataaaagaaaagagggagaaggaaaatggcagaatcacagatttacagcttgggttacaaagcacacagtggtcccttcaactgaaattgagaattccgagggaaagcagtttagaaggagaaaaaacaggatcaatgtttgatgtggagtttgaggaacgtgtgggtgggacaccagtggagagacagcaggcagcttgcccctgtggaggaagatctgggctggaggcaaagatctgacaggcatgcacattagaaaccacagacgggggatgggatcatcgtgtgctcatcaggacactctaggcttcaaggaacagaacagacacttgaaagtggctgcaacaaacaagggcatttcacttaatttcgttatttcacttaataagtttaggaggtcggtcttgggcttcttctcaatatgtcatcaaggatccagaactttgcatattttagctctgccaactttgtccatccataaccgtgtgtcccacagtaacgtgaagatagatgaggttcccaaaggacttggaatccgagggaaagagggtagaaaacactctctctcaatttgttcattgtagatgaacaaatgtgaca

SEQ ID NO: 27981 - DNA, 2715 bp, Bovine  19866880752143
  misc_feature (1)..(1): n is a, c, g, or t
ntgcccagagttgcttgcgggtatgttccagggctaacaccaaatcttttgagtcccgagttcatgatttttactgttactcattattttgcttcctcccagtgctaaaggttgggagagctagcctgtcattttgtttctcttgtatccaggagtgccataatctcggcacgtgtggtgtttgccacccaggagacgtctcccttatgacatagcagttgtgaggactggaggaggacctagatggtgtccctgtacctgtgcctgctgagcatttccatgaaggtaatgaacaaagggtccctttggtcaggaaaggaccttggaaaatcagtgttgggcacatcaagcctacagatcaggggccagcccctcagatcagcttccttccccacccttgctggagtaacgagtcaagctggcacctcgttgcatcctggttacagtgctttggctggagttgctcttagaggcctccctgctgtgctcagcatgcccacggtgctggggggcaggtggaattcccagcggaagataaagcatgtctttttcctgaggccctgcagcagtgtagtgtgggaggtgctgaaccttgaggactccttataacactgcaggctggtctgcgaggctccagtggcatgattggagtaaaaggccttgtgatgctgccacagaagtaccagatgttttggtttgtggatgtgatttgttattacgtaacaaggattatgagctcactgcattggcgtctcttctgccacttactagccctgaatccttggacaggcaacttcatattctttgtctcagtttccacatttgtaaaatggggataatgctacttacccctaggtcttgtgaggactgggtgaaatattgcctgtaaagcacttggtgaaggaaggtgatgcccattttgtagttattgtcagggttttattttcaccaatagactttttagtcctaggagttgggtgttaattccacaaacatgtattgagcacctggctagatgctaggaatcctaaaaagtgactacccagtccagaaggggaatgagggctgaagagaaatgatggagcagatacagtggaggtcctgacctctttctgtaggggcctggggaaagttctcatggaggcaacaggcatctgagcagaaactagaaaggcagacagggtttggaaattcggagaggattggtgggggttggggggggcttggtgagggtgtgagtcctgccagacggaggaggctccccagcttaaccctccttccttccctggcaggtgaggctgtcagtgtagtgggcttcggcgtcttcggccaggcttgcgggccctcggtgacctcaggcatcctgtcggctgtggtgcgggtggatgacacgctggtgatgctgcagaccacgtgtgccgtgcatggtggctccagcgggggcccgctcttctctgcctgctccgggcacctcctgggtaaccagccccttggccctctcccggccttcccctggccagagcctcagtcccacccacgagtgcccagtgaccagccctagcagccaccctgtctggaaggatgatgggccttatgcccagggctaattagccaaggttttttggactgtggtgcttctgaggtcggagaggatggatgctgggcttggagggaagagatctgagttctagtcctttctctgccactaaggcactccacgacctcaggtaagtcacttaatatcatttgatctgtgaaactcagtagttggatgagtccaagggtcacaaactcaaaagcccaacctaccagttgggcaagtaaagtgaatgagtgaatgaatgagtgagtgagtgagtgagtgcatatcttcagtgagtggaggacaaaggagaaacggggtgaacaccactcaactccagcacattcttgcctcattacaaagatatgtgggcctaacactggctgactttacagtttttcacaaagtgtgaactcttttttttttttttaataaatatgtgtttgttaaatctttcaatttaaaatttttgttaagttttttaaaaaaaaaatctgtttaaaaaaaagccaaccatgagtccatatggatacctccacctacagtccagcacacagggttcatgcaagccttccccttcccttacttctgactgctttctcccatagtgagaaacgttgcctttttgttgctagctgcagtagatttacttatttcttcaactgtagtgtacaaaaaaagtactttcagaattcctaaccacatccctgtgagaaacatttaccaactagaagacaatatttgagcgagtaccattctttagccttaaagtgtccagtcaaaaagctgttttccaaagtttcttagattagctccttccccttcagaatggttatgtgattcatttgaaatacagttaggtacattcatcctagtccgaattccatctttctcccatatactggttgaccttctaaaagatgtgtacagataaatggatacagagataaatataaatgtgtgtatgcatgagtttgtgtgtgtgtgtatatacatatgtctcttatcttcgtctgctgagaggggctagaagccagtgacactccagttgcaatgagcatgccgagagtccagatcttggtttctaagagtcattctctaataaaaagaaccaggaactgactgattccagg

SEQ ID NO: 27982 - DNA, 1620 bp, Bovine  19866880799198
  misc_feature (1)..(1): n is a, c, g, or t
nagctggaaacttctgggtcttgtaaaaggcttcgtttatcttttttagttctctttggcccagggagacgacaggagactgttttactttctttcttttttttaaggaaaattttccattatggaagtggcacgtgtttatttttagaaatccagccactgggatctataacttctgtgggaaggaggcggcggcgcaggggccaatgctgaccctcctatattaaagatgggtctgagtttctttagtaccctgggttcctccctcctaggcctctttcattttgtcagcagagcaggaatcttgctcatagacaagaaagagaatgacaaagattgaagtccagggattacaatagcgatagcatcaaaaaaactggctgacattcattgaacgcttactgtatgccaggcactgggctatgtgcttcataccttgaataattcattccccataacactgagaaataggaactattacctgtactttacatgggagaaaaaatctagtctcagagaagtagtaaccagcacagaatggtgaagtaagaatcacacacaggtttgtctgaccccaacactactctgacagtctgtctgaacaaaagcagagggctgcatgctcactactacaggtaagggctctctgttggggaaaaggagttgaaccccaaggaagaggcaggcagctccaaataacccagctcacctcgatcagggctccaccctcaatgggggtggcaggaccaggcagctccctaaaacacgtggcttcttccatgggacccccagaagttcactgcctctccaactggccccaggccctccttctggaaaacgctttcatgagtagaaggggatggaagaggaggagttcagggaaaggactggatcagaggcattgctgaggatggagttcaccctgatcacacttcccattgtgctatgataagttagagggtgggacctggtgccaggctgcctggcttcccactctgactaccgtgggaggttttttggccgtactttgaggcttatgggattttggttcctcaaccagggattgaacccaagccgtagtaagagcaggcagtcttaactactggactgccaggaaattcctccaccctgcctttgtaatggtgcaactttgggtgagtcatataacctcttctctctgagttttcttctttgtttaatggggagtaggaatacctgggcttccttggtagctcagctggtaaaaaatctgcccacaatgcaagagaccccagttcaattcctgggtcaggaagatccactggagaagggataggctacccactccagtgttcttgggcttccctggtggctcagctggtaaaaaatccatctgcaatgagggatacctgggtttgatccctgggttgggaagcccctggagaagggaacagataccactccagtattctagcctggagaattccatcgactgtatagagtcagacacaactgagtgactttcactttcacccaaatatttaaagatataattcaagaaaactgctctgaagtcaaagaaaacttgtatctatgtaagaacaaaccacattccaggaaaacagattcagaagagctaat

SEQ ID NO: 27983 - DNA, 996 bp, Bovine  19866880801508
  misc_feature (1)..(1): n is a, c, g, or t
nccagggtgtaacaagtcaggctgggtgagagtggagttggggatccagctgatgggcagggcaaggcagctggcaccttccattcatctggaagtgggtaggaaagcagggtgtttctcgggtaggggggctgttgcctttctgaggggtctgcaggcctgagcggggtggcaggcctcccaacctatgagatagatgatcgaggtggtctgagcctctgtgccagcctgcagcatccccagggagagaggggtaggccgggtggacagggggtgtctggggtgccctgggactgggagctggtatctgagcctggcactcactcttcctgttgccctgtctcccctcaaccccctacccttaaccccaccccaggagcacctaagtggctctctagcagctctgcgctccaaccagataattattctgaaggtttgtaggttctggaaggtctctgggcccctctggtgacaggctccatggacacagagcccaatattgcacatccccaggccccagtgagaaggctggggctccttgcgaagcagctacccaccaaggtggcagtgacccagaaaggccgtgactgggctcccgggtccctggctgggtgcatcctcagcccaagcagcccttgcttcctaatgctcctcccagccaccttgtgcgagctacaatgctttcagaaacaagaggtggattatatgccctctgttttcacatgggttctaacctcttcctaaagctgtgggtgctcaactccactggatagagaggctggaaacagacagaatttccagaaatgaaaattgcgttagctaacatgattgcctctccccaccccacccccacaaaaaagtgcttgaacatgccagagacgtctttgtccagcctcgatgttccaagcccctgggtgagacctcagtaacacttagctggtgcccacactggtcacaccctcctgctcagcccccaggatccgggctcggctctgc

SEQ ID NO: 27984 - DNA, 1956 bp, Bovine  19866880818692
  misc_feature (1)..(1): n is a, c, g, or t
ntttgaagtatacccttcccagtcttttttctctttaaagttgctatcatagtcttttgtatactttttctcttattgttttcattttgctttaaaatgctctcccaaacattgtggaaccgtggtgcaataaccctagttgacttgatagaacaggaaacccctggtgctgctcacggagaggacttggctgcggctggttaaaatgtccctgtgggcgaggactttggtgttttctcctggaggcaccattcctcctaggataaacatgattcctcagcgttcttcaagcactggctggagtcctggagatctgtccctcatgttttcattgctcagaggccttcacccatgaaacaggagcatgggtttcattcactcttcagtctcaattgctctttttctcccctgaaccttaaacctcgacaaagtccttctttcttttttttaacaatttaaattttttctagaagattatataacttaatttcaatatacggtcattagaagaaacagaaacaatagagaggaataacagtgtatacatcaccaaattgggccgacaacctacgtccacacttgaatgacactgggaagtcctaagtaaaagcaatctggagccccagctgggaaaagggtccaaggtggtgcatccgcaccatggatgagacttcaaatcgcagttctgcttataagcagcctgcaaactgatactattaaccgtttttcacatgaaaatgcagctctggttttcctttaacttttacatgctattcatttcaacttgtgaatcttaagattccttagaccctgggggactagcgaggtctccaggggcttaagaaagtccaagacccactccttttcttatctaaagtgccacttgacttgctggtaaccaccagcaagtggcaagacactacatgtcttgcaagcagacatgtagttctgccaaggtcagaagtcagtcagaggcctgctcccctaattttgaatctcgaacaagactacctccattttaatttccctaacagttctttcctgttttgctagttcatcttgagtcacaggtgtgtacgatctagaggtcagcaggaaaagtcagaacatcttgactgaaggcagacaacggctgtggggcaaaggccttttttcttacaggcaggcccagaagacaggatctagtgattctctcaaccaggcaccttcgttacttttgcttcccctatggggaaaaataaggaagagagcctctctcccacacactgatgccctctgggacttgtgttccaacaggacttagatgtggacatcctggctttggtcaacgacaccgtggggaccatgatgacgtgtgcctatgacgatccctactgcgaagttggtgtcatcattggtaactcaatttgccttgctctttggaggtgggttgaaaggggctggtttggggcttagtttcaggaaactctgagtaaattctgtgggaagagtattggtggtttctacttagaagaagcaacatagggagatagaaaattaatacacgcattcattcaacaagtgtttactgagttaccattgtgtgctaggccttgggctctgtgttggattctcgatggtgagagtcccaaagattcctgtactcctgaaattttcagtgcagaggtgggtgagagaccaaaatggcctaaacaaatcacatttcaggtggttagtgtgatgaggaatataaaccagggtgatgtgactgagagggagggcagtggggttgtgaggtgagacctcactgaggactgacatttgagcagggacctccgtgatgaggaggagggagcaaagcagagatggagaggaagcgaatcctgtggcctgtgagaggggaatgagtctgggctgcttgaggagccctaaaaggctgaatggttgtaatcaaagcgagtgaggccattcgggtag

SEQ ID NO: 27985 - DNA, 1459 bp, Bovine  19866880849747
  misc_feature (1)..(1): n is a, c, g, or t
nagatctccctgacccaggaatcaaacctgggtctcctggcaggtggctaatatccccattttgcagattctctggggggaggtgccaggctcaaggtcatgactattatggaattcggagctcacctggcctctgttctgggctccctccctcacaccatgtattacatggacacaccccatgtattacaaaggcccaggcagagcctgatccctttaagagccctggggctgggctcagggagggaacgggccctaaaccccaggccagaccggagctgcattctctggggagagcgagtggccacttggcattttccctttgatactgatacaggcattttaatagctgcaatgatcaggcaggtggtatttcagctctggccatgaggggcattccaggaggccctagctgccaacgggtgaagcaggaaggcttctctgtccagggcggctgggggtccaccccagggactctgaaagttttacacctgccccagagcctcagcgtggggatttcaaaccaagagtctcaaactcagatgcctagcggggccaggctagtggcctaaggcagtgaggcaggccagggggagggtactgtggtggtctggatagcacatgcccacctgaaaggggcagccatcctcccatttacaagacagatcagaaatctagaactacatgagatctcctgagcaacacgtgtttactgaccacctatcatgtgccgccgggccatgctgtaagcactgagaatatattaatagcaatgaatgaaacagatcaaaatattcatgtccttgtatagcttgccttctaaggaaaggggaagcaataagtaagctaaataagacaatgacaacgacagcaaaattggaaggagaaaatgaaacaaggaggaaggctagcaaagctattacagaaaggcctcctggagatcaagccaggaaagaggctaagagcctggtaggagtggtccaggggagagcaaggaagataccctccatcagggagtttttctaggaaaagagctaagtagagtccatgaggatttttcatttcttttcttttttttatgatgggaggaagaacagcatgtttgcataaagattgtatcagaggtgagcaaacaagcactgaatcccattggaaggctgttttagtaaatccgtttttatgggaacacggccgtgcttattttgtctttcgcctacacagtagagctgagtggttgtgacagaggtcgtatggcttacacagcctcagatatttagtaactggcccttcacagaaaatgtttgctgaggccaggccctacccccacaccaagttcatcctgtgccctgtccattccttctcctgtgtacccccttcccttcatccgccgctctctatcaagctgccaggccataaacacgacctccagtgtctctctgttggatgcgtgactgacagc

SEQ ID NO: 27986 - DNA, 2947 bp, Bovine  19866880857076
  misc_feature (1)..(1): n is a, c, g, or t
ntcaccaggtattttcaaacctacttggatgtaacgttggaacatgctgccccagtctgtcatctttgagcatgtgtagaagagtggttttgcctgcattgtccaaacccaagaatacaagttttccagatttcttgtagagtcctaaaaaagaaaataataatagcataattagctcttacacagcaaaatctacctatatttaaattgttttgggaaatgcacagcatttgaaatgtgtatttcagggaaatggctttacctaggaactggagcacactgctgaagccattgtagatccactcaaagatgaaagacattattaatgcttactccctgtataaaataggaaagcagcaaacattagccttgtgaatgctgatatacttctggagacgttaactcgcatttgctggccttcatgcatggttagggccccatattttggacctaaaaaatcaaaggattttgcaccctggagggaagtggaagtctctggggtactcagatctgcataaactcctgatttcctatcagtttccaatctatgatactcagagcactaggcgttaaagatacactttcctctttcactgtatgactcacttctccaggcacctgctcattcacgttccctagatacaccacagctgtctaccagttaacaaaacttctaggaaatcaccctcatcaataatctggatcaaaatgtcacactgatgtgctaactagaaaacaagaataaaaggcatattaacccattcttgtaaacaactctaaaaaacaagctcgctaaaatcctactagctggcacaatttgcactgctccatttaccaattctatctcttctttaacagtattgtttaatctcttctatagatgtgtctcaagttagaaaaagatgccagcactatgttggagagccatgaagagataagagagtccagtcataatgtgaataattaagactcacctaacccattttacaaatatggactttcttaaaataagaaaatgcattcaggacatagtaggcaggttcctacccaactacatacctcaatactgatattaacagcactttttctactgtttcccataagcctagacaaaacagaagacgacccaaagctactaaaaggtatacatatactgggaataagcaagaggacctctaaatgtaaccgtaatagaatccagagccaatggtgggtgtttagttttctgagtcagcacttcctgatcacactgaatgcctcagcaccagttttggtgcagaaaaaagaatgatacccactttcactcctctccaacagcaagaacacctgaacgcaaggctttacactagatgtggccaattgttatcaaacaaattccctgaagttttatttttttagaaaagtaaaggtttactgtaaaagggttaactacaaaaacctacctatattcatttaaagaatgagacagtatatgttagttttctttttcatccaattactgtttttgttttggtttggttttatcaggcctgtggcctgacctgtaaactttcaggactgcttagtgcttatcttctatggcttaccataggtgggtcaaaagaagcttgggagtttgggtgggggtagagactgagggaaaagcttttatacaaagatactaaataagatttttttgccttcttcaacaacatcaaaatatattttggtagaaaaaccaaatttagtatgttaaataatagttgtgtctggaaacttagtctctaagaaggccaatgacttaaatacacttacaaagttcctgtgcttaagtttccactgttggtaagtaaaagaacaatgtgcctctcctcagcaatcctaccaaaccagtcatccttccctattttctttctctaccacttgaagtctcacctttagaaagcatgtctcattaaggtcactcccactgatttcaactttaaaacccaacgcatatattcatttgtactacaatggtttgcagtcagtactttatagacattttgtaaagtttcaccacatcattacagaagtgtacccaactagataaattctctggaggtgacagaatggcagaaaatcccattttaaggaatgtttcataattaacagaactactttaactctccagtttatgttcccttgatatccctgtttgaaaaatcctagaattcttccctccaaaatgaatgtgatgttaaaaaataaaaaaaccccttactggacccaaagaacctcacagtagtgctacccaaagaggaaatggctctgatggtgcctccatccttgagatcttaggctttgcaccctcgagtgagtcgtttctcagtttctaaggtgcctgtacaaacatctcatttcagcctcacactaaccctaggaggtagggatccccggcttcatttaacaagatgagggcgctgatggtcccagattagttagcttaaccaagagagctcagctgaaaaggtaacaatgtgaagactcaaacccttctattttaatgccaaagtcaaagcccttccttttaatatcacataaaattccaatgcaattcacaaaactgcttcaaaaaaaactttcttaaaccaccagttacagctatgataatccaatgttttcatccttagaactcatcacaacttttaaaccataagttaaataactagcactttatttcttttctagccttgacccactttacaatccttatggcatcttatggcaaattagcttaagggctctaactaccaacaaaagcattgccaacgtacctaaaatttgcaaatttaaggacggatgattcaaataaatgaagagcacgagactgatgatcagtcaataaaaaaagctatgcatcacttatattgcacatactcgttacttatatatgctccgagcaactttaagacacatttcagacaga

SEQ ID NO: 27987 - DNA, 2250 bp, Bovine  19866880887243
  misc_feature (1)..(1): n is a, c, g, or t
nctctcgtgggtcactctcccacaaccagtgcagtgggcttgtgcaggggttgggggaggaaagctccccacaccagctcctcccaaccaggcctggtttccacactctcagggcctggcatcactggagagctggcatgggcactggacctctgagtgggcatctgctgggctctccacctgtaagagcagaaagcccaccctgctgactctgcccacaggagaggctttgtctctttggttctcagactacacaacggggggagggtgaggtgggggagcgagcttctggagacagatgtgggcttccccgagctctgcagccatttggagaaccagggtggctgctctgaggggtgacacctgcagcttcggagagaaatcagagctctctttctctccccattgcccccttccttctctctccctgtctgccttgccatgcccatttcctgttccttggtctcctcccctgcttctgcctctggccagccagtacgcccgccccaacaaacaaatgtccacagaggccaggatctgtggaagaagggtgagaggagctcccaagccccctcctcagggcgtgtagtccatgtagtcaccccaccttccaaccagcccttacttcctgggaggctctttgaggagactggagaggttgcccaggtttcgtatgaaaacagaaagtggctgtcggaaggttaccatgtcagggaaggctcatgtgttctttctctggtttcagggcagcaaaggtgaccctgggatgacaggaccaacgggagcagctgggcttcctgtaagtctcatgggatcagaggctccacccgcccgggtcccccaccacagaagcactgtcaaacagaatacccagggcctggagcaaaaaatctagggccaagcgaggagaattctcatctctgtgacagatgaagcagccaactgccaccagcccactctctagcactcccctgctgggctctgctccaggcaaacccccggggtccctggcccctgatagggaatcaggtcctcaccagtgcggaccatctggcacacatggctgagcctcttccctgaaggcctctgtgttcgatgcagtgagggtctcacaggtgactgtgccatggcccctgccctcatgcagggacagagccacgtccagatcactagacggcagggagacatctcccaagacaggcagcttcccatttgcaatggacttctccttgctgggttatagaagtcggctgcctgggaggggcaggactttggtttcccacccacttgaaggtcgtacactaattgggttccatactcggcagtgcttcgacacctccagccagtctttgctttacatccctctccagcagaagacaaggaggaaaagaattgaaagcagtcttgtagagaggtttagtcacagcaacattgtttgcaagagctaaaaatgtgaagcaaccaaagtgtctgtagatacatgaatgaataatcaaaacgtggtatatgtgtgcagtagcgtattttccagtcttaggaaggaaactctgacattctacactacggtgaaccctggggacatttaagtgagataagccagtcacagaaagacaaatactgtatgacttcacttatatgaggtatttatagtagtcaaaaccatagtgacagaaagtagagcactgatgaaaggtggaatgagtagttactgtctaatgatacagagttttagttttgcaaggtaaaaagagttttgaagatggaaagtagtggcagttacacaaaaatatgagtgtacttaataccactgaactgaatgctgaaaaatggttaagaagggaaattttgtgctggttgctaagtcgcttcagtcatgtccaactctgtgcgaccccatggactgtagcctgccaggctcctctgtccgtgggattctccaggcatgaatactggagtgggctaccatgccctcctccaagggatcttcccgacccaggaatcgaacccacatctcttatgtatcctgcattgaaagccaggttctttaacagtagggccatattttaccacaataaaaaaaattgaaggaaaaaataatagagaacaacttgcaccttgaaaagaggggctcaggagttttggagtcatttttatagcaagaggcaagtgggatctaggaacccaaatctggtcagtactctgacaacccagagggatgggatggggtaggaggtgggaagggaggttcaa

SEQ ID NO: 27988 - DNA, 1312 bp, Bovine  19866880914205
  misc_feature (1)..(1): n is a, c, g, or t
ncagaaaagccctccactgctcccaacccacaactggagctttgtgggagggttccaaagggccctagtgtcctaaccattgagcattctggacagagacttaaggttggatcataggttaactcccatctagaaaatcatatctcaacagggcccttccccacttggggagaggggaattgtatgaattggctagtcttagctgcaccccaatctgagaggttcagaaagcagggagaatggcccacaggtacagaaaccccacatgcttcccaaagcaccccattgtctgggtctgatggtaacagtcctcacatctctgtgggtctttgtaatttccaaggaatcttccataaattgtctatccgattaacatttgttgagacttgactttgtgcctagaagtgtgctttgcccataataacatgaacaggtgctgtgctgaagcctttaacctgtatcactatttagtcctaacaatgacccctctgtaaaagatgaagacaaggggactcagtttaaccatttctcaatgacgcacagtgctaagtaacaggactagggtttgaattcgcctgtctcaggtgactaagactccccatccctgcactccctcatctctagacttttcaccttcccctaattacactgaaaaggctgggacaggtatgaatgtcatgaacaagctgacctttggtgggtttaggggattttccagagacctaataaaaggctgggtgggagtgccaacctggctcaacatccccactgtccatgagaagccttacccccaacaccacccccactcccaagcccagcttcagcgccccctcttcctgtccttgccctcactcaggctccctcccagaccctgctgtacagcatgtgtgacagcaggggacaggctcccagggacgaggatgttaccccacaactggcttgtgagacatcagcatgggtgggcagatgggctccagagcaggttccccactcatcaaactgctggccccttgggctcctctccccccagcttccctcctccaggtggggatgaccaccattcctgggagctgaggccaggagcattctttctgaaagttcttgccaaatccctgcccacccaaccaacggctttgggctccatgacaaggtcaatggttgcccaaatgtcctcagatcagatctattttgctttcagactggccaacaccaaccagactatttctcatcatctcttcccattaatatgctcttgtctctcactcagaagcaaggactctcctggtgttttgagacctgctcagggggtaag

SEQ ID NO: 27989 - DNA, 1408 bp, Bovine  19866880919705
  misc_feature (1)..(1): n is a, c, g, or t
ntgtgtgtgtgtgcatatgcgcacgtgcacacacatgcacggtatgtggctttcagagcactgagtaggggagagagctccctctcctggtggcaggaagcatctccctatctgtaagggcaggaaagagggcctgctcaagaccagctaaggaaagagggctgggatggagggatggcctgcatcccaacctctcccatcacatggggggtggggaggcctgtacatcctgcaacactcagattaatagaagcctgatttttaaactgttagtccataccatctttattcttcatgaaacattatttctatttttagatcctgattatataccataggttatatttaagaagcattagatgaaatttccctcctggttagtccgttctaccagctgctgggggtgtttaaggaaaggcagccaagctaacgtgaccattttcatgggttgcaatctggctaacattcagggaatagattggggttcagcaggggaacccctgcatgcttccaggctagcgtcatgggcaaatttgtgacaaatctccagctgatgctggggcaggagtaccttgtgggaaccctgtggttttgttcctctgatttcctgaccagtcccaatgtcacttatctggaggctcagccttgtggcaataatgcctgccaacaatgatgttaaggtataaaaaataaaaagttgactcctctattagagagaggacttctaatcaggacaagcctatttgggaccacaagcctaaggcaggagtggctgatgagttcatctgaataaattcaggtcccgccctggcccaccctgtctctccctgcctacttttaatggtaacctctgggtgcttggccagaattctcaggataccagcctcactggggtcttgtggtctatcctgtctgggctgtggcccaagtctgttccatgccgctgcccatgcttaagagagactgtgcctctctcccaaaggatggccaccccatggaggcttcacccaggcctccattcctgcggaccacaaaccaaccaggctcccttcctgcaagcgggacctgctgcctgagaaacacaagccattgcgtgcagtctgccccggggcctgccgtggtggaagcctctgtcctgtagtgacaggccttgttctatttataacattctagaagtgtccatccatggggacacagttctccaaactgaggacaaagttgcaataaaagaatatattgtaagaaagacactggatcttttatttttttttcctttcattttctttaaaaaaaacaaaacaaaacaaaaaaaagcctgaagcaaaatctttttaagagtagttacagatattatagggttaaaggtgggggcactaaaacagaaaaaagcaccagtgagatgcccttc

SEQ ID NO: 27990 - DNA, 1770 bp, Bovine  19866880943034
  misc_feature (1)..(1): n is a, c, g, or t
nttagtgggagaaggcaatggcaccccactccagtactcttgcctggaaaatcccacgaatagaggagcctggtgggctgccgtctgtggggctgcacagagtaggacacgactgaagcgacttagcagcagtagcagcagcagcagcagttagcgggaggagccagggctgattttcccagggtcttccttttctccctcatttgataccaacagtcttgtcatttagtgggacacacatgatacaatttcatcctctgggtccgtgtttatatagatgctagcacttctatagctcttactatgtggcagtagcaagactttacatgtcaattcctgggaaagcagcttagacagattaagcacattgcccaagattatgcatggttgcctgttacacacactgcaggagtagcttccaggagacctggtgggttccctaggaccaagagtatgttggggtgggggacggtgggaggggggaggaaattggggaccacacacagaggaaaattctcagtatcagtcttccctataaagtcatggccatcctgttgattgtcaagaggggatttctatggcaaagccaggctgggttaaccttggaagttcagtagaggcatttgggaagatctgggctgagaagttgggttggaccacgtacaggagaacaacagttacaccaaggtgctatagtgctttgctttggcctaggtaaagtacctgggattacagaagaaacagaaagaacacgtattggaaaatcaagccaagaagctgaggctgccgactccactgtcaaagcaagtgaaagtacatgacagcaggagtgctttccttgcagagaggggacaaatgactgtctgaagttctaaactggcggccaagaccacccccacaactgttcaaaatatacctatttgcctgggccccactctaatattcttattaggtggaatcccatatctgtcattctgatccagaagggatgttctggttaagatctaagagataaatcaagtaagagtaacaggctcctctcctactccagaagggtggcaccctgggcccctggcatttcactaggcattcaggggaaagagaacagggttaggaagactccattcaagggcctctgggtgtgtgtgggtgcaaggctgagacagaggagttgcccagaaggaattcagactgggagtgggagctcagtgatgcttagtcagggatgctgaacggcgcccacagatctccagagttgcttggcatcttgcccaagtcccattcaccctctgccaggaggcacagaactccctactctggggttctgagtaccaaggatgagaggagggtcccaggcccctacacacagtgcacctccaaggcatgagcctgagaccagaaggcctccatagtcctcaggattatgacctgaggcctggaatctagtcctgacagctggtgagggagtggagtgcgggcaaccttcagggccttacttgggggtagtggagtgcaccaggaccctcgccgtctcccgaggggccacatgccggcaggtcaccacgagatggggcgccacggccactccggagccccagacagaaccacactccaccagcacggccgcagctgcccaagggggcccggggtctcggtatcggaggggcaggccccatggggcacccatctcaggcggtaggagggcagccagggcggcagtgtcggggtgaaggcggcagagggcggctcgggctacgctgagcagtgggg

SEQ ID NO: 27991 - DNA, 930 bp, Bovine  19866880983831
  misc_feature (1)..(1): n is a, c, g, or t
ntcctgctgagggaagcagctttggcaagcccgggagttcatgaggaatgaagctgacatgtcaagtccacacttgtcggggtgttaatggtgtactgttatgaatggagtcaattgtgaagaagtcccgatgaatatgtatgaaagctgactgagcacatttaccgagaggacgatgagtaaactgaatctcatgtttttaaaaattcaccgactcactaatatttttaatcctttccctgtgccacttagcctcttctctatttgatactaaaaatattccttactcatagcctgccacaaattgttcctagcataagctacatccttatctttgacagtgatgagctatcacataagagagcaacatgcattattcaaacataaattcactccaaggaaatgcctcaaacacttgagtagtgaggagtggctgcagataggtacaacctgtttgagatatattgggatgatggaagcgttccagctggactgtggtgatgattacaaaactctataaattcactaaaatcactaattattacctaaatgagagggtttttatgcttcaaaccctatgcttcaaaggtagtctttgtttggccgtgacatgtggcatgtgggatcttagttggccaaccaggggccaaatctgtgccccctgcagtggaaatgtggggtcttagccacaggattaccagggaagtcccagtaaagctatttttgttgttgttgttattgttgttttaattttaagtatctttccctggctgatatttagtctcaggattttaaaggcaacatgagaaataagagtcgtaggcaatcagattgtaatacaatatccggaaaaggcttttctcagaaaagtacagacactggcacccaattagcaggttatcagacagtcagtaagacagacacagccga

SEQ ID NO: 27992 - DNA, 887 bp, Bovine  19866881029965
  misc_feature (1)..(1): n is a, c, g, or t
ntgcctccttggtcatggattaattgaccatgtgtgtgggtttatttctgaactttctgtcctgttccattgatctgtatttctgtttttgtgccattaccatactgttttgatgattgtagctttgtagtatagtctgaagttagggagcctatcatgattcattcttacccattctccttcatttcagcaggtttctgcgtatcccttgactacatcagattccatcagcaggtaaaaaaggggtgcctgctgggtggacggtggacagtgttggctacagctaaaatttatatgggaaataaaacacactcatgtttctatttttgtacgaaatacaagggttatgggggtggggtgggaataagaaatggatttgggtgtgacactcaaaggggccttgggtttcatctgcagtttttaaaaggggggctgaaaaaagaagactgtattcatgtatcacttatgtaattaaaagttagttttaaaaaatactatcagtgttcagctttggcacccctaaatctggcccaatcccaacccaatccaacactgcagaaacaaaagcagtcacctggccagaaagttcaacccggggtcccctgggagaagagggaggaaattgcctgagtgactcttggctccaggaaaaaagttgggagctgatcacttactgcttcacagccctttcagcagggctgtctttgacagacagaaagtcaagccctcggtgtttccttgcaaattcgaggggcctccctctggagtccttcctcattcttcaaacagaaactgcagtctgattaaaccgcctgtcaaataccggcagtgcagctgctgtccttaaaaccacttacgagaggctcaggggcacaggaggcaggacg

SEQ ID NO: 27993 - DNA, 1689 bp, Bovine  19866881043052
  misc_feature (1)..(1): n is a, c, g, or t
ntgtagacgtcttctctgagggaagatgacagggctgaaacgcagccattccccatgggacctctgtcgctggtcaccttcgtggcaccgatgttctcttctccagccaagagagaccaagaaaaaaggtctccaagaaagtgctttgtgcaactcactccttccccactgacctgcccttacactccaggagagggctccccgagtagcttaaaaccaaccagctcctcctaccactccggacacattcagccaccaatcacagtggatcggccctcctgcctcccctgggaggtgtggtgggcggtgtgagtgctgtgactgcagcagccattttgagcccaacactgcagggcagaggcagccaggaactagggctcgaagccatatctgagccagagccaggtcctgagtcctggctgacaaggggccaggaggaagccaagggcaggacagatcagaggcaggtccacatccaggcggctggcctctgctctgagggagcccagctggcacacccagggctggctgtgacacagcaaaagaatctgctccattcagagccgggcgcgggagccagggatgctgctgggacctgaacacgcggccctccctccccccaaatcaaggagtggagaaacatgagctctcattgttcagacaggaccagacaggactgccctggccacggttgtgttgaggatccctggcaggagggcaccctgctaagtccttgctgccccacctagctcctgtcccaggcacctgtgggaacagctttagtgccacccaaactggaatctcagcagacaggagccagactgcctgaacggaactccagccctaccactttattatgctacttacctctttgggcctcagtttctttacctgcataatggggatcacacagggcccacctataaggttgttgtatgaaagatagaggtggatataggtaaaatgctccagtgcctgactaatactgagccatggtccttgctgtgtctcctacctaattaagcactttatgtgtattaacttatttcatccttattataaaccctatgagatagatattatcattatccccattccacagatgagaaaactgaggcacagaaaggttatataacttgcccacagttgtagggctgatgagtggcaaattattttcaatccagttaaatctagcttcggattccaagctctaagcactgtgctgttctgtctctcccatggacagtgtcattaaaagtcacctgtattactgtcatgctggcagccaccagccccagcccagcccagcctctgctcgctacctccagctcactcctctaggcagtctgcccccgctaactgggcaaatttgacaacaagaaggttcttcccccttacggtggactagtcagccttgtacacctccctaccttgctgctgctgcttcttttttatttttggctgcaccaggtctccattgccgtgcccaggctttctctagttgcggggaacaggggctactctctagttgcggagcatgggctcgaatgctatcggggttcagcagctgtggggcacaggcttcgatgccccacagaatgtgggatcttcccagaccagggatcaaaccacgcctcctgcattggcaggtggattcctaaaccactggaccaccagagaagtcccacc

SEQ ID NO: 27994 - DNA, 3852 bp, Bovine  19866881130682
  misc_feature (1)..(1): n is a, c, g, or t
ncctgtccccgaatataatctgaaaggctggcttgccccattgttagcctgctcctttgtcctccaaagaagcaagtggagtcaaaggagcaccaggtataagaagaaagaggtcatctctactcaggtccgggtccttgaaagatctcctgccctttcagtaaacaggtcagtgagtgtggaccgctcctaggacatggtcttcgccccactgtgtgggcagctccatctggccaagtcacttcaggcaggtggtggctgttggtggtggtatttttatgtaagagggatatgtcagcaagttagactgggaaacaacacaatgtcgaggcagccggtcggtctccttcccctcgcattgccctagagtccaaggcagggcgggtgagccgagccatttccagagaacctgagaagagcccaaggagactgtctccccgaagtaatggatccagagaacaggagcgtgtcttctgaggacagcatttgataccccaacaaaagacccagagatcacgccccgaggagctggggattggagttgaaagggccgagccctccgcatcagatctttctcaaggatcctgaaagcctatcaccagcccttcctcggagaagtcatttccatagctgttgtcttgatctgaaccgtggagagcagccaccctgtttgtaatgagaccatgatgttccgttccatctgtgttctgaaaggcacattgaacccaggctgacgataccgcccagcttgctcgttgctcacttagagagagaggaaaatcttgtcattccctgagaggaggagggttgatttatcgtgcgtgttttggatgtcagacctcaattcctgtcatcaatcttccaaaataaactctgcataggaaacttcgacggaccacctgctggaaatgggctgcttttccctttcttttctgacaaagccagaaagagtcctcacctcccccactccagggacctcccccattatacctggtccccacagccaggctccccagctaacctgaatcagtgctgggtccctgcctgacttgggggctgtgctccccaggaatgcagtgtcctgagagcttctgcaggccttatcccacaatggtccccagccagggaggtgctgtcactgctgggggctctgcagggtgggagcaaattgggaggtggttgggtgggtttcccaggaggcactagtggtaaagaacccgcctgccagtgcaagagacataagaaacataggttcgatccctgggtcaggaggatcccctggaggaggacatggcaactcactccagtattcttgcctggagaattccatgcacagagcctagtgggctacagtccatgagatctcaaagagttggacacaactgaagtgacttagctcgtatgcatgcatgggtggatatgatcctctcctcccagtgcctgcccacccagcccccagtcccatggagtgagggacaggggcccaggtagctctcctgaattctcaacctgacacagaagaggcctgagtcttcacccaaccctgcctgaaaccacaagatgaagaggaaattggaagcctaccagggtggaaatcacccccttgcctgctctctctgcttcccataaaggaagaatgctaccagccaggggcagggagagggagatggcagttgatcacaaggccggcctgccaccctctgggtgtttctcagggcgcctcctggggtaactccggttcctgtggacacacggacagtcagcatctagagaactcaaccgtggaggatggatttaagtagcagcggggatcatctgggtggtcgaaaataggtgcccaccactgctgcacccccgctgcccatgacagacattgctaatgaattaggaggcatcttaacagagtgctttactcagtcactaccagtctgctggagtccacactagctgacagttgttggccattctggctctaggttttaagagagagtgtcttaatgatgccaactgtgagactgaaacagatgaccaagggaagtatatgtgtctctttcttgaggaaatacaggatgttcagctgctagccttggttgaaagtgatgcttgctggaatactagctaacacttaactatgtgttagacactgttgtatttttatggaagcagtgtaataaagtgattacaagcatggactctggagccaagctgcatgggtctgaatcctgcttctgccacttctagctgtgtgaccttggacaaattactttacctctctgtgcctcagtttcctcatctataggatgagaatagtaatagtacctgcctcatccagatgtaaggaatatatacataattatatgtatggcctggagaaggaaatggcaaccctctccaatattcttgcctggagaatcccatggacagaggagcctggcaggctacaatccatagggtcacaagagtcggacacgacttagtgccatctttctttcttattatacatacatatgtgtgtatatgtatacatattatacatacctacatgtgtgtataattatgtatatatttttccatgtaaaatatattaactcatttaaactctagaaagagaaggcttccctagatgatccccaaagattttcaggaggaaattattagtctttgcatttttattcattaatttactacttcattttatttctatcccacattaatccaagaaacatttgggagtgactcataaactagataaggaaacagtgggtaggtgtgtggagagcagaggcaagaaaacaaggggcatccaagctgatgaccccacagcatcctgtgcagccaagtcacaggttcagcttggagcttcctggtggacagagaaaacgggaaagcagagctgttgcgaaagtcagggatcagggagagttaggtgaagcacttctttacctggtgccaagaccctagagaacttcccctgagtgcaggtgatatcagtggccagcacacgagcagttggacagagcccctctgtgcatctctgggtcagagcccctgtgtgaggctgggaagcctccacagatgcgcctgcctcctgggaccaagggaggtggccgccccttgtgggcgcactccctgatggcatttagaagcggcgtgaagagggactggctcagggctacagctctggatcaaggaggacaccagggcggccccaggctgtctttgtggggctgggaaagaaggcggctgcgtttccaggttcatttgttcacaagcatgaattaaggacctactaaaagctcagcactccttgaggcaatggggacacagccaggagcaaaacagaacgtgccctgcctgccctgggagcttaccttttagtgccccaggggtaaaactcagcagagaggaggagtggacactgaccctctacctctgcagccgctaaccagcataccctgagcttggttctctgtgggggtgtcactgctccccaccccgcctcacggacatcctcagaaacaaggccccaggaagggggccttatttctggcactgcctgcatttgctcagcagccctggggcagagggacttgtctccagatggacaccctgagacctactcctggtgttgccatgggtttctgggaagagtgggatgtctggaaggagagaaacagacctgatggctgtgcctctgaaagcagagtgggcccagctgcacacgcctgccagccagtcctcttcccttctaatgactgtggtcctcagcgctggctccctgccagccctgtgccacgtgctctacatacatcagctcattcgatcccaagaggtagagattgttctcccatt

SEQ ID NO: 27995 - DNA, 1531 bp, Bovine  19866881141948
  misc_feature (1)..(1): n is a, c, g, or t
natccccaagggaccagaaatctgtcagtgagccgccacctgcccacccactggagggtcccctccagcctggccctctgctctagtcaaagctaagtgggggttggacaaaggggctccaattcctgtctttaatgagtgtgtggtttcttgtgaattagtcctccttgaatcagttttaagactatagaacctctgcttggcatgatgatagaaaacctccttatcctgtggctttgggtccctgagggcatctcaggcctccatgggggagtgacgggctgagtaggatacagaccctccagtctccctcccatcagagcagctctgcctttgtcaattttaatctgtaacatcttatggaaagacccgaatgaatgaactttttggccagcccaagggatttccttcccccccccccttttttttcttcttttggccaggatgggggaagtttcttctagaataaatgtagtagtagggagattctagactaactccacattggaagctagaatcctacttattccccagaaatagttttttgcctggtggagcctggggttggatgcagaagccacgctctaccctcacctttttttttcccttgctcctcccaggccctacccttttcacatctcatcctggccacgggcagcactgggctcttcccgggcaagtttaaccaggtttccagccagcagatggccatccaggcctatgaggacatggtgacgcaggtgagctgcccactgccaggggcggggattgaggcaggagctgggggaggggccctggagagtgaaacagctgtgggacacctggggcggcagcagggagcccccagaaggtgtctggggctgcaggagcactgtagagatgcagagttaccagaaagaggctcctgggggaagacctttggacctgtcttgaagtttggacatgggcatctagacctgctcgtgtagctattggctgctgtttgtacagggcatatgttttacagagcaggcttggatccatgctcttggttctcacggggatcctgagaggtgggtggaatgggtctgtccccactgaatagatgaggcatggggatctagagaaggtcatgcagccgtgtgactgagatcaggcctttccttctctgcaaggccactgagaggcctggggaacttctcacatagtcatgagcagatgttagacttgaagttaagaacctagcctatgaactcaggcagatctgcttatctgcaaggtgggcaggcagtgagagcttagtaagaaatgcagggagacacccagcaagagcctgacccccaggaagcttatttggaccctgaacttggaaagggttctctatgcttccttggtcaaggaacccgcttcctagtctggacccagaggtggggtggacttgagggtgtgcttccatctcctgcttctccaggtccagcgctcacagtccattgtggtggtgggaggaggctctgcaggagtggagatggcagcagagattaaaacggaatac

SEQ ID NO: 27996 - DNA, 2448 bp, Bovine  19866881207605
  misc_feature (1)..(1): n is a, c, g, or t
ntaatatgtcaaaaactattgagttactcacttaggtgaattgtatgatatgtgagttatatcttaataaagttgtttttaaaaggtcatgggatacagcttaaattgtgcttagatgaaaatttatgacctatatacttagaattgatgcttttgaactgtggtgttggagaagactcttgagagtcccttggactgcaaggagatccacccagtccatccaaaaggagatcagtcctgaatattcattggaaggactgatgctgaagctgaaactccagtgctttggccccctgatgggaagagctgcctcattggagaagaccctgatgctgggaaggattgagggcaggagaaggggacaatagaggatgagacggttggatggcatcaccaactcagtgggcatgagtttgagtaaactctgggagttggtgatgaacagggaggccctggcgtgctgcgtgcggttcatggggttgctaagagtcggacacgactgagcaactgaactgaactgacatacttaaagtttacaaaataatgagctagcatccaatttaatgtggtataaaaagaacaagtgaccaagcctaaagaaaacaaggtatgaaatcatgaacatgatagaaattaatgaaatagaaatgtttataatgacaggatgaactgaaccaaaagttgcttttttgaagacactaataaattgagacaaatctagcaagttctaatttaaaaagtaaacaatttataaatacaaaatattaaaagggtcagaatgccacataatgcagatatttaaaagacaaatgatattgtaacttaatcctgataacttcaaaatctttataaagttgataaattctagaaaaatttaacctgcaaatgtggttcaagaagaaataagccagctctttggcaagccgcaaaccccaggctctgttccacagcctggggtttgttgaagttgtcaagaataaagcctacttcaagagataccactgaaatttagaggacggcaagagggcaaaactgacgactaagaaatgattggtaatccaagataaaaataagtacaacacactcaaatacagaatgacagttcatgtaaccaaccaaggtatcatttgacagattacttataccagtctaaaaggagatatatgcagcttatgctcacgaactcccaaaataaggcgtgatggttggtctgacaaataaccctgcagcatattacactggccttcaggcttcttaataggtttcgtatcagcaagatttatgaaggccaagtcaaggtgactgtagatgaatacagtgtagatgaccacctgactggtggtcagccaggtgccttcacctgttatttggatgcaagacttgccaggtctaccactggaaataaagttggggaccctcaagggagctgtcgatggaggcttctctgtccctcacagtaccacacgattccctggttatgattcaggaagcaaagaactcagtgctgaggttcactgaaagctcaccatggagtaaaacatggcaaatgacatgcatagcctgactgaagacgatgaggatccttgtaaggaaccattctctcaataccgaaaggactctgtaactccagacatgatggaggaggcgtacaagaaagctcatgctgcagtacaagagaaaccagtggatgagaagaagcctaggaaagaagcagaaaagaagcggaaccatcccgaaatgtcacttgcccagaagaaagattgggtagctcagaagaaggcaaccttctttagagctcagaaacaggctgctgagagttaatacagaaaaccacaattttctatgaagatatttcagataaagacaataataaacatattgaccaagcaaaaataagccatgtgattttaccaaacatttataacaaaatttaaggaatatataattttaatcttatgcaaattattttatgggatagaaacagaagtactgctccttatgtctttggcatgagggtggcataatcttaaaatctgaaaaagacgggatgagaaaggaaaataacaggtcattctctcgtgaacacgaatacaaagatgtaaaaataaattagcaaactgactccagtgacctataaaaatacacatcctgaccaaactgagtggattcccaaaatgcaagtttgatttaactaacagctgcatttctaagagagctggccaaaaaacagaagaaatacacccagtgtgttaacggaagaaaatttaaggaactttttaaagatgaacagaacccacaatgaacagtgggacatctggtaaccagaaatagccagaagcctctaggcctgagggggcacagagtggaagtgcccagtgagagatgaattcagggaagagaattgaaccatcagtggggtcatcatagagaaaggcaacctctgccaga

SEQ ID NO: 27997 - DNA, 955 bp, Bovine  19866881246830
  misc_feature (1)..(1): n is a, c, g, or t
naacaccctgaaaaactctgggcaaacccaaaccttactttgtttccatcctcatcttttgttcatttacttcttgctgtgctgtgctgtgcttagtcgcccagtcgtgtgcgactctttgcaaccccatagtctgtagcctgccaggcccctctgttcatggaattctccatgcaagaagactgaagtggtttgtcatgcccttcttcagggggtttcccaacccaaggatcaaacccaggtctcctgcattgcaggtggtttctttactgactgagccaccggggaagccctcatttacttcttacacctcagctgatatcaccaaggattcagagtcactggcaagaatatagataataaaatagagagatgtgtaaagaaaagtttataagtcagagtcaaggaaaacaagtcagaggcgggggcaggagagcccgggagaggcggggaagaacctctcaagtttcacctccaggggcttggtggtaagagaaaaaaaatcatcagcctggtttcatttggtaccatttgctttggttctgtctgcctggagacttgcaaacacccagctagacgaaagactgagtcagccccctcctgagtgatggtataacaggtcctctaggtccaaggaaggattctcaccaaggtcggccacttgtacctgtgcatctccctcagaaggagccagcccctcccacacgccccacggccccatcaccgcctcccgcacgccccatggccccatcaccgcctcccgcacgccccatggccccatcaccgcctcccacacaccccatggccccatcaccgcctcccgcacgccccatggccccatcaccgcctcccacatcccccatggccccatcaccacctcctacacgccccacgaccccatcaccgcctcccgcacgccccatggccccataaccgcctcccacatcccccatgg

SEQ ID NO: 27998 - DNA, 897 bp, Bovine  19866881247454
  misc_feature (1)..(1): n is a, c, g, or t
nctaccagttgtatattcattcacacattcacttaacccatctgcacatccagtccagtctagcctcctcaatcaacttgcagttgggcaccacccaatttcttctccaagctgaaaaacctaagagaactctaggcaagtcctactccaaagttgatgctaacaaagagctcgagaaacagaaatgtgacactgtgtgaaagagtaacttaaattcgcttttgaacccgcattctcatgctctcccaacttccttcggaacatgaggaagagggtcgaaagatgatcagcccagggagagtcagacgaaacctagaatgcaacacagggatcagccttccagcctggtcatcccaccaccactcagcacctcccaggcctgggaaggctctccaaacaccactatctgaagatgatgtcagtccttgagtgattatatgaaatttatcttcaaccaaaataaagcaccaaagaaacttactatgaaatggggctctgacatttcttgcataaagatggtctttggagaatcatatcgagataaaagctccctcctctgaggctggaatcacagcttctccgtgctcttgatgatgccggacaaaaatgtgaccacatgctcttacactggctttccaccaaacgccacagagtcggctcatttgcccaccacctcataataattggagccaaatctctgtttcatttttccgaaagaaaaagactacatcccaccacaacagttcattgaattcaagtctctacccagaggaagcaaaaggcttcgtaatctcaagcaaaaaatgccagctatgtgctcccacaggctgccagtcccctggaggcgcagggcaccagggctatcacaataacctcccagcccattcacaattcaat

SEQ ID NO: 27999 - DNA, 3184 bp, Bovine  19866881293978
  misc_feature (1)..(1): n is a, c, g, or t
nccgagggggtctaaggcaccagacccagttcagtcccttttgaatagaatggagaagcattcacaacccagctccaatcctccacactcacaggtttgctccgtgttgcatctgaaccctgcacttacaggctgtacatgcttgattcaagcggatgcaccttcatgtgtcagcatcaaggaagaagccctggggcaggaggctagaggtgcctggccctggcaggatgtgaggtgctgtcaggctgtgtctgtgtgaagctgatatgaatccacacagagttggttactgccaaggtgaagcaagaggaagtgaattggagtttaaatgatatttgattccatctttttgctttctctttctggtaagtgtagagtgtcctccagtatcatctggataactggaggaaaaaagatgaatgtcagtactgatgatctatgttatatcagggtatttgaagagcaaattttattgatgagtttcactgacaatgaaaataatgatgaaatcaaaccttataaacatattccttgtaaattaatagttattgaggctaaaggcaaagttattcctgggattgcttttgaatatttaagatgtggatgtattgaactgtggggatgtgttctgggctctctttgtcttatttatgctttctaaagagttttaaattttctgttctctctgattttctataccactcatcatgcttctttccagtagtttatgatgtctttagtattgtttactggtaaattgcctcaggaactggtgaaacttgaaacatgcatagtatgtccttagaaaacaaaagatacagaaaataagatttaaaaattaaatgtagtgtttatggaaggattcaaaatcctcttgacttaaagttttttgtaacttcactttttgtgtatcagtatcatcttgaatgttgatatggtccttatgccagagaaaagagaaaaatcccagtgccttgtattagctttggctgatcattccaaactagagtcagccacatagaccccatacaaccacaagggggcaggaaatgccatcctgcggaatgcctaaagggggggagaaatgtaaagtatttggcaaacagtaccaatgactaccacagcaatttggcatttttaacagacaatgttacaaaagctttgtgtgatagacaatgtgcagtaggttggaggctgttgtgtgtgataaataatatgcagtaggcttggaagttgtggcatgcatggcatttctacatgtttgaattacagaaagtcttacatgtaaaaatgaatatgtagcaggtttaaatgtgtaaccactaaaacagctgtttaaaaatgttataacagtctttattagcttcaagttaccgtaatgtttactctgagtgcccattctccataagaatagtggaaaatgcatttttcagtattactggggctcccttgctgcaggattatatggtcaggggagatctttggctaagctgatcatcaccaaccataagggagttggtcatcagccctctggtcacttttgagttgtaggctatcaagtccatattccatccttctcgggatgatggctctactgcttctgggctgagcttggaagcaccagaatctctgctgaagctgggaagtctggagttaatggcccagcatcctaccctaggacctctttaaggttactccactttcctggggcactgtcatcaagcagaactccgatgcttggggaccaccagctttgttcctgtctcactctgaagcaagctctctgtgtcctctggtcttctcaaaggacaggaagaactgctagccccgagccacttctctttcttcaaagcactgaagttctgtagcccacctctccattggttcacaagatctgcctcttgagattatcatcatggttggaaggttttaaggatagttgtaaaagcatgcaaaaacatgaacccggagattatcatactaagtgaacagacaaagactaatatcatatgatatcacttaggtaggtgcaatccctgggttgagaagattttctggagaagggaatggcaacccactccagtattcttgcctggagaattccatggacagaggaagtctggcgggctacagtccatggggtcgcagagtcagacacgactaagcgactaacactttcagttttcaagggtggtggagtgtggcttttgtctagagcaggagggaagagatctacccagcatattagggtggggctcttgttccgggggtgtgaccccccccccagttcactgcccgaccctctcaccttttgctgggagggtgaggtgtgtgctccgtgagagccctcccggctcctgggcttcatggaagtggctgtacagccctcctccaggcagcaaggacagtggacccctcggcttcccttgtccctgacggggataaacctggagggcccgtcctgcctggctgggctagtggagcgcacattcagggaggtgttttcctcaaataacttttcgcagaacctcttgggaaactcaacctcactcccccaagttgcttcttggaacctgcctccccttgggtcccttgggaccagatgtcccgctggtgcttctcagggctgcagagcgcactgtgtccagctgttaggccagccctggcttgggccttggccttggagacacacctgccctctgccagcctcctggtcaacgagcctcccctgacaggcgagcgagtgagcaacctggaggcactgcctgtcaacgagcgtcgcgagtgcatcaaggtgcagacggacaaaggcacggaggtagatgccaacctggtgattgtctgcaacggtatcaagatcaacagtgcagcctaccgcagcgcgtttggtaagtgggaggctgagcggagggcccctccgcaggttgcctcttctctctccagcccctggggaaggtcctgcaggactctgccccaggaatcggctttctgccccccaccccaacgctatctcaacggctcatttggtgtcttctgaatggtgacatcaaacttcaagtttgggtccactcctgctgtgcttccctcttctgttttgatggtgacttagctcaaggtgcccagtgaccagactcttccaaaatcggatcccgcgcccctagggttagagaggaaacaggtttca

SEQ ID NO: 28000 - DNA, 2052 bp, Bovine  19866881349509
  misc_feature (1)..(1): n is a, c, g, or t
ncccacagttccccaacattcagcacagaccaaggggcaggctgctgtcttcagtcctttgaactatgaggggagaaaagacagagaccaaccacctccctcgaagttagtgatggtaactctaccttccacccccagggagaaaaaggcgatgctggcaactccattgaaggaggcagaggggagcccggtctcccagggcctcctggacccccagggccaaaggtgagtatttccctgggatcagtgctcaatccaagtgcctgtggtccttatccctagtccatttggggcactctgtatcctgggcaccttgccttctctcctcccctaaatgttgtttagtggattcttaacactggttgttccagtggattctagaaggtccgagctcctgggactgagctcctacttccaagcagtgaccttgaccctccaaaagagatgccctctctggggcagatggaagtaggagccattgactcaaatggctgtgatgtaactgagtcaaggaccagtggctgccaggtctttggataatcagaaaggcccatagcctggacattgaatcagccacagagactcctgcctctccctgctcctctggtcctaggcctcctggggccccctccccacatacctaggcccttcccacttgcctctgcctcccaggcagaacctggtgaggtaagtgttccaggctccaaaatgacctgcctcctccagccagaagttcatgagggtccatagttaggggcctcaacaagctggacacgtgtgtgttgactaagaaccgaggagagcctggcagcacagaactcagagggagaaaggaatagatcaggagggctgcttggaggaggtgggcctgggcagggcccaagggtgggggaagtcagacaggtggaatagggggagttagtagatatgagcaaagagacagagcccagagacacttgctacaacatgaatggctggaccatctcttgccccctgtgtgtcctcatcccatctctctcctgttgcccagggggaagctggagcagatggccagccaggccccccaggagagcaaggagacaaggtacagagggcctcgatctaagagcaggatgagggtcagcttgggagctcagagggagagaagtctttggccgtcgtccctgccactgagcccccagacacagggctgacggccatgactcccgcctgccatctcttgtggtcaccttgggctttggggaacttcctctgagatggcagccaggcacagggaggcctggggaatgcagtgacccagagtccccgcatctactattttccaactgctggtaaaggcaggctccattctctccagctccttctgggcacaggtcagcatggtgttgctgtgggcactgcaagactgtgggtgcgggggaggtgccggctgctatctggaggtgacgctccctgagctgaccaaatgaagggtcagcagaagttgaattatattaaagggtttgttttccctttgtttttactttctgtcttcctttttaaagctgtgttcagtgttcacattttcccagctcaagtatggaactgtgcttcgcttttcacaacttacaccacctttcatttattccccacggttctgtcctgtttccaacaagtacaaatcctccccccacccaacctgctccaggaggcagggtgtttctaatccctcaccctggccccccacgtttcctcccacagtttgggtcttccaccagcagacaggaaccgctggggctctccacggcgattggcgaccacccaggcaatcggcacaaagtttctgaacccttgctccttgagcgggatgggaacagaggggcagagagtctggtctctgcacccaaggaggtggctgacttaggggactaaagagaggtgcccagaaaaacaaggatagaatcaccaacagctaacgcaggacagaaataagaccttccagtgtgaagctgaagggagctcagagggagagaggcatgcgggctggtggaagcacttcccaaagggaggacc

SEQ ID NO: 28001 - DNA, 793 bp, Bovine  19866881371053
  misc_feature (1)..(1): n is a, c, g, or t
nctcatctggacacacaggcacagctgatccacttctgagcccctgagggaaccatgtcctggggattcttagcttttatccctcctccatgctgtcacaagcccttgcccaggacctgtcttctttgatcctcatgattagctccttggtgcacaggctatgattcctcccattttacagatagaaaactgacccacagaggcacaaggttacttacccaaggtcacagagttagtacttggcaagggttcagatgcaaaccaatgcctgtctgactttcaggccacactctgcacgccctcctctcttggcagattctcttccctgccctggactgccccaccccaggggacaccagtatatttaaacattttagcctcagtgtgggtgtgtagccaggggcctacacatgcttctgttaaaaccttctactccagcctgtgtgttctccataatctcagtgattggattctccttaaactgagccccagctcattttcctccccatctagctttgttttgccctcatcacagctcaggggcaggcctgacccacagctgtggcttggaagggacacattgttgctgatactgtgaccatcctcttccttgtagagcacgatgctggtttcattgcccctcaccacagctctaggaaaagggcagggcaggaattgtgcccattttacaggcaaagaactgagactcaaggcttgacctaggcacactggggatgaggaggagcggaaaccaaaggcaggtctctatttttcctctcatattgccctaaga

SEQ ID NO: 28002 - DNA, 741 bp, Bovine  19866881381884
  misc_feature (1)..(1): n is a, c, g, or t
nacccccacataagccttttaagatgctcaaaccccagtctagaaaaggaggaagatttacctaaggccaagctgccaagaggtaggttgagaattgaactgaggactgtggtagcaactagcccagggcatcttcccctccacagtgagtgccaggaacacagccatcttctgggtagccccctgcaccccacttctgtcctccacttcacctttccagactgtgccatctgtctggctgcaccctctcccactgcctcctgtccccacctacaacccacatacactccacatctccctctgctcccacctagggacttggctccggtgtgtttatctcagagaagctgcacgggcaaaggtctgtgtttgtaagatcccccacctctgtttactggtgtttatccagttgtgtcctgtccgccctcctagccaggaggccagggggccagaaggccaggactgctcgtcctgcctgctgggtgctatcccccactccccgtgggctttggacacaggcacgggccagaagccagccaacactgtgcccgcactggggcagggctcagtggctgacacagatataaggacaccctagaggaaacagggctgtgttttgggtaacaggacccagatcttagcaatcagagtcagtataaagtgcgaggttccattcgttgccatttactctatgtagagactgcactaagtgctttacatgtacatatcatctggcttaag

SEQ ID NO: 28003 - DNA, 1428 bp, Bovine  19866881409404
  misc_feature (1)..(1): n is a, c, g, or t
naccccatgaagaaagaaatggcaacccactccattattcttgcctggagaattccatggacagaggagcctggtgggctaaagtccatgggatcgcaaagagtaggacacaactgagcgactcacacacacgctgggaatgaagaggtcattcctaaggctgaggagggctcaatgagagatgctctacctgaaatatctgaattaataaaagcattttcattgctctgccaagttctgcagtggcaaactcaatagtaacaaagctgccgtggctgtccctgggccgtgtccctttaatgaaaggacgaaagactctggagacaagcccaggtagcagctgggtcatgagcagtggttggcaagtctgtcttcagaatattaccaataaaacaacaaccaataatagctaattcatataccacatgctgtttgcccgccactctttttagcacctctcacgtgctaactcacttaatcttcacaaccctatgggggaggtattgtcgtattatccccatttcacggatggggaaaatgaggaacagagaagttaagcgccttgcctgggtcacacagccaggaggttgctgaggtggggtttggatatctgcaggtaagctgcacagctcctacgcttgagcattcatgcagaccgcctctggattcttcggtggttcagtggtctctctgccatcctgttggtcctgatggagctccacatactctttcttcctggatgataggaaagcccacgccggcctgattgacatccgcactcctttgtaaagaatgtactccagtggatcttctaggcccctgctggtttcccctgtggctgccccctgctcctcacccctccctggcatccccccaggcccccagccctgccacccctttgtggggaccatggcccccagggccagcctggctctgcgggaccggtgattacaccctccctatggaaaatcgcccgctgcgtcctccccctactctgtgtgctccctaaacagctgagcccgtgcaatgtgagaggggcggctccttgccagaggtttccggaaagcatccagaggtcactgtgggctggcttaagtaggctgggccctgaccaccgctctgaatagccactgtcccgcccggggctgctccctcagctccagagggggctaattggtgggtggggagctgtggagggctggatgctagtttgcagctgaaggaggcgacaggagagccaggcatttagttcggtagctgccaaatagcaaatgccaagagaagatggaatggagcatacgaatcttcaggctaaaactgccttcccaagccccgtctttgtgtttagacccaacctcctcccgacagctggcctacccacccacctccctaacaagcccacccagaccactactagccagccagctt

SEQ ID NO: 28004 - DNA, 1347 bp, Bovine  19866881434738
  misc_feature (1)..(1): n is a, c, g, or t
nactgaggagggatggcctatctccagggaggtgtatgtggagtctgattatttccaaacatttcatcagcagtaggaagactttttttttgcaaagaaaataacaaggagactccacagtgtaaggcaggtaagctctgagtgtgtttaggctaaagacaggggtggggatcctaaagccacacctatcagcctcttccttccccttcccactacaccctgggggatccttgggttccaagaagacaaatctgatcttccctgacagtgattttaaaatgtctctgggaaacaacccaaatgtccatcagcaggtgaatgtctggtacattcacacagtggaatactatacggcagtgaaaaagaaccaagcaccgcccaggccatgccagaaaagaaactctgacacgtgatgcggagcaaaagaagccagatgcagatgctgacatactgactgactccattcacaagaaactccagaactgaagacagatctaagctgtggtgacagaaagcagatcagtggggtaagtgtgagattgactcttgagtctcatgaaggaattttctggagtgattgaggtggtggatacaaggctatatacatttatcaaaactcaacaaattctatacctaaagtgggtacattttattgtatgtacagttaattcaaggttgattttaaaaattaaaaaaaaattttccatgaaagttttgtttcaaatagctatttcaaataatatattttaatgtttgcaaatgaagctcactgattccagaaccatttggtttataccaatctctgggattgaggcatcgtatgactggtgcttaattctggatttgtatcatctctaaatgtgttctctggcatatggccactaaaaaatattgaatgacataaaatgtgagtagtttaagaatttcttgatctctcctcttttctctgacttggaagttaaagcaggtggtgatcattttaactgcagatattcaccgagggcctatcactggtgggcacccatgcaggatccaggcttagaatacactggttttccagatgcaaataataaaattgatttccaggaaaggtggaggattgctgctgattttttaggattatactttattagtgaaaggttgggtaaaaggagaaacatagaaatgtcttcctccataccactattttttcgatgctgctgcagagagaacccagcatttatcttttgacaagagcaccctgctgagttggtgaagagccactctctaaacttctggaggggagacctccaggcttgtctttcatgttgcccactcccagccctcagcccagcacccggggggaat

SEQ ID NO: 28005 - DNA, 1241 bp, Bovine  19866881809440
  misc_feature (1)..(1): n is a, c, g, or t
nctgaagtcctgggggacatgacttgtccggtgcccagggagcccgtggtagaaccagaactgaccctcaggggtcctgtgcccctgccgagtcgacccttccctcctccctcagcctctgcaaagacaaggactggttctgaaaagtcaaacagtccctgctattgttccaaggttggctggaggtggaggtcagaggttttggagtcattggaaagaagagggatggtaacgaggaggaggggggtgaagcaagaaaacccctctaatggccttatcttggttcccctcagggagacccagggatccagggctaccacggccggaaggtaagaaggaggggaaaggaggaccggctctccaccaggtgacaatccacgtagggcttcaccacagtgtacacagggtctggacttggtccatacatgcttttgcacacacatcagcaggggcctcaaaactctcgaatttaaatgatcagggggtttgtgtctccactgaggaagcaggaggctcagagaaggaagggccttgggcaagtcagtggccctgctgggcctcaggccaggaatgtgtcccctgccaacccaactggccgtgtccgcacagaggcagaccaggttctcacctgccccctgagagcttagtaagtggagaccaggcagagcttctgggtatggtaggggatatggatggtcccaactctgctgtctggccactcacaggccaaagagacagggttcctatgcaaataaccctagtgaaggcaattgcactaaccactaccatcccaaagcaccgtgtcagtattggggtagggggttcagggaaattcattctaggttgggaggatctcgggaagtcgtctgagagaggacagcctctgagttcaatcctggtgaatgggtaagtgtatccgttatctattgccgtgtaacgaaccatcccaaacttactgtcttaaaacaattctttcccaggattctgtggcttggccagctgtctcctcggggctcactcatgcagtcacatgggatgatggctggagaggccggggggccaagacagcctcgtccacacgcctggggctggcgctagctgcggcctgggctcctctgttctcctccacgtggcctcccagcccctagtgtagggcggatggatttcctcacagcacggcaggcccaggtcagccttcaaaacaggcgagtcctagtgcacaagggcttttcaaaaagcat

SEQ ID NO: 28006 - DNA, 982 bp, Bovine  19866882110530
  misc_feature (1)..(1): n is a, c, g, or t
natccccaattgattgattaattagttcagaggatggggtgtgagcattccagtcagtaggaatagcacatgcaaaggccctgaggtaaaaatgagctcagtgtctgaagagaaagggtggagccgcctggtggagctggtgaaaaggagggaggtcatgcctccagaagggcacagctctggcctgtggggtttgtaaatttcatcactggtgaaccaaaagttttaaacggggagccgcacacttcatgtactattcatgaagccgcacacttcatgtactattcaggtagggagagaagagcctactgtggggtccaggtgagaggcggtggtaacagaggatataggagaagaggagaggcctgggctgtgttttggagttgacattggcaggccttgctgctgggccgtctgcactgaggggagacggagaagcaaggcaggacgcacagcttttcagctggagcactgggttgtgtggggcgtggggctggagcgtggctgaagccctaagtgccgggttcctggaggcacggcagcagacctggaagaagagactggagggagagtcagtggccttgaaggcgccggctacttaaggatcttatcattttcacacccccagctgtggcatctgttgactggagtgaggagttggttgaatggcctggtttcacttccagttcatcagttcatgcccgggtttatcaggtgcagagaggggctgggtttgggaggagggagagacgggcctgtctgtatagttgtggaacacagcttgttggctggtgtgatgcaaagggcccccagagtaaagatgtcctgagttccccttcccaccacacggctcccggcgcacttccttctccactgactcccgcctggctaggatgaggggccccctttgaaacttgagcaaggtaaatttaggacaaattcagggaagtcctgcttctcacagtaactcgggagctcaggg

SEQ ID NO: 28007 - DNA, 1929 bp, Bovine  19866880482506
  misc_feature (1)..(1): n is a, c, g, or t
ntcaatttgactgatgttaagtgtaacataccccattaaaagactttggaagcttggggtaacccttagaaatattctcccattacatcttccctgtcacaatattgtatgaccaagacccaggttagactaggctgttacaatattccctaaaatcaatgtcctaattaatctctaagagtaatgtgtttttgacacagataaatatattggtatacatatcaatatagtacatgtatattatatgtatatgctcaagtatacatttatgaatatattcttacttgacaccattaacctcaactgaagtccacctacctttcccatccctacaatttatctcagtttaggtagtgcgctccccaggaacatttttctgagcccttacttcaacgcttctgaagtgccatgtacatacctctgccactgcatttgcttacaactgcctgctttagtcagtctgcttgacttaaattattctataagcaacttaaggggacaggccatacattatccatttgcataatcactgagacatgatagaagttcaaaaatagctggctgacttaaacagacatttagtcatacagtaattactcaaggtaaagatagatggtgatgtgcactggagaattcaataaggaattcgggcttaccctgtggcttcatacctttactggtgacagaaccatcatacaagtgttcagatttctgcatttttcattcagtggtatctacctctagtctccatttccattattatcctgtattacactaatatgacttatggtagtctagggctcttcgtgcttggagctagaaatcaaagaagctattaggaaaaaaaaaaaaatcagagcagtattaggtagcagtccagaaaatatgttaagcagacaatatattttaggctgtgtacaaagactataaaaggaaaaaaaaaagacaaaaacaataaacaaaaaaaaaagtaaaatgaatgcaaacagccatggaagcaagcaaacaaactacccaacctacttctgcattcttccactttggagaaattgcaacattagaaccatgctggccaaattaggcctcacacacagattccattatgtaagctcactgattgcttgatttaacccattggaagcaccagaatcttggccacagtgttagtttggttgattagtcaggtagctttctttaatatcacctcaaggggttgtggcttttggcaagaacagaactaatttcagcttaattgccacataaagttttccctaaagcacagaagccactgaccttatgctgcttcctatgacacacttttcaacatccctcctgagtgtaatgacatatcctgggttggctgtttaacagcttatgcctacagtagatgattttgtcaccactgtcattttaccttgcctgcaaagaggaaaaatgtcaagagtctaaacctcagacctctgaactcccattttgttgtgtttgaaacaacttccacaacttccagtagctgtcctttgtccttcacagggattcttagcacaggatgattcaaacgctaactcttcttctccaaagtcctttcacctgagtgtagtctctcctccctgcaaagtagaaaggattagtgtatcttttcctaaatatagcgttcattttcccctctccaccagtgccttaaggataaaaaactatgttttatacacctttgagcttgctacaacatgattaaacttctatgttctattgattctctacttatacatcacaactgtggttccctcatttgttctaagaattctgtggtgtataatgtctttgtagtacagtttatggtacttgtgtattcctatagtgtttggcaagctcagtaggaccacacttaattatttgtattactttcaaattttcaaagaatctgggaagaaa

SEQ ID NO: 28008 - DNA, 4085 bp, Bovine  19866880522678
  misc_feature (1)..(1): n is a, c, g, or t
ntttattttttccctttactggaaattccagaaaacttgagggggagatcctgagcatcctggaataaaccaagcagctgaaagaagaccaggggctatggtaaggtgagtgcagctggaccctggtgccactcaagatgagagctgagtcctacacttttagcgctaagaacacagtctccttacagttggtgtgagtggtagagagtattgtgggactcctgtgaaaacaatcaagtcacctgggctgacaaggacctgagacaaccacagtcatgaagaagaggaaacacagacaagccctggagaccagctgcagcaaggattctcccctcttcctgggaactttcttcccagcctcctttgcaactcagttctagtcaattccaggcctgtccccttagaaacatcccttcagctcattccttcccagttgcaatattttggggaccacattttcccgatggtgcagctacaaaaggaggaggatttgtgagtaacattatgttaagccactggattgcagcattaatttgttacaggagcataacctaatccactctgattatattccctctgcaacagagacttgtcttgattggtataaggtgaattacctacaaatgtactagaaatacagattcctaggatccataccaagtttctgacagatttcctagagttcagataacctggggtgtagtatgtctggtacaaaagggaatgaaaaatgtcaagaaaaatacctaatgaggaagctgcaggatttctgtgacagtttggttgaagcattggagggaaaaaatgtcaaaggcttctagcttgagaggctaaaaaaaataataataaaataaagtgacagtctgaagggttcattttagagaaaaaggcaggtttgatttccaggttcagctgcgctaagtctgtacagttggcagactgggcacacggatgaaggcaggtctgtgggtagggggctggggtgggactcttgcagagagtttctgagctcccccaggagtgagctggtagaaggtgaggcctgagcataaagagatgcccacaggactcagagaaagtggagcaaagagcaggcataaaatagtttggagggcagtcaggccagcagttagtggcagcaccagacatgagggcggggtgtgctgaggccacagctggcccccctgtaggcccagatctttgggccgccatgaccacagctcaggctccacagcccacccccattccctggcccttgctgtccccctcctgctcctcctcaccccacttgggtccatctactgctctttctcctctgctgaccaatcaatgccctttgtaccacttggtctttcctgggcgtggcctcctacccacagtgccttccccaggccccttctccccaaaccagagcctagaagttctgctacccctctgaaccctggatagcccttctggagcagggtccctcctttcccttatctcctccagaacccattatttgtccagtggttcccagcaagactttgctgtcacatttgtggtcgccattatcttcatctactaaagatcttagtgccatggggaatggccttgtcctggcccctgaggggagtataaaacattatagggaccctatctcagtctcaggcttccctggtggctcagacggtaaagtgtctgcctgcagtgtgggagacccaggttcgatccctgggttgggaagatcccctggagaaggaaatggcaacccactccagtacgcttgcctggaaaattccatggactgagaggcccctcagagcctggtaggttacagtccattgggtcgcaaacagtcggacatgactgagtgacttcactttcacttttctcctgctcttaatatagtgaagtactgtgcaccagttatgagaaaatataaacatacagtaaagagatagggaggatagaaataattgtattcatttacatgtaaaacaaatttaagaattaatgaaatatataaatattcaggcacatattgtatattaaaaacataattacaatggaaaatgtaagggtttatactgagataattggcatgtcaaacagtataaataagaaagaattcacagctaaaaacaacagttaaattaaaaaaaaaaaaaatagatgaagacaaaattccaaaaaccttctgaagagtgtaagctataaataataagaattacactgacatgcttctcagtgaaaatactgactataaaaagacaatggagtaatattttcaaaatatcaaaagaaaataactggaattttgtatcgagtaaaataacttgaatatcaggaaaaataaatttattaagtattaagggtcatattaagttcagaaatttaaccaatccttattcttagaaataaacttgaagaaatatctgaatgaagggagaaaaatacatgaggacattataaaatatgattagtgagagtgactaagaggctaacaagatttgctattttattaataaacagtcacaaaaaggtaatataggtgtattagtgagcgttctccagagaaacagaagcaataggttaatattaatacattatataattttatatattatatatccattgtatatatccaatagaatacaaacccaacatatactggaatattactattccaattttctgctagaacaaagaggttctggttcagggaggtagctataaactggagacacaagaaagagcctaagagcggggagtccgatggattccagtataggactaaagatttgagaatctaaattgctgagggaagaagatggatgtcacaattcaaacttccaggcagagcaagtaaactctctcttcctccaccttttagttctcttcaggtcctcagtggattgcatgatgccgacccatgctggggaaggcaatttgtttgactcgttactgattcaaatccctggtccttctggaaacactaattcacagacacatcctgaaataaacagacatctgagcttttaagttggcatataaaattaactatcacagtaggtataaaaatactgaagatagattttatgtaataacagtacaatggatttggggattttcttagtctgttcaggctgctaaaagaaaatactacaatagttattgctcagagtgttggaggtcaggcagttcaagatttaggtgtgggcaatctggtgtctggtgaactgtgtgtgcatgcttttcaggaagaaataatcatgaccgatttttccaccagtagaagttctgccaagtgaagttcatctgaagtgctatattcttctaactagggaactccaaatgatttatcacatgtgagatcctaagaaacagtggtgatatttttactttcaagtcagtctgattaatcacaatggaagaaatgaagtaaaggctttggaatgaaggcccacccatgagatattttccaatagtaagtgtaatatattatgtatgaaggagaatcaaaataacaagaaagaatgccaaaatacttaagaatgatatgcagctccttctaatcttatagttaattatttaatacatttggttctgaaatgcctaagtattaaatcacacatttttttattcaaaagagttaatttgttagagagtttaaactctctcaaatgagaatatatatatataaataacagctggcattataaattttaatctcaaggaatttgagtatagtatggtggtggtggcgacgaaaggagttaccttgtgtccgaggtcaggggcggggaccaggaggagataccccatgccccaggcctgaggccaagggaggcggccaggaggagcaaccccacgtccaaggagccgtggctgcacgggcgcaggagggcctagaggagctatcccacgttgaaggtcaggaaaggtggtggtgaggagataaccctcatccaaggtaaggagcaatggctgtgctttgctggagcagctgtgaaaagataccccattctcaaggtaagagaaacgtgagtaagacggtaggtgctgcaagagggcatcagagggcaaacacattaaaccaactc

SEQ ID NO: 28009 - DNA, 1568 bp, Bovine  19866880607838
  misc_feature (1)..(1): n is a, c, g, or t
ngtgtaactaaattaaggtgcttgagatgagatcatcctagatttagggtggaccctaaattcaatgagaaatgtccttataagagagatggagacagaggcttgagacacagagtcacaggggagaaggccatgtgaaaacataagaagagattagatttatgcccccagaagccgaggaatatatgaaggtattagaagctaaaagaggccagaatggatttttgaagggagtatgggtctgacaatatcttgattctaaactggcctcctcaaaactgttaaaagaataaatttttattattttaagccaccagacttgtggtagtattacagaggccctataacactgatacactgctactccatatgaagattatttgattgattatgattaaatatatacattaaagataacaagaaaaatagtgaccaaaatgcacaccatgattcttggcaaagaactgcttctgaaatgacttttgtatttttaatatttaattctttggcaattacaactgtgaaaaatatgtatttacatatttttgcaccattttattggaaaattttatatgaatgctagactggaacagaataatgcaataaagtcataaaagatacaggaaattacagtaggattttataactcatggtataaaacctgttgaaaatgcagttgcaaaaatctttactcaataatttactcaacaattatgtatggagtagctatgttcttggtttacagatctttatgatcaaattcttaagaaagatgcaatgagaaagccaattctacttttggaaagaatcatggctccgcagaacatatattggtttgtcaacattttatcagtgacttatatatgtggaacagaaatatctgtttaaaaaggtacatgcttttacaatgcaacaaagcatctcacctttattgcaaacacagacaaacataaattaccactacacacctaggcaaaggaataccaaaacatgcaccatttcctttgaacattctcaagtaccttttcatgcttgtccttggtagccaagtacattaatccacgttagaaccattgcaattgatgactcaagacttggagttttgtatttatacatttacttgttgttgttcagttgttaaatcatgtctgattctttgtgatcccatggactgcagcacatcaggctttcctatacttcactatctcccagagtttgctgaaattcatgtctattgaatcggtgatactatctaaccatctcatcctctttcaccctcttctccttttgccttcaatctttcccagcatcagggtttttccaatgacttggctctttgtataaggtggccaatgtgttggagcttcagcttcagcatcgattcttcgaatgaatattcaggactgatttcctttaggattgactggtttgatctccttgcagtctaggggactctcaagagttttctccagcaccacaatttgaaaggattgattcttcagcactcagccttctttatggtccaactctcactttcatatatgacttctgggaaaaccatagctttg

SEQ ID NO: 28010 - DNA, 621 bp, Bovine  19866880705711
  misc_feature (1)..(1): n is a, c, g, or t
natattgtgtaatgagattgatctcaggtgccctgaagccacatctctggattctttattcatcaacatctattcagtttagctgggagacgagtacacgctaaactgtaagcgaaacctcttataaataagaatgacatatataaaatgtccttataaaattgaagtttaaatctaagttatcttctattttcgaagggaagtcattaatgttcaagaaatgaaattttctccccaaatgtacaaatagacaaatatttagccttatatttaggattcttatgtaatcgaatgttgagattctacaattgctgaggaaattattcacatgaagaggtctaaaacataggcttattttccaaaacaatataattaacaataaaactgttgacaaagtcaaataatgttgtcatcaaaggatgatgttttaatataaatagttacctggaaccacagtagtgggcaccttctcactgatgctcttaatgcaaacaaacctgtattatttcagtgtcctgaaagatggaatgactttataaataatcatttcaaagaatggaatctttatataaatacctgtataatttgtagagttaggaatgtaacatattagctataagt

SEQ ID NO: 28011 - DNA, 1116 bp, Bovine  19866880751726
  misc_feature (1)..(1): n is a, c, g, or t
ntccatatatttataaacacacacccagatacatgttcactctcctcctacattctataatattacataaaatgttattaaaagtgtcaaatctgaatgaatctattattattcttggactctgagtctttaaactttctaatatgtttatgcctaaataattcaccaagcagcttaaacacaagatttatctcagatccaatagatatggacctctaccctttcatttgtaatgaagagcagattaaagatttcactaatgaaaatgactgagataatccagaaaagctaaaacagaccttcccaataaacaagccagctttaaacattgttaatctgatgaggctagagagagtttaattaaaattctatcttccatttatctaatattcatggtaaaatagctccttaaacacctttctctttaacatgattctttttcccctctttggtgatgaatggaaaaaaaaaaatgaactgaaatagaccaaaaccatttcagtagctctattattataatttttggtagaaatcacagggcttagttggtaattaagatgaaattctgctcagtaacttctttgggtctcccatgtgtgattgaaggtaatataatgtgagaagttttattatctgtgcaataattcagtactagtagatgctgcaggatgtagtgtaacaacacgtatttgcttatttgattctcaagttagtaattctagtaggtgacgtgtattagtagtaaggaaataaaggtggttactaggacatggaataacagactggctccaaattggaaaaggagtatgtcaaggccatatattgtcaccctgcttatttaacttacatgcagagtacatcatgaaaaacactgggctgaatgaagcaaaagctggaatcaagattgctgggagaaatagcaataacctcagataatatgcagatgacaccacccttatggcagaaagtgaagaagtactaaagagcctcttgatgaaagtgaaagaggagagtgaaaaagctagcttaaaactcaacattcagaaaactaagatcatgacatccagtcccatcacttcatggcaaataaatggggaaacagggaaacgggacaga

SEQ ID NO: 28012 - DNA, 1584 bp, Bovine  19866880778550
  misc_feature (1)..(1): n is a, c, g, or t
ntttctatcggatagctatacaatcaaaagaactttgtagtcaatctattaaactttctatttgtcctatgagatttagaaaagcatagtatttaagtattgtgcataatataatgaattttaattatcttgaaaaagcaatgctacattgaaaagtaatttaaaattaattctcagttgtaacttggttgattcaaggagaaaaagagatctctttttctctgaacatctttatataacaaaatggatattgctgtactacattttcatctccttttcaaatatttataaccaaagacaaataaaacatggaatgaatctttgataatattcgttttgcttgatttaactgttcttaaagtccaagtaaatgaaagattagtaggaagaggtggaggaagaggacaaggaatggaaactgttttgtgttttcgagtaatgacatcaagaaaaaatacaatgtactattactacatcaattctgtcttagcagagttatatcatagagtagttacaacataaagtatttttgctctgaaattatttacagcctaatcattaaggtctaccataccaactttatatagtttttaaggtccaaattctaaatgtactataatacatataactacatgcttataagacaacttttgattcattgacaatggctttgagttaatgatttcataaatataagttgatacataattttgcaatgatgcttattattcctggtatcatcatacaaaggttgttatggcttgaatatttgtatactcccaaattttacatgtttaaattttaatgcccaatgtattgttattaagaggtgagtcttctgggaggtgcttaggttatgagggtcaagtcctcattgatgggattgttgtttttgtttagttgttcagtcatgtccaactctttgggaccttgtggactataccctgccaggctcttttgtctaaggaattttctgggcaagagtactcaagggggctgccatttcctcctccagatgatcttaccaacccatggattaaatctgtcatctgctttggcaggaggattctttaccactgagccaccaaggaagccctcatgagtgggattattaccctttaaaaaaccacagaattctcctgccctttccacaaagtgaggaaacagtgaggagtttgaagtctacaacctagaaaaatgtcttcactacaacctaaccgtatcagtacaccttggacttccctgactccagaattatggcaaataaatttctattgcttataagttacctttcctatggtattctgttatagaagtctgaatagactaagacaagtatgttcctgtgttgaaatctcacctaagatagaatctagtaactatattcagttttggcaccagggattctcaaagtagacaagcttattctccagaggttcctatttatttattcatccagtattcactaaacatacttagaaataaacaaaaaaaaatctgttgcatacaaaagaatttttcacatatgtatagataacagtgggactcaaagaaatgagaaatacagtgacaatgtaactgcta

SEQ ID NO: 28013 - DNA, 1133 bp, Bovine  19866880836957
  misc_feature (1)..(1): n is a, c, g, or t
ntagttgccttaggtgagttactaggattctctgatttttttatttttttttaacctaagaatagagcagagtctaatgccatgaggtctgatctgagaaccaggtttaaagcctgactttctcatctctgcatcctctgggatgcagtttcctcctccagcaggcaactatgtacatattatttaacttctctttcctttcttcatttataaaatgaaaataatagtagcatctactgcaaagggttcttgagagtattaaataaattattacatgtaaacccctagaacagtatccacactagcaaaataataattaaaagttaactgttaatgacaggtctatgaatggttgttggagattaatccctattaacatggaattaaagtaataaaaagaaagatcatttgaaataaattaaatctctgaattagaaaaaacagtttaaaaagacacactaaagtgttgctgggaactacacttcttacatttgaactttctagtctaaaatattttttctttaattgtgcaaaatgcactatatatctatagctagagaaatatatatgcaaatacaaaaacaatttgggagaaagaaacacttaacatgaaactgctgaagcagaaatacatttagtacatcaaataactgaaaggaagtgttgttttattagagtgcctctaaaagccattagacaatttaaagatggttcatttctttaagtgtacagagactgatgcactacagaaagttcaggcaaagcctcttcaaccatcttcctaatgccacttttatttataaatagattattttctggagaataccagggacttaaaagccatctattaaaacctcttagctgataagattaaggattttccttaagataagaatattattccaaaaaagttggaaatacattttaaactaataaagttattgctgtcatatttttgggggggggatatttcacccttggtataagactcaatcctcctttttatgtccagaaggatattttttaaaaaacctttttagagtaaggaagaatagtaagaaatgccctactatcaattttgaaaaagaacaactgaaaagcctgttgaaacctaaatgatggatgatcagtgg

SEQ ID NO: 28014 - DNA, 1468 bp, Bovine  19866880917549
  misc_feature (1)..(1): n is a, c, g, or t
ngctatcattttttcctgtggtcatgtatggatgtgagagttggactgtgaagaaagctgagcaccaaagaattgatgcttttgaatggtggtgttggagaagactcttgagagtccctaggactgcaaggagatccaaccagtccatcctaagggagatcagtcctgggtgttcattggaaggactgatgttgaagttgaaactctaatactttggccacctgctgggaagagctgactcatttgaaaagaccctgatcctgggaaagattgacggaagggggagaaggggacgacagaggatgagatggttggatggcatcaccgactcaatggacatgggtttgagtagactgtgggcattggtgatggacagggaggcctggcgtgctgcggttcatggggtcacaaagagttggacacaactgagtgactgaactaaactgaactttatttctcttatccaaatttcaaaattgaagtgaaatatatttagattgttttacaatgccaaactaagtatttcagattgctgaaataccagaaagataacaaatctgttatctgtcatctattatctgcttacctttctgtctccctgtcatatcagtatacttatattttctttttattttttttttttaaattgtcctttacatttggcctatgctattattagatgtgtttagctttccttttgaagctactatagtacttatttcctatagagctctttgatttaacacttgaactcttaaaaaggtgtgctatgccatatgtaatcacactcagaatatgtgaaaatttccaggccatggaggctaaagtacgtaatttaggaagtattctttctcagaagagcaacatcaaaaatcaacagtgcataaactaataaatctaaatcttatttttgcataattctcccagagaccatcactgagattccttatacaaattttgcaagcaatatattaagaccaactagttactaaagttgtatgtttctttaacttggcagaaagtattccagagttaaaatttctattgaaaatgtcatcctgaagaaggggttatgatgtcttaagtgatttcactgtccctctggatctgcatctaatgatacctcatttacttagctctctgaataatcaagctacattataacaggcagctaacttaaacagaagaaaagagactggcacagttcttggggaatgaaacagttctggcagtcaacaggttaatggagtgtaaggagtagtgttttctctcctcagtggtaactactacctagcaccaggaaaggctatttagaaacctaagtaggtcagaataggcttccagacatatagcagaggggaaagcctgatttccacaactcaagcagttggcgaaccccctgaagagaagtgggtcagttgatgacggagagtcctgaattaggagttctttccctgaattcttatct

SEQ ID NO: 28015 - DNA, 1204 bp, Bovine  19866881368939
  misc_feature (1)..(1): n is a, c, g, or t
naaaaataatgtgtataaatgaatgtaatacacattcaatatacacacacacacacaaatacacagaaaaaagctaaaagtatgtttgcattttgttaggtcataggattaagtgctttattaattatatttattttttaattttctctaatgttgttacttttatatcgaaaactagaacttaggacttaaaatatgatactgattaaaaagcaaagaagataaagtcattactcataattctgatgctctgggattagagactttcaaaaatcagaatcagtagtggaaaaagtatagtgttgctgatgacatctcttacaatatgatcaacttcttcaccactcagaaactaaaatgaggtgaaatattactcttggaccctgcaggatctattttgtcttcaaaaaggaaatacaggctctccagcctatagttttagaagcagaaaagtatactgtcctcgagtctatttaggattatggtgtttttactatccctgggttgggaagatcctctggagaagaggacggctacccactccagtattctagcctggagaattccatggactgtatagtccacggggttgcaaagagtcggacacgactgagtgactttcactacagtttaaagattccttcttttcttcattttccaatatggccatgataaagactaggaattcttattggataaatatatgacattcatttgagtaatagtttagatgttattattgtcttaagcaaagagttatgaaaataaggagaaagtgttatgtttcactttggagattatttgctgaatgaagaattcacgattttaactaggcagctgtcgtagctatttacaaaaatgcagtctccttgtagctttaattgttaagaaaatcaacaagacaaatatattttgtgcttcaccagtctttctaaattatctgttcaaattaataatgtgaactgaatgaaagggtgaatgactacatgctaaaaataaaatttaaaacagtcaaaaaacatgggtttctatagccagaaactgcgttatgtacatgtaaaatacttttatacaaacattcctataataaccattctttttttcagaacagtttgccattaaccatggtaagtgacatttttttttttttttttttgccaagatatgtgggatactttgagatcaattcctgtaaatatcagtt

SEQ ID NO: 28016 - DNA, 735 bp, Bovine  19866881595411
  misc_feature (1)..(1): n is a, c, g, or t
nacacactccacaggcagccatctgtgctcctgtctttaagttttatcctacaagtcttttcctcatgacactgctgccctattacataaatcacagggacattcaagcccttggaatggaatcagaaacccaccaaagctgactgctgtcaggactcataaggagtgcaattaataaatttattatttaggagtagagctgttttcattccaaaaattcatgcaaaattggagtgttatccagagtacatatcaaagtaactaagctaaaagtgtcttttcatcttcaagttcacccatttgacagtcattatattttctgcttcatctctgcttctgtaagctctgctggtgtcagaacacatcattcattcattcaatcaacaaagatctacttaatgccagttttcttgtgtgtgtgatgaacaagacaaatccctgccatcatggagcatatgatctagattttaaaatttatttctgtacttgaaactacaaaggtagcagaatttataaagctgaaaagaaagtaggtaataattatgttaaagagaaataaaatattaaaaattaaaaatggtaaaactggcctgccaattagcagaaatgcaatatgatatagttaaacattggctaaagcaaagtttcatagggatttatagaggtagtgtggtcattgagatgtcaacataggttgttccgacttcagttcctctcacaagtagtgtgtgtctg

SEQ ID NO: 28017 - DNA, 745 bp, Bovine  19866881616027
  misc_feature (1)..(1): n is a, c, g, or t
natgttggcagtttgttctctgattcctcttctttttcttaatgcagcttttacatctaaagttctcgggttgacctactgctgaagcctagcttgaaggattttgagcataaatttgatagcatgtgaaatgagcacaatttacagtagtttgaacattccttatgtaactgtatcctatgttgacttcataggacagttcatttgtttgtttgctataattggaagataattgctctacaatattgtattggggcagttcatatttgagtaaagttcttaaaaattcatcaacttattattttaagtttatgcttaatccctcatgtgtgttttgttttgttttgttttgttttgtcttctacttaacagagtgtccattgtcgattcaactttgggcccttactgtctaacacaggaataaacacctacaaggccattaattaaaatttgttgactgggttcaaaggttacagctctcttgatgctcacattcagccagcccctggtgtccacaatacagcactgttacagagaactagctctatggtattgaaagaagaaaccacatgctgagttagaattagccttttgagcatgtaattcataattgaattcataaataaattaattacttaatagatttttaagtttagagaaacataaataaatatttacaatttgttataacctataacttggcactctaaccttaaaaaattaagaaataggaagatctgtgccc

SEQ ID NO: 28018 - DNA, 950 bp, Bovine  19866882145273
  misc_feature (1)..(1): n is a, c, g, or t
nctctgaactgaagatgtataattcactttacagtttactttgaattgaaaacaagatcttattgaactctagtcattccaatgtattttaggtttcccatgtaatataatttatttatagaaattatggtatacttgaacatcattttttctgttgcatttatgctaaagcttcaatgattcaaagaagtcagatctaaaaagcattactttttgcaatttccttttcctaggatgaatggatatccaattttagtaatattatccaacagtattcaaataacagcatcaatttaaaacatagttattactccttaaaaatcaagtactaaaatatacaaacaacaaaatctttgtcaaattgtaaatgaaatgaattcacacaaactgttctcgaaactttctaacctaaggaatttgatatcatcgcctcaggttattagatttagtgactgcaatatacttcctaggagagaataagacagaatcagccactttttgcctaaggctgacctaatagtgctcctggcattttcttgtttgttttttaaaaacacttcacggggtcttatacagaaacgaagtttggaaatctatataaattaagaatgatcttttgataaatttgtcttttactacatcaaattaatctagctggacagaatgtcattaaattaaagactatgttaggaattatacgaagtaatgctatttagagtagctgcactttgaaccatgggttattggtccaagagtagctaggcactgagagaaaacataaatcattgcttccttttttcgagaaagtcttgatattaaaaaaatgtccgctgaaatacatggtgtgtttaatgcaaagcgatttacatttttgtacaagctctttatctccttgtgaatcatgacaaatatttcagaatcattattaattttcatatttgctacattat

SEQ ID NO: 28019 - DNA, 1512 bp, Bovine  19866880389633
  misc_feature (1)..(1): n is a, c, g, or t
nctggggttggggcttccgtcctgggcacctggctgtaagatctgtcattcaaggccctgcacagccgaggctcctggcatggccccaccccccaaccttggtcctgctggccccatgagagatgcctgggtgcatgacagcagaggatccaggtccccccagggcatggatgggtagggcaatttctcctggccaggttccagctggctggtctgtcgcacagggctgggaggtgaagcagggctctcgcttctggggctgctcgtgagggtccttctgatggcaggggccccttttggtgggtaccccccacccactgagacccatactggcagggcccacactggatctgaaccatctaacacccctgaccccaaatgcaaaccaagtccacaaagatagagaacagaggcagagaaagcagggctgagaatgtttattttcatgcccaaaaagccagcacagacctggcagacagcagtaccacagggcaaagagtgaaggcagcagtgtcagatggagccaggccctgtgccaggagggcagctggggccaggccagcaggaggctcagtccaggggcagaaaagggatgggtgaggcaggcagaagctggaggcgccaaggggaggtgccctggggcggaggaacagcaagaaagaggcagagagggcagccggccggcgaggaccaggctacgactgcacgttgagcacatgggcagagcgctggtggtgccagtcccggaggcgggtgtagcgtgggctctgcagctccaggacatacttttccctgaggggcagagagagaaggaggaggaagtggaaggaaggagagacggaagggaggcagggagggaggaccagaggaaggaaggagaaaggatgaacctggctagggatggccaggagcagacagggctggaatgggagaggccggagatgagaaggaggggctgcagcatgtcctgttaccttgatttcttcaggtgctcctcatccgggtcttgcactgagagggcagaggcagactttgaccaagagcagacagaaggccaccccagccctgagccctggtagagggtgccagagccaggctccagctaagcccgggtctgggctggggaccaggagcagagtccgcccttccctgggctggcacttactgaactcggtgcctgtgaggtgggcgaggatgcggaaggaacgggactggcctgtcccaggcctcggccgccagtcctctgtgtcctccatcagccgctgcttgctggcatctgggaccagcggtcggagcggctgtctgtggggagggtgtggctcagaacctcatgctggggtgggcagcaggggcggcccctccccggacttgatacaggtgggctagagtgatgggaggacggcagggcaaggctagggccctgctgggtgaggggtggggcagggaagtgagaggggaggagggcaaccaaggtgaaaggagggcagccagagtggggaggggccaccaccc

SEQ ID NO: 28020 - DNA, 2813 bp, Bovine  19866880477455
  misc_feature (1)..(1): n is a, c, g, or t
ntagatgtatgtatcctcagcttgtttataaacctccctgtgagggctgagagctggtgatagcttggttatcagtgatgttttggtgaatgggcagcatgtcccaggaatgaactggatgcagacctagctcttgagatgttccttgtcagacaggtaaaagaccaaacaggtaactgaacacctccagttactccttcaacaagtggtttttgagctaccatatgccagatgatgaagacagatgtagcccttgtgatgcacgcaggcgactacagaacattgtgatcagtatcgctgggcttctcagccatccctggggcgtgagggagctggacgctgacacgtccagggtggtgacaggtgagaccaagaggctgaggagcaagagctggggcgagagcagtgcggccgtgttgcagctgggttcatagaaggcctgggggaaacaggcagtgtggagaacggcaggccaagcaggagcaccgtgtgcagagaaactggtggcgatggtaatggaagcccaggtgagagagaacagtggcttggccaagccagcagtgacagggggacaaaaggaggtggacagatgaagacacacaacagtgagggttaaaaacaacaggatttggcagatggtgtaaatggagggctctttgtggagataaaagagccagcagcagatcttttggggtctaaggttagggtgctggaattctttatgcagaggaacagtgtgggaggtatgcacagcagtgtaccaggccccagagaccattaatctgtctgagcaaagtgttctcatctgtcaaatgggcagaatgctcccctagtttataaggtaactgagagaaaactctgcagcatccagccctggggcgcacacctctgtaccctcagctctgaagctgtgggcagcagtgctcatgttttggggtgtctctaagccctttgcctggattagcccactcttctccactgatgaggaaactgacacaacgtggcacccccccgccccccaggctcactcccatccccccgctgtgctcccagtgagagtatggcctaagaaaaccctacaatgcaatatactcagaaactccacaaagaaatcaagatggaatcctgaaaaatgtctaaataacccacaagaaggtaagtaaagagaatgaggaggaaacaaactgaaagcaaatcataaaacagcagactgaaggatgagcctggctgaaggctctgctcccagcacacagtcggagttggtatttactaaggaccaggcatgtgtctgcaggggatggagaaggtgagctgctgtgagcaacaggcagagggtctgcatctgaagggcttccgagacccaccaggagtatgcatgaggcgtgaagggataaaggaataaccctttggaaaggctttgagaaacttggcttaggaaaagcccttggaaaagtctgaatgaatcctttgacatttatatagtgggcacctactgtgaattagatgagatgttactgagcaactccctctagaccaggagggaagctcaggcaggattcctgccgtctgggcctgctggaccaccaggatgaagcagcagccccagaagcatttgtcattgctcccctccacactgggcactggagtcagtgtgaggtcagagggccaactcggctgagactgtatgcagactttctctctcagaaccacggtggccaagtctgtaaaattcagcgatagttctgtcacttggctggtatttagctaaatagaagtaaaactaccctccaaggcctgtctactgcatgtcagggcttgttctatgcctcttctatgatcttacatgatcatatgtgatgatcacgtcttacatgatcttcagcaccacttctcgctgggggtcatatccatttgatagactagagaggcgacagtggcacctagcggatcttgggtttggcctgtctgtgcctctaatgccaacgagctgaactagacccctcagggcagtccctgtcctttgttccttattaaccctagagctgccattccacctctctttcaccctgtagccttttcccactcttgaacagagggctggtcagcagaactaccaagttttggtgagaaggtacagaaaggtgcattttgactataggctggccagtgtggccagtgtccccccacaggtaccaaatctcctgtactgagtgttcacacatacttatttacgtctcactcatcatttaggagagagttttcaacacagactttggattcagagtcaggctaaatcctagctcttccccttattagctgtgtgacctcgggcaagtcatttccttttctaagcctgtctcatccatcagatgggcatgacccccacagtaggaaggtggtattgattacataagattattctgcatggaaggagtctaaaacgaggcttcacacagcagacagtccttggcatgtatttctaattcagctaaactccatcacctccagccccagaagtgcttctgtgacccagagctgttcctgccctgcaagccaaggaggtacctagttagtgccagcttcatcagagcactcctgaaaattcctgtgggctcaggaaaaggagaacagatttaattaaccccaatgactggcagcatcgtgtttttatctgggctgcgtcgccatggcagcctcatggtgggggttgtgaagggggcgggtgaagctattgttcctgccgttatctgttctgaaatggaggcccaggagaaagggactggcacgggcactaaggggcacatggcacaaaa

SEQ ID NO: 28021 - DNA, 2050 bp, Bovine  19866880607892
  misc_feature (1)..(1): n is a, c, g, or t
nccaggctttctctatacactttgacacttacctccatcggagacagccaagaacctaccaagaaacccaaggcagaaagtcagagtagagccccggggggattctcaagggacagtttgaggcccagcccctgggaccagagctgtgttctcatctgcctggagggccacgctgggcatcctcagccgggtcactgcttgctcatggttttgttcaggctgccctgggctccccttccatcatgtgccaaccaccttgtgtgctaggacttatgccaggtaccctccagtcactcctggtagactccctagctcccattgggtgagcccggatgttgagcatggtgggtaggagcataaagtttgaatcttgtttctgttactagctgtgtgactttgggcaagttacttgtttgtctccatctgtaagtgaagggggagtgataataatagtgacttacttcctgtgcctgctgtgagggtcaaatcaacttaatatatttccagcatctacaacaggggccagcatgtggcaagtgatatatctatgttggctgttttctttgagaaaggagagattacctgtgtaattgatgatctccttattgtaactgtttcttcttggaaacaccctaccttgggcagggcatggggttctattttatagtagaaagcagtggttctcaaattttcgtgtgcattagaatgatgcaggggcacctctggagcttcaggttctcccaggcagtgttggtgtggctggtacgaacctcaccgggagtagctacagaggtcaatcccgccctctgtgccccctccctcactccccaccttgggtgcacaattctgacttctctgggaatcccaaccattagtgaaacagaaaaaccctcctttcaaaatgactcttgcagtggtttcccttggtcttcctaccttcctagcagctcctccagcttcctcattatctatacatgcaaggcggcctttacccttctctgactctgttctgggccctttctccctcccacatctccccagcttcaaacacgtatagccaacttcctgctgtgacatctccacccaaatgccccataagcccttccagctcagccagtcccaaatggaagccacttcctgcagccaccagcacatggctgggaaccagcttctctgcgtctggttttcttctcatcaccggggtttgactgatccccggttccttcctgccttgaccctgctgcattttcaccaggtcctgtcccaggagcttccaccacctgtcccttcactccatccctactggaaacacgtgtgcagatgtctcctccccaggaagcctccccctgccctcctggctggaatattcctctctgtcccccacttctacctgggagcaccagggtcacacatctgtgggccaaagctggcctgcaaacaggtaaggatgttattaatatcagaatgttttttttttaccttaaaaggggttacccacatttaagagtcaggcattttacatgacacccgggtttctgccccatctaccctgagcttcttcccaacacggcaaccctggctgttcctgagcaacaactggttcctctagaaggagttcacactctcctcagaggactctggggccagtttgatgcatttctgttacttacggaagaaggtcccaggcaacctgagttcaaatttgtgctctgtgaccttgggcaggatacttcatccctctgtgcctggcattctctgtacatgctaagttgcttcagtcgtgtccaactctgtgcggccccatggactgtagcccgccaggctcctctgtccatgggagtctccaggcaagaatgctggagtgggttgtcatgccctcctccaggggatcttcccaacccggggattgaaccctcatgtcttgtatctcctgtggggcaggcgggctctttaccactagtgccaccagacgcggcaaataatggtcctgacttcaaaggcttgctgtaattaaagaaattaaatatacttagagagaactcagagcact

SEQ ID NO: 28022 - DNA, 1416 bp, Bovine  19866880716485
  misc_feature (1)..(1): n is a, c, g, or t
nggatgcccctgcagagctcacctctgcctgctgcctccaaacctggaggctctggcggtggccccatctttcccccgggcctcttgcatcccattggtgccctccactaccccaaggggactgtcattccttctattccaggcttgaactggagagggactgaggagaggccccaaactagaccaggagaacatggtgcccccatagccacctgtcctccagggctggctggcatgaggaactttatagcacatctgaagttgctggcattctcaacaggtacttgggcctgttccctttaagagaagagcagggcctctatgttgtgtcttctcaaggacccctggagcaggagtgcaggactttgcatgtcactttcatgattatcttgctgcttttgctgctgctaagttgcttcagtcgtgtctgactctgtgcgaccccatagacagcagcccaccaggctaccccgtccctgggattctccaggcaagaacactggagtgggttgccatttctttctccaatgcatgaaagtgaaaagtgaaagtgaagtcgcttagtcgtgtctgactcttcgtgaccccctggactgcagcctaccaggctcctccatccatgggattttccaggcaagagtactggagtggggtgccatcgccttctccgtcatgatatcttacagagtctaaaacagtgcctagaacacagtgggtgcccaatgaatgtttgttgaacaactgaatgaggtgcctacaagacatttagacaaatccaggaagcagctgaagattcaagtctagatacaccttggattaaatttgggagtgagttcagggcagtcatcgcagatattcaaccattatcacagagaggggccccggcaggtcacatgaggagcaaagcgggtaggatgtggttttctttcaacatagacattgctggcatattcagtgaagagtatctctcacttccacaaggaagtgtactctctccctcttctcttgaaccatgaagacctcccagtccatccttggtttccatggatacaagccagcaagagcacaggggcggatggttaagtgctggtctgtggggagccttctgggggcagccgtgtgggaatgctgaactgtggccagacctgccagtttaccaacaacatccagagattgacacttttatgtgaaatttagtttttcagtgctggcaactaagatagatttttaaaaatcttattaaaaatatatatatatataccgtgggccaaatccagtgtgacgatggccagggccccagcctagagaagacatgagagatggggaagcagcagcaacatcacagggcagggcagagaaagcagaaggagccgccagaagtggaggagcacagcctcggagggagggagtttgggg

SEQ ID NO: 28023 - DNA, 1355 bp, Bovine  19866880769640
  misc_feature (1)..(1): n is a, c, g, or t
ngaagcccaaaatggttggcaggcaggctgaaaacccccccagacatttcttgagtttatgtgccttttagtgtaaagggtcagaggaaagagagtcattttgagagagcaaaatgactttttctttttatcttcctactctcttcctgaagtgccatttgagactgcagtaaggtaagggaaagaatgctttccttcatgaaaagaggcaggggatcaaattgatgtgtaacttggcctagtgaaggactcccacgcgattgtggttgacttgcctgcctgcacaggtggtggaggaacgatgtgtttaccgtgtgaactctgataatagcggctggaccgaaatccgccgggaagcctgggtctcctctagcttatttggtgtctccagagctgtccaggtgagcagcgttggggtgctggggccaaagccatttatcatcgagtctgggctggggttccatgggcaactctgaatccttccccttgtcattttttgccaggaatttggtctcgcgcggttcaaaagcaacgtgaccaagactatgaagggttttgaatacatcttggccaagctgcaaggtgagggctcgggacacagacagaggctgtcaagtcctaactgccatgactgggccagaggctactctgagcccgccctcaactcatctgtaccctgagtatttccttcagagcctggcccccaggagataaatgtcctgagaagtaatttaggtcggttttcttggcattctctaaaaccagcccccaccctttgctccaggtgaggcccctcccaaaacccttgttgaaacagccaaggaagccaaggagaaggccaaggagacggcactggcagctacagagaaggccaaggaccttgccagcaaggcagccaccaagaagcagcagcagcagcagcagttcgtgtagccagcccaggccctgaagcagcagcctagcagactaccagctccaggccctgtgccccctcctcttgtactttattattaaaagccagcttctagccctctcgactgtctgggtggtgggctgagggtaggtgcccctgtttggcatctccagcatagccagctggttacccatatctgagccgggcttccttacccctgcatcgggtggctgaggacagaggcacagtgacttgcccacggtcaccgcatccaggtgaagtggtcatgaatgctagactgtaagctccatgagggcagggaccgttgttttatcctctgatgtgtcccaagtatctgaaacaaaatcttgcgtgtaacaggcactcaataaatacttggtgaattcaatcggacccagctctggagtcagaaagcttgaat

SEQ ID NO: 28024 - DNA, 1822 bp, Bovine  19866880881997
  misc_feature (1)..(1): n is a, c, g, or t
ngacacacacacacacacacacacacataccccacactcctaacgggctcaggagcctgccatcctgtgattttgtctttagttgtctcagcctcaatttctttagccccaaaatgggttcaccctacttcattttcctaggggtgttggaggaattgaataagttaagagaatgggtttcaccagaacaggaagtcgagaagaattcctcatgttgactgagttcccactgtatgccaggcaccgtgctaggtaaggtattatccatccattatatcctttgatccttccctccagccaaataggggaggagtccttagctcccttttggtggtgacagagcaggcactcaggcagacagaatgacttgttcaaagtcacatagcaagtgaacttgaatggaagtgagccgtgaactctactctcttgggccaaaaaggggagggagagctcagggtgactgtctacagagtctgggatggctggtgctaatatatcagcccactttctgtctgcatctctctctctctctgtggcctggaaaagcggcaattcacctaaggtgagtatgtatgggagctggggctgggcattgctctctctgcccatttggccaggattgatggggtacttatgaagtgccaggcccaaggcaggggttggcgggctctgggatcctggattgcaaggctgggccaagagggactcctgaggccaggccccaccccccacctgcctgggagcagagttagggggaggggggtagacattgcctggtgccgaccatgttgttcttggatggcagccgggcccagggaacactggggctcttgtgcagaagggctgccgtaagcccctgcccaggccccactccagcacaggcctggccccatcctctgacccagtcttgtgctttctgttcttctttcttttggtttttcttttaaaacaattttcgttttgaagaagttttagaatatggaaaaagtacccagggtaatagattaacagttgctactcagaattgacaattagtatcactttaccattttttcccaaaccttttctggtttctctgacctcttctggaggtctggcttggcttgcaaaatggaggtgacacagctattgagtggtgaaaggctgggtgttagagtcagacagataagttatttgaatgctgaaagctttgtgaccttagataagtcacttaagttaagcttcagtttcattttccataaaatgggaacaacaactcttctgtgagggcgcaatgtgataatgatgtgtctaaaatatgatgcacacagctcatattcaggaaagaatagccaatactgatactcacaactatgggcctaggtaggacctggtccaaggtgtgggaaatatactcctaagaccagaagggagggactctgagggtcttctcttctccagtcctcatatctcctcataagccacccattgggcacatctacatccagtttctactctggggacaacaaagccaggaattacaggctgcccaggaccttggtagcagaggcagggagcctggtgctgatgtttgtagtctgggagagttctcagggaggccccctgaaccaagaatgatggataagaatggactacaagggatatgaggatccctctgggtcaatcctgctacctcccagagtctcagcagcattcttggtcccctcatgcctggtctcagatactgttagcctgtgtcttggcatattaggaccagaggtgtctgggggctttttgtggtttgccagcctcaggcctcccttagccccaagtctggaggtag

SEQ ID NO: 28025 - DNA, 1082 bp, Bovine  19866880907994
  misc_feature (1)..(1): n is a, c, g, or t
ntgtcactgtctctcttttccctgtcttctacagaaatgacagaagaagaacagtttgctctggctctcaaaatgagtgaacaggaagctagggaggtgaacagccaggaggcggaagaagaagagctcttgaggaaagccattgcggagagtctgaatgtaaatatgctatgttgaaaaaatttgtgaggattgatcagcaatattttatttctgcagtgtcatggctaattaggaactagctgtagtaagtagttcatagggttttcagttgacaaatatttcccattatcatttttaaaatctgtgtcaaattgtgaactcaatttagtgttttgttaattctatatggaagagttttctacatcacaaattttcagtccatgtcttaagagaaccatagtatttggcagcttctgaaaagagttactgagtaacaagaatccagaagagagcaagataaggtgttactttccctgtattgtggggagaacaaagggaatgagaactagaggtgggttatgaagggacagaatgagcagtattaaaaattttcaaataatattacattgtgatttgaatatgtgtaattgaagttattttaaatgtgaaagatatttgccagtggcagatcctgagccatcctttatgccattcacttttctatattagaaaaaggtctagtatagtgatctaatacagtgctttgtacatagtaggcatgcagtacacattgtggaatttatttgaattgggcatctacttttttggagaggagaatcgcttagggacagtggactcctcttttttgttcttcctatgacccttcatgtatagctatcttaataataaacctggtctggtgtgggatcacttgtttcagagttgccggccttctgatgcttctgctaccagatctcgacctctggccactggaccatcttcacagtcccaccaacagaaaaccacagactctgggaccactgaaggcatgtctccctgttctggctccttcttctcatcaagcataaccatatcagagggatatcatgcgagagagatatacagaaagtccagaatcc

SEQ ID NO: 28026 - DNA, 1157 bp, Bovine  19866880943654
  misc_feature (1)..(1): n is a, c, g, or t
ntgatgctgggaaagattgaaggcagaggagaagtggatgacagaatgagatggttggatggcatcatcgacttgatggacatgagtttgagcaagctctgggagtcagtggtggacagggaagcctggtgtgctgcagtccgaggggttgcaaagagtcagacatgactgagcaactgaactgaactgacctctcctcttaatctaggttcccactcctatgcccagggcagaggccaacaccagccggatgctcaggaatgccaccctggagaaatgtgagtgcccacagtatgggagatgtccagcccagcagggaagagcctggcagaggcacggttatcttccacctggccactgctgcttccagcccaggaggacatctattggccagcctagctcctgggctggggtcaggctctcatgtagaggttaaaggaacacgaggctctgagtccaagagggtggcaaaggttgggggctgggagccggattgagggggcagcaacttgataccacttcccccaaccccacaggcaaccacatctttgtggacacggggctgcctgacctagctgtggggctcatcctgctggctggctccctggcactcctgtgcacctgtctcatcctccttgtcaagatgctcaactctctgctcaagggccaggtggccaaggtcattcagaaggttatcaacactggtgagccccaagtggtgggtgggcaggccccaggacgggccttctggatcttgttaatacttctactgccttactgtgtgatctgggtaaagccctaccatctttgagcctcagtttccccatgtgaacaaagaacaggttggactgggtgatatatgaggtccctgagatgctgacaagctgggaatctgtggctgcttccgttccagcaggtggctccaaagggattcccagaggccattgtttgattcaattaacagtcattaagttccctctgtgtaccaagcacagagtggtgtgagggatacagaggtgagcctcacagagatggctcttgccctcagggggctcatagcacatatgggaagacagtaaaaaaaaatgatcgaggggggatgaatttagataaaagagaacagtaactgccaaacagaaagcaaaaacagcaaatag

SEQ ID NO: 28027 - DNA, 757 bp, Bovine  19866881001956
  misc_feature (1)..(1): n is a, c, g, or t
ntcctggcgccccggcagccccgacaccacgagaaaggtgcgcacgcgctgttgtggggggcagtgtcccggtgcagatctgcgggggtcgctcacggtcggcctgagggctggcaccccgcccagtgccattgccttccgtgtgtcttgcagaagccgaagctgaagcccgggaagtcgctgccgctgggcgttgaggagctggggcagctgccacctgctgagggccgcccgctccgcaagtccttccgcaggggtgagggcagaagcgggccgcagagatagagagggcaggaaactgggcaagtctggagaacacccccttcctcctactggtcctgcagtctaagtcagtgaaaatcgaaatgcagggccctgtggacccccacccccaccccgccacgttcccctggtggttcggttcccacgctagagcccagaaatttgggaagcccgcatcagtagcgaagcctcccggaacccaaacacagttagacccctgaaaaagggctccagcagagtccactcgggtgcggagaggcctcagcagaggggtgaggagagggaccctgtcctgctcagtcttcctctcctctagaactagccggcggggcggccaacacagccttgcgccgtgagtcccagggatcgctcaactcctccgccagtctggacctgggctaccttgcctttgccagcagcaaatctgaggtaagccaactgctaggggagatgaggtgtgggcccagttcactga

SEQ ID NO: 28028 - DNA, 1488 bp, Bovine  19866881003694
  misc_feature (1)..(1): n is a, c, g, or t
nccccccaccccgcccgccgccccgcctcccctcccgcctccacgagcagaccgggtctctcctggcttgcaccgggggctcagcctgtcccgcggccgtggtgctctgtccctgaacggcccagggaaggagagaggcaggaggccgtcctggaaccggtgatctgcttcctcccagagccctcctgggcagggctcctctcctgccgactggctgtgtgtgggtgtgtatgtgccagactgaatgagtgcggccagtctgctcaggccaccgcctatggaactagcagcttccagggctcacagtgcccatgcagcggtgtttccactatttctacctgacccaggggcaggcagtggatattccaggctgaggggactgggatccaaaccaacctggttgcaggtacccttgggagaagcaggtgtggggagctgagcagacataatccacagcagtgtgggagcccagggagggcagctggtaacccctggctgggacagcctggggcagaagagggggtcttgcctggggagttgggattgctggtcatgtggaatcacaggcagctcacttctttttggacttcagtttacctagctgtaggatggggtaagtgcaactactgtttgctgtctcggagatcagatgatgaaatgaaagggctgataaaaactgtagagcgcaagtgacttagtgatactaagaaccactccagcaggactctgcctcttcatgagttgaaatggggctacagaatgccagcctctcccatctcctccctgggcccctcttacccactgccccctcttttggagctgggacattccagtctcattcctcaggggcagctgcagtcactcccctcagcaaagctgatcctccagcaggtggtgggaccctccctggggctaggactcacgaggggctaaaggcagtcaaggccagactgggagcttcctaccctagtgctttgggcacactccagaggagatgcacagtggggtcagggcaggcttctaaatgtagagagcctatggactttttcctgtgcagctgaacatgaccttaggcaccttattttacctcctgggcctcagttttctcctcggaagtaggggatgacactcttcctctcccatgtgtgttgtgagcatgtgccaggcccagcatcaggctgacccaacgaggcacccactaaaggacaccaggatgcctccctgagtgtcctgtctttttctgcttcgtggccaggaccgtatcccagccccattctccagtctccaccaagagttggtctagagagatgctcccagtgtccaggctgtctgatcttggagtagatggaggggaaggtggaaacaggagtaaagggaccttgttgggaccaactaggcctgtgcagaatagggcctatgtgactagctgaaagcttgctggcagagcagtgggggtggtggctgtgaggttctgctctgtgcagagct

SEQ ID NO: 28029 - DNA, 1237 bp, Bovine  19866881044385
  misc_feature (1)..(1): n is a, c, g, or t
ntagatctgacagccctggagcagaagacaaggtagggtcacttcccttggacaccagacccccagcccctgcctggtctggtgaggtcaggccacctacctcctcttggttgcgcagttccttcacccagaactttgcccgttcaaagctgctgctgtctgtcaggtcttggtgtggaacacaggaaacacaaccaagggtgaggagctgttctgtaaggccagcctggcaccctccccttcttgtttgaggaacaggcccaaactcttcttaccatagcagacgatggcagccttggcgccccgatagtagattcggctcatggcctcatagcgctcagagcctgctgtgtcctgaagggcagggggaggctcagccctggcctgagttacggagctatactccccacgacctcaaactaatatgtcctccagacccgtatttttaaattggggtctagagaacagaaacctccgtgagcccacaagtcagtacaaggcaggacctacgcctcctcaagaatgggttttcccagattatgtgcccagagaacttacccaaatacccaaagtcaccgtccggtctccgacagacatcaccttggctacgaaggcggccccaatggtctgcaaccaaggggaagcgatcagaaccccgcgtgtcggctagccccacatccccctcaacacccgcgatgggccccctcgggcgcactcacattctgataaggccccaccaggaagcggtcgtgcacgtatcgctccaccaggctcgtcttgcccacgtactccttgcccaacatcaccaccttgacgtccacgcgctgcccgctcatgctcccggggccgcctcacccgcgtcagggtcctgagccggggcgcgaggcaaaccgggatctccgctccgacaggcagcgcccttaacctcagtacccgaccccaggcgccaatctaaggttccacacgccgcaacgagcttgagcgacgacaacgcctccgtccgccccggcttttagggcccaggaattctcctaagagcctgggacccggggcggcctgggagcgcgcggggcagcgcccttaacggcgccgcacgccgccgcccgacttgctagctcgctctgccgctcgctcgcccacctagcttagaggccgcgccggcacagattccccaccgagccagggggctcctccaacccagctccggcccgcagcgccgcgacgccagcggtggcgg

SEQ ID NO: 28030 - DNA, 2590 bp, Bovine  19866881203363
  misc_feature (1)..(1): n is a, c, g, or t
ncttctgcttctgtctccacctctgaccactcctctgtccctcctgtgtcctcctgtcctcatcccagagaaggaagtagttgccagttccccatcccctctctgggagccaacagctccagctcaacctgagactcccacctccatgggcttagcccacacttccccagagcgagctgtgtgggtagggagtggccagaccagatttcccttctactgactcactgtgaccttgagtaagtcacttcccctcaagggcatcactcacccatgcccattataaggggttgaattgaactagaggtaagataggggatccaagccccaaagccagcttgagggtcagagaatctttccattcagagggctgacctctgagccccagctctcaacaattccctggtggctcagatggtaaagaatccgcctgcaatgcaggagacctgggttcgatccctgggttgggaagacctcctggagaaggaaatgacaacccactccagtattcttgcctgcagaatttcatggacagagaagctacagtccacgggttaacaaaagagtcagacacaactgagggactaacactttcgctttacttttctcaacagaggtgccttaatagggtggagcctgagcctgcctcttgagttgctagctaggcaactagaagcaagttacttaacctctctgttttcccatgtataaaataggtatattcccaggctgtcctccacagggttttttgaggattcagtatgtggtaatactaggtactcgataaatgtaaactgctgttagtacttagcaagtaaagaaaaggccacccagctgtcttacccttctaacttctgaagcatgaggtagagccatcaaaccaagctctcccttcttgccctagtgccatcagtctctgggtctgacccctctgccacctctctggaacctcttaccgcctgaactcagattctgagtgtcggcccaccgaggagccttatggggtcacaggcagcctgtactccgcaaacctcccccaacttgtgaagtgtggttctaccccccagtacttccggcacaagccagctcaaggccaagcgcgttgccagatggccaggcagacctgcgggcttagacttaccaacagcagtgctacttctgcctgtgttgttgccactaggctagagggctgggaggcccagttgggttcttcagggtcacctgtatccagaccctgggagacaccccaccctgggccataaaactggtgcttcctaaccttgagaacaattctttctgcacttgaggtcttcataagtaattggattctctcacaccctaggcagcccattcctctctgttttcgccaaagccccccacttcccagaagtcatcttcatggtttcagctcatgcatatgccacaagcacacatgcacatttcatgcccacatgcacaggccagagggcaggtctggtgggtggaatggcctgggcaagaggccagcaggggcctcaaaagctttggtcggagttgagacacttgggttttagcctgaaggtggctatgtgttgatgtcagcagcttctgaaacgtgaggagggtccctggaggtgaatgaatgtataagcggagtgtttgaggtgatggtgaagctcaagggagccccaccccctcccagatggctttagtattcaacagtagtccagaaacacattgaatgaagagacccctgggttctgcgagtggggcagctgaggaagggcagggttggctgctgtttgcctgagtttggtctgcagagtcttggcccttcatgaccctccatctctccatagctcacccctggaggtaaagctgcacaggctggcgtggccgtgggtgactgggtactgagtattgatggagagaacgcggggggcctcacacacatcgaagcccagaacaagatccgtgcctgcggggagcgccttagccttagcctcagcaggtaagcctgagctgagcagccccggcaggtgggcgtgcccttgggcgtggcccatcatcaccacttccccttctcttctagggctcagcctgctcagagcaaaccgcagaaggtaggggatggtcttgggatatgtgggcagcaggcggggtgggactggacatccaagctcacctgccctccctggtgcagccttggtacccgccgccccccctcccccatccctggccgggagtagagggtggacgccagagctggggagtctgggaactgggagttgggccagggactgccgcacggtcagagcaccatgcatgtctgcctgttggtccatccgtctgcctgcctgcctccttccctctctccggccggcctgtgctgcaagctgcactagcccacccgccctcggactgcgtgggctgagatcattgctcccaaatgggccccttgaaacttgagtcgcccctccccggagcctcaggccagatgtgtgggggtagggctggagcaccgctggcctcttcgtgccaggggacgccccactctggccagatcccctgccgcctcccgccctgcccgccctccccgctctgtctctgccca

SEQ ID NO: 28031 - DNA, 1032 bp, Bovine  19866881218594
  misc_feature (1)..(1): n is a, c, g, or t
ntgtgatatgaatcactactttctaaggaatttgttttagcttaaatatatatatatatatatatatagtatatttggcttttcttaaaaatgagggctaatatatacattatcagtagcctcattcacgtgagtaacttcctcttaacgtttaaactctttggacagcgagaattggacaaatgttaccttaagtcatatttagtttttcctgaggttgcatataacctgttagtgtcagagagactcgtagttttctttttggttcctttcaagttttttcccacagagactcatacttaatttacacattagtctaggaaagtcctgccaaagtttaaacatttggcagcatattgtaaaagtctttctttacttatttttaaagtttaactgtggtcatttttgttgaaagtggtttctttattatttgaagtttatgtggattattgtctaatgatggcactaccaagtgccatgattttggcagaagctctcaggaatatggtgtcatttttgtgaaaaaatagcattactccctctccatgtaggcctgttgacctatgtcatccagagggacgcagtaagttaaggatgatggcatgtgacatcaccctgggatcttgcaagaggaacctgcaaatacaataatattgaaatccctaatgagaggaaagttaatgaggaaaaagcaagcccttcatcactgtggttatataacttttgtgatcatgatttgctgtcattaacctgctaattaactccaactgtttgttgatataagccacttctaaatgagttaggtaaaaggtttccctaacattattgttctttttgctaagaaagtataactacttctccatggagctagactcctgagtctctataatttagtgacttaaagacttaaaacgtaagacaccataaaactcctagaagagatcataggcaaagtattctctgatataaaatatattaatgctttcttaggtcagccctccaaggcaatagaaataaaaacaaaaataaaca

SEQ ID NO: 28032 - DNA, 699 bp, Bovine  19866881230339
  misc_feature (1)..(1): n is a, c, g, or t
ntggcgtgggggtgggagccctgtccctgtcttcaggtgggacccagtctgacaagccagatggacttagtcttaggcaactcactcaagctactcaaagtgtccaggtgggtccgagggaagcacagggaataacgtgggcttggagaagcagggcccagctgaggtggggaaatgggaaagacatccaggcagagaacacaggtggagccaaggccctaggcatgaagaatacaatgcttctgtggggaggtatatgcctgggttgtgggatttaagcagagagccagacctggagggtttttgagtgcttggctgagaagttctccttgtccccaaaggcaatggggagccacggaaggtttgaatggtataaggaggggatgaacaaggtctgagctgagtatcaggaaggttcctcccttgagctggggggtaggcgggaggcaggtaggtgccaccgatcagggctgacaacctggcccggcctcacccccagagcggtccccgcaccggcccatccttcaggcagggctcccagccaacaccacggctgtggtgggcagtgacgtggaactgctctgcaaggtgtacagcgacgcccagccccacatccagtggctgaagcacatcgtcatcaacggcagcagcttcggtgccgacggcttcccctatgtgcaagtcttaaaggtctagtcc

SEQ ID NO: 28033 - DNA, 2560 bp, Bovine  19866881370731
  misc_feature (1)..(1): n is a, c, g, or t
ntgttttgtgggggtgcagaggggtgctcccgagcacttggcctgtgggctgcactcacaccgggccccttgaactctgcagggcaccacctatcagaagactgatgcggctgtggagatgaagcggattaaccgcgagcagttctgggagcaggccaaggtgcagaccccgaccctggcctgctggctgggcggctcctccctgtcttgaccccacggggctgctctggctcctctcctaaagtccctcccttcaacagcagggcccgtcccatgtgcttcccacactgaaagcccctgaattcacagaagcctgggtcagggatcggggtggagggggggtgggggtgggccacaagctcagggcctgcactgccttggcacgaggggctgtagaaggaggaagaactgaggaaagaggaggagcggaagaaggccctggatgagagactaagatttgagcaagagcggatggagcaggagcggcaggagcaggaggagcgggagcgccgatatcgggagcgcgagcagcagattgaggaacacaggtgtgccccctgctccacccccaccttgggccgcggccctacggcggccagtcctaagggttcgcctgcacctttcattccaggaggaaacaacagactttagaggctgaggaggccaagaggcggttgaaggagcaatctatctttgtaagttcttagcccacggtttctctttcctggtctgggaagtggggatggtccctgaattactgggccccttgggggatagtcagagtcttggggacagtgctgggcattcagggtacccctgcatcagcatgggatgtcctgccatgtcgggcctgacccctgatcatgtggggttctgtcccctggctgtgggaagagacctctttggagaagtttagactgaaagagaaaatctacgttgacccaaaccctcactgaccaggcttctcttgcccacttccagcaggacttgaggggctcaaggtagattagccatgcttcctgtatttaatgggacttgaggcctggtccccattgtagtaatgctgtagagccactgaaagaatctgggctgatgctctgaacatctgtatacacgtatgtgtaatgtctcctttagggcaggcacttattccaggggtacttggctgaacttccaaacattgggatggccctaggatcatcgtggattgaccctttcacaaccacagtggagacagatcttcacgctttgaattgaattttaacatttgagaaatagcgaagatcattcagtgctgagcgtggtacagtttgggacaggaagtaggcagtagttgtctggactgagactgtggtgggtagctgttgggccgtggggactcaagcagactccaaggtcacacccacaggaggctggagggatgtgggaggacagtcctgcagcactggcattaatggctgtcatagatcattccactcacatagcccctagagggtggaaagaatgtgtgggtagtaagctccaaagttattcattcaacaaacccttgccacctgccacgtgcctggtgttggaaatatggtggagagcaagatgagcaaggcccttttacaattaactgatgaattaactgcagcaaaaggtacataacataaaaggtaccatctttaccatttttaaatgtatcgttccagggcgttaagtgtatttattttgtacagctgtcaccactgtttatctgcagaattttcttcatcttcccatactgaacctcgtatccattaaacactaactgcccattgtcacctttctcagcccctggcacctgctttctgtgtctgtgatgtgactacgtacctcgtatgagggggaccatttatgactggcttatttcacttagcatagcatcttcaggcttcatctctgtgtcagaatgtctttccttttgaaaactattagtattccgtagtgtatgtataccagattttgtttatccattcagagcaaggtcttttggaaaaaaaaacttccggaaaatttcacatacacgtgcacacaaaagtagaaacaatagtttagtgagcctttgacttgatcacttatcttcaccaattaccaatgtttcaggcaaagatttacagtgttacaccattattttatagtctcatctggcccttcaagtatggctcatgtgacaatgacagttggtattttaacaggtcactgtggtgaccctgcagcttcaggtcccctgaggaaggtctcacacaagaaactttggaatttacaaccgtaaaatgctttcttttgacttgaggtactccgctttctcccttctgataagaattgccttccttatgtgagttccctttttgcctgggatactaggagttcatttatctgaagatgctgaagcacagcagccccgttgacctttccggttactgtgttggtgtctctctgacccccagctctgctttgtttccgtgcttctcacattgttggtagttaaggtttttgtggtaagctgcctctggtccttttttgaagaggcagagga

SEQ ID NO: 28034 - DNA, 693 bp, Bovine  19866881371292
  misc_feature (1)..(1): n is a, c, g, or t
natttgctctcttccccaccccacccccaccatctctgccgctcaggctccgcccctggatctggccccgcctctgctccgcccagctcccttcagaggcgacgccctttatcccaggccccgccccctgggacagctcacctgaagctgctgggcccggaacatgtccggtcgcggttctgccagcacttcctcgccgagccaggcctgcctgtcgatgttcacggggctcagcgcctggctggacaggaactcctggtagatgttacgggcctcctgagctaactggggcagggacggacaggaggtcaggggcatggctcagggcttggtcccatctctcgcagcctcagctcccccttcaccccacctgctgggtgtcgctggccgggatctgctggaagcgctcgcaggccttccagaaagtcacattctcagcactgaactccttcttcaggaactcctggggatggggagaaggaggaggcaggtggagacccagagacctagtcaggggatgtggtcaaagagattgggatagaaagagggcccagaggctaaaccaaacagacagatgggatcagatccagaggcacatagagggaaaaaagaggcagagagaaggaaacttcccagttcggagaagagcaatgagtgccaaagaaatgctggatgagaagccgacagaggagt

SEQ ID NO: 28035 - DNA, 1150 bp, Bovine  19866881406472
  misc_feature (1)..(1): n is a, c, g, or t
nctcctctttttccttactctaagcgtccttgagtccttctgtactgcctcatctatatgcagttaacactgcatgttcccattccttcctatcccacaggcaggagcggtggtgcaagagacaaggtgtgggccctgaagttagttggcttacgtttcccctctctcaacttcccccatctgtaaaatgggtggatgattcccactcatcgggttgctgtgaggtcccctgtgcccatttcccagtcatgtgtcctcaatctaagacccctgccccgcccccagtgcatccaccgggacctggctgcccgcaatgtactggtgaccgaggacaatgtgatgaagattgcagacttcgggctggcccgtggcatccaccacattgactactacaagaaaactagcaacgtaagggaggcggggtgcagctgattggggccaggcactgggacccgtggcccttggcagcagtgtgccctcttccctccagggccgcctgcctgtcaagtggatggcaccagaggccttgtttgacagagtctacacacaccagagtgatgtgtgagtcctggaagctgggctctgggatatatccacaggcaacctttgtccttctaaagcccttgccctgggtctgagtgggaccagacctctaaaagaagcccgtattcctacccacatggtggatcatagttgtggggtcccctatcctagccgcagggttagtgggtgaagctgtaccctgctgagcctgggttctgcctccatccaggtggtcgtttggaatcctgctgtgggagatcttcaccctcgggggctccccataccctggcatccccgtggaggagctgttctcgctgctacgagaggggcatcggatggaccggcccccacactgccccccagagctgtgaggcctcaccccactctccctcactttctagtcctcattctctgtcctaaccttgacctcacggtccagtcatacagagtggtcagctctcactcatggtcaccccctcttcagcctggcagggaaggcctggcagggtactcgtttgctgaatggcctcaccttgtgtcaaacccttctaccccctcaccacaccccctcacccaggccctaggctccttctgaccctcatccgcc

SEQ ID NO: 28036 - DNA, 2114 bp, Bovine  19866881426579
  misc_feature (1)..(1): n is a, c, g, or t
nactgctttgggccccatgcatattatgggtgaactcttcagcctgtgtgtgcatgtgtgggtcaccaggtgtatagagcgtgtgtgtagcagtcggtgggtagaccagcccctcgggtgcccataggcttgggtgagtatacatgtattcccataggaagatgtatcctgcctgcctgcaagtgtgcccttgggcatgtgtgtgcctgtgtgtgccccagtgagcttacctgtgtacctgtctttgtgtccttgcatgtgtacacatcacttcccttgacatctgctctggatcagagccaccggaagagccttgggagctcagaaggtgagaatgaaagccgaccagggaagtactgctgcgtatacctgcctgatggcacagcctccttggccctggcccgacccggcctcaccatccgtgacatgctggcaggcatctgtgaaaaacgaggcctctctctacctgacatcaaggtctacctggtgggcaatgagcaggtgtgaacccggcctggtctccaactctaaatcccttcctgatcctgaaccacggccccccccattcctgtctctgctcagctgtgaccccaacaccaattccatctctaactttaacccatcccccattcctacccacttcctgactccagccctcactacaaccttcagccccacgcccaacttcaaatcaatccagcaccaattcctcactcaaattcagatatctattcttaccccacaaaaatcctgtccccatcccattcccatcttggtttccatcttcattcatatccagagactgtgatatgaatacgatatgaagagactccactgctggagctgggtttttccctgtcacccccagacttcagactgcccattcctgaaatggccatttggagacccttcactccctccaggaaagcccaacttcatccagcctatgaaaaattttcctttaggtacaaactagcatagctttgaacttaaactaaaccatccaataagggggaagctaaaggaaggatgctatatcccagggagaactgtcagaatatcattcacccagtagacattcctaaggccctgccaggtgagtgagcagagggacccagggtcctccaggtccaaaggcgggaggtgagccaagcagaatgtgatcacggaggaggagttgactctccagagagtttctggggcaagataggcatttctgggtggtcccaggaggcttcagggaacaggtggtggttgatgaggatgagtttgcctggcagagctgtggggggaggacattcgggcacagggggatctaagaagtgctgggcacattcagaggcctggagcacaggagtgtgagggccacagtgggagaaactctgcccattctcttggcctcccaggcagcctccacaacccagatgggttctcatgtctgctaaatataacttcacacccacactccacctgtccctgcagacagcacaggcctgttccctgggacaggctgcctcccagccctcggctggtgcaggtcgccgggtgatcactatcactgcttttatgtaccgactatgtcaggcactgtgtaagatacttcacatccttctggcctcacaggtgtcttggagggaagagctcttttttttgcagtgagggaacaagaagtgtccttagtaggtgggaatagagagaagtggacaagtgtaaaaaaataaggacaaggcctgggtggctgaccaaaggtgggtggtgagggaggaaattcgtccagctggccgggttaagtttcacatgcctgagggacaaagggcagctgtccagggggcagatccccacttggctcaggaagaggtagtttcttccagcccttaagctggcccttttaaccaagtagccccattactatttcctgcttacctcacctccatgtttcccataactctgcgccttttccaagtctttccagcattcttgccacccttctccctagtctgggccactctaggctctgatccagcctggtctcttactctgtccgaatctctatggctcacccgaccatcagcccttccctctgacccttagggagcctccatagtctaggtcat

SEQ ID NO: 28037 - DNA, 1420 bp, Bovine  19866881506703
  misc_feature (1)..(1): n is a, c, g, or t
nctcttgttcgaggcagaacatgatgacgggcaaagtgaacaccagtgtcttgcctgagccgtaaaggctatgcctatcatgtcacggccagagagactggtgagagaagagaggctggagggtcaggctccatgaaaaacaaagactgcttctcatccggtggctgctcctccccaggactgtcagcttcacactcacatggtggggattccctggatctgaatgggtgttgggtggtggatgcccttcttcttcaggcctctcaggatggctacagaaaacagcctggcttcatttttgtgtttcacaggatatgagacacaggcccctaacgcctgtaaaactcgcactatgcccctcacgttacaaacgacgatctcagacagacaaaaagacagacacacacaaacttgtccaaggcttctaggctaagtggaggcaggattcacacccagttctgtttaaagccatcattacttgccctccaaagctccctaatggcagaggttacaaaatatgaacagctcagggactgaaaaagaagcataaagacaaattcctccttctccactgattagacctgatgcagaagcttctggacttcggtgggggcctaggatgcaacctcacagacgtttcactatcaaaatgtggtgcatgtttcatgatcacaatgtggtactgcagacttccctgggggcacagtggataaaaacctgcctgccgatgcaggggacgcgggttcgacccctggtgtgggaagatttccacatgctgtggaacaactaaaacctgtgtgccacaaccaatgaagcccgcacgccgcaacttctgagcccgtgtgctgcaactactgaagcctgagtgcctagagcctatgctccacaacagaagcctgtgcaccgcaacaaagtgtagcccctgctagctccaactagagaaagcccgtgcacaggaacaaaagacccagcacagcctgtacgcatataatgtgctggtgcttccagctcccaggtacctgcaggaaatttcatttccttgaagctcttaatgggcggtgggatgccatcgccttccaccaagatgtggtacttcttccggacacgttcatgccgctcttcagacatactcaggacgtaacgggggtggtgtccaactgtgggtgggtgacaagggtcaagatagcacctgggcacacctggctttggggtgtcccttccagtctcagccacctatcatcccaagtaagaggaaccaactgcagacaggaaagacgtaccttggttttgattggatcatcgtatgtgattcccttagccatctccttcactgacatcaaagctgagaaaacagatatggctcaaggctggctcctgcttcccagaggccaggtcccttgaaatggaacatgcctagggt

SEQ ID NO: 28038 - DNA, 936 bp, Bovine  19866881573323
  misc_feature (1)..(1): n is a, c, g, or t
ntgttttagactactcaatttgtgggtaatttgagggtaatttgcttccctaatacaaagggaattagctaaaagaatttgtttccaaaaagaatactaaagacacaataaaaattatctgtatagtgctggatattaaaataaaatctctattaaatcagtaagactgtagcagacaggatttcttcaaatttttacaagcatgtaaagtttgtttatcgaatatatagaagcactgctgctgctgctgctaagttgcttcagtaagcttctaatcggtagaagaaattactccaaaacaccaatttggctgtatgaaaaatgaaacttcagctctacaactatacaaaattattaactaaaatgaaaaacagattgaaaggaaatagtcatgtccataaaataaaaggataatagctacaaaacactacaatctagataagtcagcgaaggatacagacagcaaaggccacagaagaaatacaaacataaacaaatcactttcaacaataaaattgtattaattaaatcaatctttcagtagcagtatgcatctatttaattatgtaaaaaacttaaaaaaatgttatcaaagttgttttgttatcaaagggaggaaaacgtcagactcatacactattgagaactgtgtaaaatcatacaatccttttggaaaaccatacagaagtaggcacatctgagacacaaagaaaattaacccattgccctgataattccaccatcaccagtttatccttaggaacaactgcacaggcattactatgaaattattaaggtacctatcaaggctttacttaaaactccagtatctactccaccaagtaactaattacagtggtataattaccgacactgtaaaacttctgccccaaagctctactacattaaaaaagcatttcaaatgtagcactttgt

SEQ ID NO: 28039 - DNA, 1307 bp, Bovine  19866881896306
  misc_feature (1)..(1): n is a, c, g, or t
ncgtggcacttactgtgagctttcctcacgtcctgaaccacctttgaccagccatgacaccaacgggaacaccaccgctgacccacaatcccttgggtgggaaccacaccctccgtgtgggaaccacatcctcccctcagtgggtcctttcacagaggccccgggtgcgtggagacagtgcaggcctcaccccacgttgctagtggttgtgtgccaccaggcaagttttacttgacctctaagaactgtgattccccaactaggaaatggagaccccagcacctgcctcctggggccgtgccacgcctgaggggacgaggctcgaagctggaaagcacctggaagtcagtcaaagaagagaaaagcagacctcttagggcagccacacaaatgaggttggttatttcactttatttagcaaaccatcatactctgggccccaccaaactgctcctccagcctcacccgagggtcggccttgggaagaagctcggagcgtgaacaggaagacccaggctccccagttggcctcctcttctgccacacacaccacacagcacagaacaagatcactgcttgtgtcctcaggcgcccaccccagtgtggcctggggggcctccagtgttcacagccacctgccaggctctcagcccagcaccaggcacagaccccctgctcctgagaggccggcacagggccagggcctctgcccccggctgtgggcatggaaaactcttattccccagccctgcagccttactccgcattgggcaagaagcaaaatatatgaaaatactttaattatttctttgaaacggttaagaaataaggtcatcttattttccttttacaatcctagtaaaaaaaaaagttcacattagcgccaggacccttccccaagccacgggctggctgctcagtagaaacgcttgttccgttcctgccgcttctgaaacaccacagcccccaccacggcgcacacgatgatgcccaggagcgcgcacagcagcagcagaaacacccgccaccccgtcaggggtccgctgcgaaagttccccgttggatcgtccacattgtctaaaggaggagagaggggtaaatgagaggccgaacgggctcccaggagacagcatgataaggcccccatcccaccctcgaggcagcagctgtggcctgctcgcaaggctccagcacggggcaggggcatgcacagagcgacaatctcactgggaacaaggctccccgggattcaggctgaggtgccttctgctgcaagaagctggtgaactgcacgccttgggatctcc

SEQ ID NO: 28040 - DNA, 2598 bp, Bovine  19866880366419
  misc_feature (1)..(1): n is a, c, g, or t
ngatgaaatttccattttacaagtgccattgccacaagggggtaggggtgttctgtgtaactctttgtctgtgctcttcctaactaaaccttttcacaaaaaaattaagattaaaaaaccacagattttttaatagacattttctatactatatgtatttctgctatcattttttttcttgtaattaacatctatccagagacatcagccaagatgttgaagtctagcatatttaaaatttgtctttctgtctcatgttcagcaggacagttctagacggccagagagggtgaccctggggttggaagatttggttacaaaggccacctttcattaatctgaacagatagccacagggcaatgtgtatcctccacaactggattttatcacagcaagttcccttccacatacataacattaaaaagaatgcaaaaacaaaaaaattagttttcttctgttcattatgcatttcttgaatgaagaagaaaacaaaaatgactggatgaaagaaaccgactaatcctttaaagcatgcattaaaaaaaattttttttttcgcaacctgtgcgtcttttaagcaacatgcctttaaaaaaataataactggttgaaacatgcagcaggaaggctatgacatcatttgtggataaggtgtccttcctcagtgctgagttgtccagggcataaacccacagaggtactctgtgtggcgcagaaaaacacagctgggacacccggggaattcctcccaggattcacagaacaagtccagtgttttacctcccgtcttacgggagctaatagattccacctgcggcgtgtattatggcgacgacaccccctttttcttccggctccggaaacgccaaacccctaactcccaccctttctttgtatttcttactctttagcttgggatacgaacctatctgtaccctgggtgcagctggtttcatttgttggaggacttcaacgtgatgtcatgaggaattcaggtcaatatttttaagagaggtgaaaacaaagctgtgtgtgcaggacggcttggatggagatgcaggcggtcgtcgtgtttccctatccctcggtggtgtgcacagccgttctggccccacgagcaatctgtctgtaataagtgacagattccccttcgtataaaggaaggggccggagcagagcagcgcagaccttgtacaatagcaaagcaggtgctccggtcagaccccctctaccaggaaacgcttctggaatgcatgaccaattcggtttcagaacagaatactctctttaatggacagaaaacactaaccttttctttttccttttgcctttccctccttcccccaccctcgcgactccccagtttcaacaagcccccttttcattttaaccctttcaaaggagaaggggccaggctccactccgcacacaccccatccatctagatgttgctaacaacctaggaagaggggaaacattcattagcctagaggaccgataccctgtgcccaggagcgctgaggcaccgtgggggaggggagcactcctccctcctgggaactgggaagcccgaactcgcccaaaactacaagtttcactttttctttcagatgttcctctctaaccaacttcagggagcataggtttagagaaggggctagagtatagaaatgtctgggaataagaagtactttgaaaggaagacataaactatgaaatttgaaataggcaaaatcacattaaaatcatatagtgttgtggagatcatggaggatttgaatgaaataaaatctcactttaaggaatctctgagttgggccacgtctgtacagtactgattgcttcagatagaaaaataatactttgagcgtcataaggttgagttttgcacatatacatatgtacacatgcatatcggtggtgtcaagtggattgcatagtagtaaatatccaggtttccccacacacaaagaaaatagctaggacttaggaaagaaataattatctagtatttctgttaaattctgcatctgcataccctgactctattgacaaaggaacaggtaagcagtcttgtgtgactccttttccatgcaacagcatttgaaacgcagtgacagagactaacgtatattaacagtaataagggtttcccctccgagagttgttgtaacttatctttgaaggtaagctcatttatcatggggagaatagaccccaaaaagtacagcagccgcggcatcctgcctgaggcagagttagagatttccaatagctgctgtaaagaaacattctgaaaatacattcactactgcaccaataaatcttaagacagaagagttttaattacagaggatagcaaagctcagatttttcaaatgaacccaaaactatgacttgagagagagctttcgcccatgtgacccaacctttgatagatttatgttttcttcacctgggaaaaagaatctgctttataaacctgaatcctggaggatatcttcatttgtaacatagtagcaggagtaacagtggaagtgaaatagagtaaaccaatatatatgcatatatgaggagccaaggatatgtcagatgca

SEQ ID NO: 28041 - DNA, 1145 bp, Bovine  19866880412706
  misc_feature (1)..(1): n is a, c, g, or t
naatactggagtaggttgccattcccttctccaggggatcttcccaacccagggattgaacctaggtctcttgcactgcaggcggattcttcatcgtctgagccaccaaatatatataaatatatagtacatatacatgtattttgtgtatatatgtatatgtgtgtgtgtatataaaaactgccttggggaaaagagtattttagaacatggattcaacgtgttaaaagaaagtatctctgaacagagggattatgagtgatttgtaccttttctatgtgcttttctgtactttccacattttcaacaatgaacatgtgtgattttgatcagtaatattacttaagtactacgtattgatgtgcatactcacaaacacacagaaacagttagactgaggcttatctggttgggggccatcctgtgttgtcctgactttctcaggctgaaggcttccagaaggagctaaggagcctgagaaaactcagaaggggaggttgtgagcacctttctaagtgtggacctagattatactccatcatttcagagttaataactttggcatttggagcacaggatcacagggggctcatctgacgtctccctctccatcaccaaaagcctttccctcctttattctattgatgactttttgtcttttctacccagaggaccgtgaaacattgtcaagaaatgtggaatatagattcaagctttctaacattgataaaaagtctcaagcacggtgtaagtaatgagaactcatttcagaacatgttagatacagggggagaaaagaaattttaaagacaaggcatctcagtcgtccccatcctacgggttttagtgaacatttaaaaggacgaattacagcatgcatgtgttccaggagcttggaggagcctgattcttagttactgctttgtaaactatggccaagacggtttattgacgaatcaacgcttatgtggctctagtgccatctggtggtgagctttcagaactggctgggttttgttcctttgtctatgaattgtacttccttttgcctcaaagaattctagtaaaaatttatatattaatcttattaatggaatggaagaagagtagcaagaagaaaacagtggtaatgtgaacctctgaaa

SEQ ID NO: 28042 - DNA, 992 bp, Bovine  19866880467186
  misc_feature (1)..(1): n is a, c, g, or t
ntcttccttatgttatgtcttacctatgggatgaaatagttttaaagctaaatgatactagtatttgattctttgttctattaatacctgacacatggtatacatgcaataaataattaatattattactaatggtacctaaaaatactagccccagaggaaattgcattgattctctgtaattcagtgttataattgccaataacttgtttatatgccctgcttgactctaaattctggtgcctatctttatcaccattgtattccccactgtacaagtattaggttttcagtagatatttgttgaatgtaaacatcttttttttctacattatatatagtacaagtataactgatatttataatgataatcttaaaatactgcaagtccccaaagttccataaagcaatgattaccttatgtttagtaaatattagaaacaaatttattgtatctttcattttagaaaactagtgatctgtgttaagattatataacttgatatccagaatatttgattaatgtctttcttcttgaccaaataactgtgcaatatcttttcctatcattttatttcttatctatgtacacattattataaaattttgttgaatttatttttcacagtgtcagcattaccaatgtatgttttctttttgctgcgtatcatggaaatgagacagttgctttctatcgatattcacaggaaagatttagaaacactggtctgctctgaatcagattgtgaaagccctggaaagtatctctttaaggatctggatgggagagccctgggtctgcctccaccagtttctgtatttcctagaactgaaggagaatggactggatccttcttcaacacaggtcagtgcgttctatgtgaacttgacaactctagcagggggagcacgaacagaactgaggtggttttggctgtgtggtccaggggaacaaagtatactggaaaagaactgagctgtagagttggagt

SEQ ID NO: 28043 - DNA, 1767 bp, Bovine  19866880500194
  misc_feature (1)..(1): n is a, c, g, or t
naggtgcccctgttggtattgtcagttacagtggtagccaggctcatccttcacaataaaagagcagcaaaatacacattgtaaacacctcaagaaattcacaaagtacttttcacctctagttttaaccaccactataaaagtacgttgtgcttgggatttaaacaaggcaaggtgtttattcccaaatttcctttgaatagaggtggagagaagaggagccacatgtcactagttgatacagcagttagagaaattgtgtgggctgttcctgagtgatctgtaaaacatgagtaatatcaattatctaacagagctgctttgaggaataaatgtgatggtctatgaaagcacttggaaaatataaagtggcgtttaagggtaagatgttattaacaacaatggtgatttatttaaatagcagctcagtgtctagtgtgttattttggcagatcatagatgtggaatgaaggtaagtggggtgatattcacaagtatgccttctctctgtcaacctattaaaggatatggtggtatgttaattgcattcattgtttaaagagactttaccatgaaatgcatgaggttacttgtggccctgggcttgtttttgtcacatgagcaaaggaaatcacttgaagagggagcatggttatggaatgatcacagaacactgccctgcactcacatcttggttgtaacttctgcttgctttgtgacatttttcagttgacaatttttatgagcaccatctttgtccctaaggagcttcatattgaagacagataattattatgtggacatgaacagttcaagtgcaaatattaaaggaacaagtaaatagatcatattaaaggaacaagtaaatagatcatatgcttaaaaaatcttaaacactggtacaaggataacatgtaaaatgggggaaagagtatagaaaggggaggatggctctgtatttaactttctggtgacctctctttggaaacattctttctttgacaatgagaaccgaatcattaccttttcctagcaatatctcttctccaacagaaaatttccaacttgcagatacaaaacacgtaacatcattgtttttacttttaggagagtgagcaaggaagggagtctgtctgattatactactttatgtcattactttaggaaagaaaatatttatagagaaaaaatattagactgtttcattaactaattaatatattagagctaatacttgtcccaggcatacttatcagtatgatatgatttcttcctatttaatagtgagatatgtattttaaattttactaaaacaatggttttaatatagattcttcaaaaagatgagacactatctttacacaaaatctatattagatgacataaaataatccccattctaagggattttctgcatgttttaatgatttgataggtgggaaagtgaaaaagaatgacttttacaaatactactgatggtttcatcctcagttccatttattttataaaagattagtatttttcctaagtctttgagtaagaatttataagaaagaaaaattactttacaagtttaaaaattggtagcaagtactaaattatagctaataaacacaaagtctataaaaaagtaagaaggaaatctgctaatttatagccaattcatcaaaatgctaaatatgagcattatctcatggcttcccaggtggcgctaaagagcctgtctgccagtgcaggagacataagagacatggggtttgatccctg

SEQ ID NO: 28044 - DNA, 2020 bp, Bovine  19866880529072
  misc_feature (1)..(1): n is a, c, g, or t
ncttaagacaaggcccatttgttatctccaagtttctgcaggtcagatgtctgggagcagagtagctggggtctctatacaacatctcataaggctgaagttaaggtgtcagcctagttacatccttacccctgagctcaaggtcttccttcagtctcattcaggttgttggctgaaatcagtttcttcaatctacaggatgagggcctcaatttttgttggctgttggccagggaccagtttgggtccttgaggctgctcttaggtcctaatcacctggttctctccataacctggcagtttgctgcttcaaagtcagtgagggctctctcttttaagggctcacttatatgtctatcccctttgactaacccaaagtcagctgatttctgaacttaattatacctgcaaaattccttcaccattgccatatgatgtaacctagtcatgggagtgagatcccatcctgttcatcagctctgttcctacttcaggggagggaaatatctgtggcatgtatatgaagggggatcaagaatcctgggggatatctcagaattcttaatatacatagtatgctcaaatttggggattagagaaggtctctagacatggcctttgtgaaagtcaagttctgctggccttgcagtctgttccatgtctttctgaaggtcacacatttcactgaaacctgagttctcctggagtgccagggaagggacccattatggtctatttcggagaaggcaatggcaccccactccagtactcttgactggaaatcccatggatggaggagcctggtaggctgcagtccatggggtcgctaagagttggacactactgagcgacttcactttcacttttcactttcatgcactggagaaggaaatggcaacccactccagtgttcttgcctggagaatcccagggacgggggagcctggtgggctgccgtctctggggttgcacagagtcggacacgactgaagcgacttagcagcagcagcatggtctttttccattcctggaggcttttttaaaattgtatttttaaaaactgttttttttttttttttttggtttcattatgtagcatgtgggatgttagttccttgaccagggttggaacccgagtcccctgcattggaagtatagagccttaaccgctggaccaccagggaagttcctccattcctgaaggctttactgaggctgttagttctagcttccagtgaggtgttcaggtttgaggtggtctctggggaacttaggagagagaatttttactcttggcagactacctatctctatattcagtgtttctcaaaactggccatgcctgatgcccacacaagcactggaagaagacttgactttggttctgatccaaatgtaaggaattgatgtgatgtcacctgtagctcagacagtaaagtgtctgcttacaatgtgggagacctgggtttgatccctgggtcgggaagatcgcctggagaagggaatagcaacccactccagtattcatgctggaaaatcccacggaccaaggatcctggtgggctacagtccatggggtcgcaaagagtcagacacgactgagcgacttcacttcacttcacttcacctcagacctagaaacgtgcctgggcatgtccttgccctctgtgatctgtgggcttgattcctccaaagtggtggggcaaggaggaaagaggggggaaaccatggagaagactcaatttgtttctgttcatcagaaacctacccactttcttaattgattgctcattacaaagtagcttgatgcttctttagcctggaagctaagtgtaatcaacttttgtttgtttctgtaaaaaacatttttttttttgcccttgaggagatcattatttctattgtatgaagatggtagcccaaacattaaaagtaattagagcagatggcagtgaatacggctattgtaaaatacagggatgcttacaaacggttttcattctctcggcttcctcctttt

SEQ ID NO: 28045 - DNA, 4483 bp, Bovine  19866880609047
  misc_feature (1)..(1): n is a, c, g, or t
ngggaaaaaatggaagcgtgacagagtttattttcttggattccaaaatcactgtggatggtgactgcagccatgaaattaaaagacgcttgctccttggaaggaaagctatgacaaacctagacagcatatttaaaagcagaaacatcaacatcactttgctgacaaaagtgtgtatagtcaaagctatggtttttccaatagtcatgtgcaagtatgagagttgtaccataaagaaggctgagcaccaaagaattgatgctttcaatttctggtgctggagaagactcttgagagtcctttggacagcagggagatcaaactagtcaatcctaaaggaaatcaaccctaaatattcactggaaggactaatgctgaagttccaatattttggccacctgatgtgaagagctgattcattgaaaaagaccctgatgctgggaaaggctgaaggcaagaggagaagggggcggcagaggacaagatggctaaatagcatcactgaatcaatggacatgaatttgagcaaactctgggagatagtaaatgacagggaagcctggtgtgctgcagtccatggggtctcagagttggacgtgacttagtgactgaactgctcaaatctcctaaaagaaattctagaggaggccaggtgctcccaatatggttcttgcagctccccggcctttccctacctggtgcctgtcatactctattatgatagttccatgtctctgctggattctgagcttcacaaatgcagggaccacagctctctctcatactgaagtatagttgatttacaatattgtattagtttctgtacaacatagttattcaatatttttatggattacactccatttaaagttcttgaaagtattgactatcttccctgtgctgtaaatatatccttgtagctaatttactttgtacatagtagtttgtacgccttaagcctctcccttactgtgccctacccatgtccctctccccactggtagccactagtttattctctatatctgatcacacctcttttgctcagagttttatccttagtaaccagtagtctggtgcccagtaggttcactgattaaatcaatgaatggagttggatggatatacatatggatatgaacgaatacacatacaagctttcctgaaagagctagagttcaggaaccttatggtttcaacagcccaaggctttttgtacacacagagagaccataagaattcttgttcacttgttaaccacatctcagaggtggtgagaaataccttggagaactcatgggctaaggcgaaagaactagagagcaatctagttgatttgatcgttgtaaacagacaaaccaagtggttcaagtaaatatgctcttgtggtttgaattgccaatttagataattgtttgcttttttaattaaatgaataatcagtaagtctccactttgctttttatcccccctctatagacagagccaaaaattgtttttatttgggtggcatctgagtttaagattgtagaaataataataggaatgaaaaatgccttaagacaatcacttcaaatattaattcctcagttagaagcttcactgtctcatatcattcataagacactgaaaaggagcaagatactccttatgagctctgatttcttctccctggatgtccttggctaagccatctctttcatttgtttaaaaactatgtagtccagattctgtttaaggacctgagtggtacagagatgaaaagcacatagttcttgtcttccaggagcttcccatctaggcacaagaataaatgtctgagccaatgaatgtaatagtatgatgaatccagtacttgaggattgagcaaggtcaatgaggggaacaggaaggaagggggtcaggtagactttatcatagattgccttgagcaggatttagaagggtgaagagatgtttgcaagaggaagaggcagagaaaagtttttacatattaggaatagcctatgcaaaaaaaattcaaagagcaagttatgattaagaagttgcaaagaaatacaatatagctgacttatagaactgcatgtggtgttagataagcaacaagttgctttcctggtggctcagatggtaaagaatctgcctacaagggaggagacctgggtttgatcccggggttgggaagatcccctggagaagggaatggctacctaatcctgtattccttccttgagatgacagaggacagaggagcctggcggactacagtccatggggtcaaaagagttggacacaactgagtgactagcacagacacacacagaagtttctgaggtggaattgtagcatcttgaatgaatgacagttgagtgcacagactctactgggatgcgaatgaaagctttagggcctctctttgtttatatcttattttacatttttcctttttttatgtattttataagatacataatatagcaatatggtagcatatatctaagagatgtgtcctgagtttttaaattttaatgacagggtggggtgagtattagaagaccactgccattgtttcttcctgggcaactgactaatagcagaaccagtgaatcatatgaagcgggtgcgggggaaaccctgctaagacatgtagcccgagagctgatacctatcaaatgtgctactatttgtccatgtgattgattgaatatggcttttgagggcaaatgtttaaagtataaatctcataagaagtggggttagatttgccttagaagaactagagcagagagatggaaagaccagccctcaggacctttagcatttggtaattagtaatgttcggtgtcactcccagtagaccgccatttctcacccttggcatttgggactggataattgtttgttgtgggggctcccctgtgccttgtagaatgcggggtagcatccttgcctcttcccaccagatgccctgctgtccactcagttgtgacagccaaaaatgcttgcagatggtaccaaatgtcccctgcagggcaaaccacccctggctgggaatcactgcctgagaatacaggctgcatgaggacaatgcccctactactctcatttcactctgtctgcagcacatagcacagagcctgacacatagtcaactcaggatatatattttttcttggacaaataagtcagcaaattgttaaactgtataaatatgcaattttaaaatactgagaataactcagtgacttcagttgccatttgtgatcacattcttttgtgcctctgtgtcacagtctttctcccaacttacaggtgggtttactgtgaagaccaaccagttgaagtttatgaactctccgaacttggtagcatttccatctcctcatgcagccattttggaagacttggatgggtctctgtctggaaaaaatagaagtcacattcttgcttctatggaaacacttccagctacttgtgtggtcaaagctagcttcagccagcttgtccatggcagtgtctgtgaggaaaatgttctctttcatcggatgtctattggtttgtaagttgaattaactctacattttggcttgtcaatggacacgtatatatcattcaggttgttgatatttgtagaagagaaattgttttgcagattctgtttggtgtatttagttctacagaagtgatatgggataattttgacagctgtcagatcataagtttatagtagttttaggctgatttaaatgacagcttattttcaataacagtggaccacatctcatagcccttgaccacttattggcattttgagttaatcatttcctctcaaaaagacttgcaaccaacaaaaaattgaaatgtatttaaattaagaggagtattaataaattccaatattgtccattctcatttatatgcacctcctctccctgagctctttttaagtgtttgctatgctccagggaagcattgctgatgctccctattacttgtgaagttgcttcacaccagttcattttccttgttaattttgtgaactattggatttgtacaaaaatatcctatttaatattggagcaagaactccttgtttatgctacttggcctactattaagtcaggagcttggctgtttataatgcataataggattgcttctgccccctttaatttccaggtaatgattgctgagtgactagggttctaccatttacctatttcaaatgcattgtatataattagccacattcctttctctcctttgttttaaatgtcctaacttcatgaatattaagtcaggtgcttcagccagatcatgctggcatcttatttaaacaggtaaactccacagagagggagtcagtagggtcaggtttgtactaagtctgcattctgaatgcatatgccatccgtatcttgacattctgctttagacaccttagtgataccctgctagcatggaattgtctgaaaacattcca

SEQ ID NO: 28046 - DNA, 2823 bp, Bovine  19866880629487
  misc_feature (1)..(1): n is a, c, g, or t
ncttctgactttggcaggctgaaaacaaacccatgtcccaaatccccagctagtgtcatttccccttgatcagattgtcccagtgacttaatgattgacctcgtgatgcctgacaccattaaccaaactatggcattttatgtggcaagtgacttcatttgagggctcaaacgtccattactcattagaagaaatgctgatggcagaaaacaaaaacctgtgaaccacagtggatatggatttattatgtggcgagactagattcttgcaggttggcaagaacgaaggtctcagagcatcagaggcaatgcggttgcccacagattaccaatgtctgcagctcgggaaggctccacagtgtccagtctgggttccacatttaggaagaggcctcctccactggcattgatggcaagaccagagggtctcaccaacatcgagatctgatgcactccaacaggcagcaggcttgtctgacacaccacgtttgtttggtttgagaaaataacgttgcaactcgttttgttcactgtaacttgcagggccttgtagtcaccagagaaactagttcccgtaatataaaccagtaggtccatgtcatcttaaaagaagaaagaaaccatctctcagcaatatcactccatttatgagaactctgtcaaatatccgttccctctcaccttcctctcaaaattcaaggaactgaatgctgacttatattggaatctgtggttattttaatagcctagagccctccacttaaattttctcaaactagtaatgacaaatcactaaccagttaaaaaatggggaaaaactaaagaatatttcaaaacaagggacaaagaatatgcaacattttaagtcatcaacaatctaccatttcaaattgtgaccatttcatttagattagctcaaaattgtccttttgttgtgctactctacattcaccccatgagctgatgtaccttctattcagccatcaccagggacataccctccaacagatcattctgatcttaaagttcacacacagaaatagtaaccccccaccccgcacacgcacacacacacacacacacgcacaagaaataaacccacatttatggtcaccaaagggaaaaggttgtgggagggataaattaggagtttgggagtaacacttacatactactatacataaaatggataaccaccaaggatctgctgcatagtacagggaactatactcaatattttataatatctataagggaaaagaacctgaaaaaagaatacatatgtgtatacatggatacctgttttttgaatgttggcttaaaactcaacattcaagaaactaagatcatagcatctggtcccaccacttcatggcaaacagatggggagacaatggacacagtgacagactttatgttcttgggctccaaaatcactgcagatggtgactgcagccatgaaattaaaagatgcttgctccttggaagaaaaactatgacatacctagacagcatattaaaagccagagatatcactttgccaacaaatgtctgtctagtcaaagctatggtttttccagtagtcatgtgaggatgtgagagttggaccataaagaaagctaagcatcaaagaatcgatgcttttgaactctggtgttggagaagactcttgagagtccctttgactgcaaggagatcaaaccagttaatcctaaaggaaatcaattctgaatattcattggaaggactgatgctgaagctgaacttccaatactgtggccacctgatgtaaagaattgactcattggaaaaagaccctgatactgggaaagactgaaggcagtaggagaaggggacgacagagtatgagatggttggatggcaccactgactgaatggatatgagtttgagcaaactccgtgagatgatgaaagacagggaagtccggtgtgctgcagtccatggggtcacaaagagtcagccacaactgagcaactgaacaacaacaaatacacatatatatggggctccccaggtggctcagtggtaaagaatccacctgccaatgcaggagacacgggcttgatccctgggttgggaagatcacctggaaaagggcttccctagtgactcagagagtaaagaatttgcctgcaacgtgggatacctgggtttgatccctgggttgggaagatcccctggagcggaacatggcaacccactgcagtattcttgcctggagaatccccatggacagaggagcctggtggcctatagtccatgggcttacaaagagttggacacaactgagcaaacaagtatacacacaggaaatggcaacctactctagtattcttgcctaaagaatttcatggacagaggagcctaacagactaaagttcatggggtcacaaagagtcagacatgaccgagcacacagcatacacacatacacacgtatatatacacatagttttataggggatgtgtggcttccctggtggctcaaacagtaaagcatctgcctgcaatgcaggagatacaggctcaatccctgggttgggaagatcccctggagaaggaaatggcaaaccactccagtatttttgcctggaaaatcccatggacagaggagcctgttgggctgcagtccatggggtctctaagagtcgggcacaactgagtgactaatacactcaaacatacacacttattaaaaagactgtcttttctccattatatattcttgtctcctttgtcatagattaagtgaccaaaactgcgtgggtttagtatgtgggctctgtattctgttccattgat

SEQ ID NO: 28047 - DNA, 648 bp, Bovine  19866880700839
  misc_feature (1)..(1): n is a, c, g, or t
naatctgcagggcatttgaaactcactctgtaacagtaataggctttgctgcttaaaaagtgattatgactaatgcaggaaaacaattatcacaagacttaattgccaagagttaagatatatatagacagatagagatggattcattctcattgaaatttgagccattgctaggaaaaactaagtgattttcaaaatcatgaagcaaaactgggaaaaaatgtttttaattcatcagtctacacaaggaagattttatccatattatttttaaagttttaacatttattgtttttaatacatgtggggttgattggagaaattcttaaaaatatttatgaatagaactaccccatagggctggccctataccaccaagagatagcatgagaatagagacaagagtggaatctaacagacttgtttctagttgtggtttggccctgggcaatcacttcatctctctaggtcttagcttcttctttcacataaagaaaactttgggctaagcattgctgggggcctcttcctgtgctaaccttctatgattcgaccttacatgatttaaagtagaaacagtttgttgtctacatttgtccttctctttctgagaggaaggatgagagcaggcttaggaaagaagcaata

SEQ ID NO: 28048 - DNA, 793 bp, Bovine  19866880710331
  misc_feature (1)..(1): n is a, c, g, or t
naatgaaaattaatgtcaaatagactttattaacgtcaaatagaaaattaatgtcaaataatttacagagatgctgatatttatttatcaagaattcatgctcttgtagaaaaagcagaccaaagaagtgctagaagataaggatgcagtttttctataactatattctttgcaaagagctgctaactttatagcttgactttttcttcaaatccacacaggtggtttctttattctgctctatcattttttttcaaactgatcttaaaaataggcagttttcaaagcaccctgaggcacatgattcaagactgaaagccagcttccttacacctgaagaagagccatctgcctgtctggtgtgtgtgtgtggaatggggcggggagcgggggcggtgggaggctgctcatctcattctcacctcatgggaagagtccaatttcaactttggacgataaattcccatcccactccctacatacaccatctcagtgtctttctccatcacagacagacgtgcataattcccacagtagaatcaacattttaaattatgatattttaattgatcaataaaatgtttaacatacagtgtttatctcttcctctagtctataccatctgttcttcaaaaatagtttgaatctatttaataggaaggtctttaagtaaaattaccaactgtatcagatcagtcctctaaagcccgaattctgaaagggaaataccagaaggtgctgctgtttttatagaaatagaaaagactctgtgccttttctcattccaggcttt

SEQ ID NO: 28049 - DNA, 1115 bp, Bovine  19866880715151
  misc_feature (1)..(1): n is a, c, g, or t
nttgcctggaaaatcccacggatggaggagcctggtaggctgcagtccgtggggttgtgaagagtcggacacgactgagcgacttcactttcacttttcacttgcatgcattggagaaggaaatggcaacccactccagtgttcttgcctggagaatcccagggacgggggagcctggtgggctgccgtctatggggtcacacagagtcagacacgactgaagtgacttagcagcagcagcagtatgtggatgattataaacttaggagtgatgatgatatctattttctccattctccagcaacacctggtttgattttgctggtctctctttcttttcacgtaaggattcctttgattatcagtgacctaatagagcaaaagtgcccagaggtgaaaccaaaccaggtttaaagtaaaccagaggttgacactcaccttcaaaacaacatcagagaagtggtaagattttcctgtttatggagaccatttaccagggtcgaagagtttacaatagctttggtaaagagattcttatttattcctttgttaatagatttcttacctggaactccactgggtggattaactttgtaaacaattggtgtctgtgccctggaaaactgtttagaaaatgttatcacggtgagcatttcattagaacaacacaaaaacatacacaagaagcctgtcattcctcacaggtcgttcatctacggaagcaagtcgctgtatttcctcaaatcacttctactacttttcatcttcatgatatttctgtgaagcagagacgatagatgttatcatagttcttccatggatgaggtcaagggactctgacaaggtcatgtgtctccctgcaccatttatcactcacacctgggcaaatctgtttctaccagcccaccggtcataccaggagcatgttttaccaaaggaaaggtagacaagccatgctttaaaataccaaccttttaattcctttattgcaacttgatatcttggggtcttaaagtggggtttttttttaacttttctggacaataatttgcttatttaaattgaaaggattgcaacttaaattattatcagtcagcaccttgcaagctatgaaa

SEQ ID NO: 28050 - DNA, 1316 bp, Bovine  19866880775065
  misc_feature (1)..(1): n is a, c, g, or t
ntgggccaggacatcgctatcataaagcaagaagtccagcgatcaccaaggtaccacccgcaccttaacgtctctaacagtgctcgaaataaacacgttccagactcgcattgcatcagcagtggcgacgtctaacaatacaaggataaatgtaatagcaatagagcagctaagaactggcttggagttagaccaagaaggataaatcctgctccactggttactagcttcaactttctctcctacaaagcaagaacaatcccaccagcctcacaggtgcatgtgtgaggattaatttagtttatatttaagctgcttcctagagcgtctcccagagaattctcaacaaatggtaattattagtatcattctcaggagaaccattcttgaaatagtttttttctggacacagagacacagatggataagactttaaaattctgttacttctcaaacagaccaatgtagttgccttccacacgacattgcagagtcccaagaccatggtcttcctgaataggatagctagggaaaaacaggaaaaggtaagagataagaattacctggcaattcacttcagaagctctggttctttacccaggaaagttataaaacaaaataaaattacaactagagttatcatcaatacatacactaccagtcaaacacatagtgtgagagacaaaatttaacgtactccttacctccattgggttctttctttccaaagtctgttttatgacaaggacagcaagatcattatcaccctccccccaaaaaaagtctattagcaagtttgaacctgaaacaggaaaattctgagcaaaccaatggaagataccaggaagaaatcacattatacaatttgcctcttctaaacactagtcccaaaaaggtaagtcacagggtacagaaggttaacccactcagtcccaagtgatttgaaaaagccagaaaaatgttgattatctcaaaagtaagcacatagatactcattttctaaattttccttgtaataaataaacaattgaacaactgaaactttagtgtttttttcctctggctagtcgatacagtacagtgggtgagaggatgaactctggatatagtacagtggttaacaggatgaactccagaggctagtgagtggacccaggttcaaatcccagctctgccacttgctcgtagtgagactctgggcaattacttaacctctctgtgcctcagctcccaaatctgtaaagtgagactaagagctgtatgtacttacaaggttattggctgccttcaatgtgaaagtgttcatgcagtaagca

SEQ ID NO: 28051 - DNA, 802 bp, Bovine  19866880795707
  misc_feature (1)..(1): n is a, c, g, or t
natggttccctccatatgccagtgctcattctcttaagtaggatagattggtcactgacagagcaggatgcaggagcactggccaagtcaagccaaggtgaagagcattgggccacagttacattagagataatccatcattcatgtttctaagtgcattgtatgcataactgcttctgaatgttttctctgaaacatcttgagtaatttcctggaaagcatggtacttctagacaatgtggcatattgatcctaattgtctacacctggagcagagagaggtcctctagaagctgtcattatagctgagagtcattttggacctgatctgctctggagcctactttaggatgattttttttttgtctgcatcaatttcaatgccaactgtcatgtctgttattgtaatgcaaagagaattacttgatataaatctttataagtcaaaggtttctttcatctttgcagaattttgttgtaatacgcacatagactttccattttgaagttttgagaatgaagatgaggttaatctccatataataaaaaaatatgttgtttcaagtatattgccttgtgtttatttatctgtcttcatctgatgatgggaaacatgtctgactcatctttgagttctcaccacccggcaagatgtggcacatattgaggaaggaaaggaagcaagaaagaagtgtgactagatggatccaggaaatttcaaagtgcagttggcacctgaaagaaataagaataatgtttctactcttcttcatcttattctttgcttctaatggctgttgga

SEQ ID NO: 28052 - DNA, 2030 bp, Bovine  19866880853438
  misc_feature (1)..(1): n is a, c, g, or t
ngaatcttgttttccagaattttgcttctgcacatatgaggcagaaagaaaaaaattattcttttttattaagactcgcaccaccacctctacagtgtctcaatgaataaaacagaagagagatggccgggcatggtccttaatcaccatgctgtttttggttttgatggcctttcaccccagataatagttttcctactgattaaaagattaggaaggagagagaggggaaagaaaagaaacacttcctaaaatcgcacattaaagatagcaagtccttcagtggttcccagaactcggtaagttgatgaaaagtcaccaggggatgcagttaatgagaggcattctgagctgaaggaaacccggtgtctgcctttgtttggggactggggctaggggaaccgtgtgtattaaaaattaattccacctcgccagtccactccaaagagcctgctgcaggcactgacaagttagaacagctcacagaaggtttatcaagcagctggtggctcggctttgtcactctcatcctctgcttctcagctccccatcttgctgctgccgaccctacttgggctcagggatcagcatgaggaaagccgggtttggaagctcattaatttttcactctgtcatgtctctagcttggtgggtgaccagaggcctgtttctctttaaaaaagtacagctttatgtcatgtcagctcacagagaaatcacgagtggagccctttccgaggtttccctctgagcctgctccaccaccctgaggacccgggagggatgatcaagctctctttcccctgctcttctggaggaaggcatacagctgaagggtagaccctgtattttaagctggaaatcgacgggtgtgttttcttgtgtggtttggacttagttgtttcatctgcctccgtttctaacttctgggagatgggggcagtaaccactgctctatttcacgaagctcccatgataaagtcccagtgggcatgacagtggtctgaaaggtgtcctggtggaggtggaggtctgagtgcaggaggaggctgggagagagggagtgtacgtttggcaagtgtgtgtggagctgtgttaatctttatcctttggtgccagcagagacagctcccagcctgtgaagtcacagcattcttattttgacccccagactgtgcatattttctgtgcactcttttctaacctttctgttaggaagggaggaaactaaccttgatgacagactgcacagatgtgtgaatcaatacgtaaagcccacacttgcccagacaccatcaaagtccgttgattcacgatgtctgatgagggctggtgattaacactggagttactctttagtgaccttctccctgggaaggtggactcctggggtgctggaagctgaccaagcaaaacagtttgctgtcttggctttgcagatgggaggtacagtaggtttggggagggaaggcggtctaggcgcctataagaggtgggggtgagggtagcaggatggggagactgggtctcctcctgggtgaatcatgagcacgtggctcaaaccgcggccagggcagtccatccttatgactctctgtttcttcccactggccctgtaatctgggactaacccagaggatgacaggtgatatggaattcctggaattgtctccttttctcctttgcttccgggcagtgtgtcagttgtctcagatggggcctctccatgcattcacaaaaatgtaaatgtctccttataccaggctgtgcccagggatgcaaccaatgacttaggccttgcccctgcctctctggaacttatagctagcaaatgacgcgctgcaggaggtgacctgagtgccacgaccaggcttcccctgcctgtcccatcaatgctggtttcctccctggagaataatgttgcttctcattcgttgcgtcatgttcccccccacaacaggcaccttgcattttcccgaacaaatctccctttcgtatctttcaaacttctaattttcatagcttgcaag

SEQ ID NO: 28053 - DNA, 2489 bp, Bovine  19866880907620
  misc_feature (1)..(1): n is a, c, g, or t
ngggtctgcatgtagaatcttgcatttaaatcattttgcggttgtctctaaatatattaacttcaaattgctgcaaagaaaataaaactgataagttgatggcccaacctcagtgtgcggtttggtttgcttgtttaattttagaccttacttttcagtgacatccgttcagacttgaaacttcagtcattttctgaccttaattctcaaggtatcagatgaagtcagcattaccaaagggaagcccacccataaaaagaaaatttgcatttgcctgctaacgtattgggatagaattctaaatgctttggtttgaaaagaaatggaaagttttctgacccactttaaatcagtgtttcagtaaaatgctagtgaaaaacctacctaaggaagaggcttggtttccatgaggttagtagtaattattactcaaaggagaaactgacatgctcatctgatgagttgggttgtggatgttcatgtagacactggggaaacactgatggattgcggttgttttaagatgacgtgatgtgatatatcttccttcttgtatggcttggtttcgtcacatcttccaaatatcatctcaatgctttcagtccgggaaagatgtgtaagagcaaatctcatttacccagatgatgaaggcataatggactactggggagtcaccagggacagaatacctgtcaatcaaatccctcaggtggccaaagtcacagctgatcaacattcttttgactacataggatgaatttgttaaaatatcatatatcaaggcatgtatgtggaatctagaaagatggtacaggtaaaactatttgcagggcaggaatagagatgcagatgtagagaacagatatgtgggcacaggatacggggaggggatgcgatgaatcaggagaatgggactgaaatatatacactaccatgtgtaaaatagatagctagagggaaactactcgtataacacacggagctcagctcagtgctctgtggtgaccctaggtaaagagggtcagggggggatggaaaggaggtccatgagagaggggatatgtgtataaacatagctgattcacttcattgtacagcagaaactaacacaacattataaagcaactatatcccaatggaaaaaaagaaaaagacgtacaaagagttttgcgatctgactccatcagataaaaatagtctggtctgggctagatctaggctcttacaacatcaaaaatgaatagcaaaaaataaaataaaataaaatttcaaaaaacgaatagcagaagaaagataattagtcactcacaggagctgtttacagcgtatcttcatcaacaaccctgcaagagttagaatgaccagtggtgaaaaaacagaatccagatgttggaaaaggattctacctctcacctctcagccctcaccagtccattaacaatgattcatttagagcttctctctattaatagctccttcaatttatcatgtcacataaggggggaaattcctccaccagcgatttcagggaaagtctgtcacctacccttgcagaattcccacccaacagttcatcattcaggacaggcctcagaaacacagccatagtgaatgcttaacagctttgctctggagatgagcaatgatactatcaggctgatattaaggttgatttttcttatttaaaaaaaaaccatggtgatttcacatatagtaagttgtgatcctttaaacacatcagctttaacctcagagccgagcctctggtacataacactattaatacttcaaaattagatgatctagattttgaacaactggatctaaatctggacctcagctaaatcccaactgtactgattccccaaggccctccaaatgactctgctgcaaacattcccttccctcaaaaccatgtcttcctattaagtgtctgacattgcttcttgtatgctggcccacaaattcaaaacccaaaaagattcttggcagctactcattatcctctctatagtaaatgaaaatcaagagaaaaggaggcttactggtgatgtgaacaccatgagacaacatgacacccatttctttgagtagccattgtctttaaggtgtaatcggagaaagcaatggcaaccgactccagtacccttacctgatacagaaatcattaatgatggcacagggcctcctcttctactcagattagtgctatttttattttaaaaggcgctagagtagaaataaaaaagacaatagtgattatctccatggtaaccccaccacctaagcaagaaattatttatttaattaattttttaatgacagtcttaatttaaggaatatatattcttccatctcccatgttattctctactataagtagaagggaatgctgtttgataatgtaacacagtcaaggagatttgaagatcatttccctaagtcaagaagcccagagacacttcactaggaccatctcttccaaagca

SEQ ID NO: 28054 - DNA, 2939 bp, Bovine  19866880915984
  misc_feature (1)..(1): n is a, c, g, or t
nacagaatgccctgttgcagatacactcacaaatcagagcaagtccctttggtgtccccatctggggagggaagagaagcaagggcacagctcctcttcacaaaagtatttcttttaagggcttccctggtggctcagatggtaaagaacctgtctgcattgcaggagaccagggctcaatccctgagttgggaagatcccttggagaatggttacccactccagtattctaccctgaagaattccatggatagagaagcctggtggactacagtccatggggtcccaaagagtgggacatgactgagtgactaacattttcactttattcacttctcactccttctaaaaggcaacctcactccctcctccttagccctgtttgtaggaataagcaggagtgggtgggcatttgttacaccaatttttctggaatgccccctgggcaaatgcttttgtggaacctgcctaagaatcctttgttctgcctgatgggatgctcttctagctggtgacaccagggatactggacgatgttttcacactctcctgtcacagttcccttccctagctcggtcatctccagggaacggcatggctaacattgctttcttcctgattgttctaagtggcctgtgttccactgctctgcattctctctttcttgcctcctcccacaactttctcgctactctccacttccggccttttgccctgcaacaggagcctgtctactttagtgtggtcctctggccacatctgtatctccactgatattgctactgagatctgaatctaatttaaattccccctcaggcattccgtgtgatattagacatgtgtctcccaggaggattgagtgtaccaccagggccccgagtaaaggtgcaaggctctctgctcctcaggcaggtaaggaagtcgccacggtgacattttttaaccacaaggggcaggaagtggaaaggaaggcgtttgaatctgatctcagctgtttgattggctgctcagtgagtcctgcatcatggatcagagcttttctttcagaggtattcttagctttactcagatgcttgacaacacccggggactcctagccccaggcgactgaatggccagtgggttcagtggaaaccacaatccaggaagtgtaactgccatcaagatgttcccatagtgattggtggaaaagcctgagctgcctcctccatgctctgggtcagttgcactccagttcatgctctaagaaggcagagcaacagactgcttcttctttgctcataggacggttagatgaggcagagaatggggtgtaatggggtgcatttaaatgttgtttctttgctgttgtgggcactgtctgttactctgaaaagtagagctgtattgtgatggggccaccagaaacagagcgggcaggggggcaggttccactggtcctttttcactatttatttatttttggctggatcttcattgctgcacatgagctttcttcgttgtagtgcaagggcttctcactgtagtggcttctctcgtgaagcacaggctctagacgcatgggcttcagtagttgtggcacactggcttagttgccccatggcatgtgggatcttctcggaccaaggatcgaacccatgtatcctgaattgcaaggcggattcttaaccactggaccaccaggaaagtccaccttctgtgtttaaacctcctaccccatgtctacaaattgcaagtgcaccagggaagcacttttctgggaagtgttagaacaggatctcaggtgtagttagggatgaagggtagttggtgtctggagtcctacatgccccacaggggctgacttcacagttaaaagcacaggcaggggagttcattctgagtctcatcgaggggaaaactttctaaagaaaggccattcgggtgtaaaaactcattcaaagcttaggctgggcattctccaggtccctgatctgtggtctttactcaaggaaagctctaatccaaggtaacaaatgactatatgaagcaagtgatggagaaaatgtgagtctgaattcagggaatagagagtctgattcctatcacagcggttcctgctggaagctaccagggtcgtggtaggggaatttcctgagtgctgctgatttttttaacttgaggaagtaatttttattgcatttctaggcttccttattacatttagcaggcaagtttgaagaatgttgctctaaaataagatcaaaagagtttaaagtgtacattataaataaaatgtatatagaaaacacaatgtggcagttctggatggttgtcagtgtcctttatacaatgcttttggaatttcttttatggaagagtagcaggggtggggtggacaggcagctgttaacattcgatcgttagctctagacaggcagatcacagtctcctccccagggccctccaggctgtctggtctcaggctggcgggtgagctgggggtctcagggacaggatgagggctgtgtcctgcaaagctcccaagccctcaccccagcctcccattgaccggcgcaggtcttgagtcaaggacgacttctccccttatctttgcctctgcgacctaatggcgacaggggtctccatgggttgcagttcatgggatgcagccccgatttgggcggcctgaggatcctgaggggcagctggagtcctctgtgatggtgactgggtaaggtctggatacctgagggcaccgccagctgaaagctgcctcctcagctaggctgggcactggcaggaggacccaaacttgagtgctggccatacattccctgggcagggtaaccagcacccgcagggaccccccctcctcttaactaggacctggatctcagagggtgaaggttgagccttcttgggaccttgccctttcttgtcagaacagagactaacat

SEQ ID NO: 28055 - DNA, 3778 bp, Bovine  19866880979841
  misc_feature (1)..(1): n is a, c, g, or t
nctctgtgatgactcagatgggtgtgatggtgtgaggaggggatagtgtcatggaggaggggatagtgtcatgagggaggggatataggtatacatacagctgagtcacttggttgtacagcagaaattaacacaacattgtagatcaattatactacacttttttaaaagaccctttgcctggtctcagcctcagctttgagttcagggctaaagaaaaatcaaacatgaaaaacctggctccactgctagaagtgaaatattccacaaccatttacaactgtagttgtaatttccccaaatttcttcaaactggagatcagcaagttcaaataggttctaaataaaaaaggaagaaagagagaggaaaggacagagagaagaaaagaaggaaagaagacggggtgggggggaaggtagggagagacaaaataggaaaagaaggaaggaaaaagaactcctatggagaagatactgctgaacatacatttctaaatgataaatcttaattactcctgctgaatgttcagaaatgactaaaaaaatcaatgagcttaatctcccacatttatgggattggcagcacatagtagaaaattgggtgtatccatcatcaagcgtgacttggccaccacatctttccactctctcctccctaaccaagtcagtagaaatgaaatctcagagttgcttttcatgcctcatcatacagagtggtttttaatgcacaagtatatatgattgaccatatattgttgtatagcgtgaaatttaaccaaacatatatctaagctaggtaaacttaaaatatgatgaccctatcaagttgaagtaaatactattaagacatgtatgaaatgcatcactaattctcagtgattcacagaggccatgattcccaggggttctgtcacttgcgcaagtttggggacacctgtccagcaatccttgtgtgataccaatgtctatctttctcttcaaaacgtcaaccctactctcattctcctgcttcctgaaccaaaagccttcaacagatacacttttgctcacttacaagcttttcttctgcctcagagatagtattagcagtagagggagagagacagagacacatagacaaagatagaaaagcatttggtgcccaaaggcaagcctttccggtcaggtcacatcagagccacctgaaaggagaaagtgggtcacaaacaagatcagaaggttcctgagagcaatacctaagaacccaggagactggaagaatccaagattccctccaggaagccccacggggaggaggggagggccctttggctgactaaaattctaattttagataacaaaattggaaaaatattttagatagacaagaggaccccaggtgaccgaggttgtctttgctgactttttctatcttccttgcagaccacaagcatcacagtggagagaatggcacctttgtgatctctgattccccttgtaactgacatagcacatgtgcgtgtaccaagtcccttcagtcgtgtccaactctttgcgaccccatggatgataggccgccaggctcctctgtccatggtgattctccaggcaagaatactggagtaggttgccatgctctcctccagggaggtgacacagtagtagtgcttaaaaggaagattttcagaggatgactagaaaattgaatctaccttaccagctcaatatgtcaacctcctagaggtgtgtatttttaatttttcaagaaagtcctcaaaagagacatttcaaagagaggatttcagcaaagcacaaagatatattttggaggcagagtctcttcccatgacccacaaatcacagcacgagaatggtctctcttgctaagcttgagatccaatgatacctgacattcctgtaggaatcccatgtgagaatgagaacaaagactgagaagctatgaaagtggaggaaccagattttcctgcaaaacagtctcccaaaaaagactaatagccatctaccttaccacattgccttatcgccctttaacccagcaaattcaaagagttgggagaagccaaaggatttcaaagaatccttatgttaaatgtgattgtcatgcactgtttacttttatgtgtttaaccttgaaaggctacaagtagaatgaaggtcatttgggaggctgaaaatgtaggtcgagttcaagttcgtggaaggagcaccctaccaacactgacttccttcccctgaggttactgtaagtagttgcctgtttcagtcagacactgagaagccaacttcagcccccagaatgctcttcgtgcgtctcccacacagagctcagcagtcaaactgaaacagcatccctctgcatcctttcagacccccacatgggtgagtcagagccatttcccagcctctaccttctgctttcaccaaaggcatggttcaatagaactggcccctggataaagcaaactgtccagaatacactaaaaagaggtctcaacacttgaacctccattattgctctgaggcatgaacatttgccaggagattagaaatgggtagactgtgtgtgtgttagttgcccagttgcgtccgaccctttgcgaccccatggactgtagctcaccaggcccttctgtccatggaattctccaggcaagaatactagagtgagtggattgccagtcctttctccaggggatcttccctacccagggatcgaacccaggactcctgcattgtgggcacattcttaactgtctgagccaccagtggactataatcaataatgttctcccagcctggaaatataattcttaattaggctaatcaaacatccacgttgatgaaaacttaggcatgcaacaaagaaaatgaagattcaattcgtttcctatcattgctataacaatttactacatgcttgttggctgaaaagagcacacatttattctcttacaagttcactgggtcaaagccaaggtgtcagcagggctgtgttccctccagaggctctaggggagaacagtttctttgccatttgcagcttccagagctgcatccctcaattgtggtcccttccttcatcttcaaagcacatcactccaatctgttttatcagtcatgtcatcacatcacatcgtatttagtcctcaaatctccctctgcctccctcttataaggacatctgagattacatttacagtccaccacaacaatccaagagaatgtccccatctcaaccaccttagtatgatcaaatctacaaagtctcttttgccatttaaggtaacattcacacattccagggatttgagcatgagtatctttggggccattattcaacctactatttcatgcaagaaagagtttcaaagaagaaaacaattagacacatcctacagcaccctacaactgaatataagattatcttgattatttagaaaacaatatctaagtttttccacactatgaatatcaatgatcacgatattctaggagcatagaaatgcttgtgaatatagagttctggagaataaatgaaaccagaaattcagcttttagacttcagaataaactatgaggtatagaatcatttttgttcagtaagagtgccttaaaatctttgaaatcttagagcaaatagtagagaatttgagaatttatttttaagaggcaagcaaattttttgttttgtactagatgtatcttgaaactgccaattttttttttctgagaaatgcaaacagttgggtcatttaattatgcaaatataaaagaaagc

SEQ ID NO: 28056 - DNA, 1053 bp, Bovine  19866881017438
  misc_feature (1)..(1): n is a, c, g, or t
nttttaaaaaaatcccaattatcttcatttcctccatttggctccttggtgtatgatttaagatgcctgactcctttccaacccagcgagattggcagagggtggaacccaggcattctggctcctgtctgtgcctctccactagggtgtgctgcccactcaataatcgtggacccctgaccagccaggctggggggtgcccggcaggtttccgggagaacgcttctcactgatccccagtgacaaagaaaaaaatcccgcacatacaatattctttgacccttccttttttcttctttaccaaggcaagttttgcctttgttcggcaaacgtctttacagaaagcagcttctttggaaagctcacggccagagtttggggcttcgggctttaatcagtggctggctggttattttacctggggcatggaattataaatgttctcttcctctgtggctacatccatacaatgaggttaagcttacttatctattggaattgtggtacaaaacacccaacctcttcaagtgtgattagcatgtgttgttacttcactatacactttctcagtagatgatttctctaaaacggttctttcttcccccacctccgcccccaccctgaagatgaacaacctcaggtgccttgaactcagcgtacctgtcataacttgtctgcaagagtctcattctattttccttgactagcttttgtaagataacagattcatgataacatgacatggatgataaatgggtcccctgattgaaacttaataccacttaagcaattgttacccacagactaagataacctcgctcatttaaaaacatctctcttaaggagattggttcaggttgcctttctaatgcccctgagatttctgcccaatgaaccgcttaaacacagaccacgagtgaagtccttgcgtgctatagtttgtgtgagggtcccggaggggcaatatttgctagaataaactgttatgaatggcagtcacgaactgtcacttctgcgccatgcttgtgacaggtcgactgtaaaacaagagtt

SEQ ID NO: 28057 - DNA, 2314 bp, Bovine  19866881026457
  misc_feature (1)..(1): n is a, c, g, or t
nagattacctgtttgtagataaatagaacacttcaacaagcgaacgagatatctcattttgatatcttacattgttgaaattccttgcagccagagctttaaaaactaatatttgatcattttaattttcaaatgctctgacacctctctgtgcctttggagtcagctgtaaactaatgaatctggaaatgatcaattcatatttctttccttagtaacttatcagagttcgcctgaagccatgcatcctccttagtgcatgtccaggatgtctgaggcattttctcctttgtgacccagattctctgatttgtgtgtctgtatctagcttccaattatgtagagcatctccttggacatgctgtgtagtccttattagtaacagagaaaaacaagtagctaaaatatgataggtgtattctccaaaggacacttgaaggaaacatttgatttatgatatgtttcttgccatttaatacttactttaaaaatgaataacaaagatttttctatttctctaagaattccaaagtcccaattttaaagtaaacttgggttttttcacaaagtagtgaataaagaaaaaaacaaacagactcccagatatagagaacaaactagccattacctgttggaagacggaagtggggtggggcaggagggggtaggggattaagagatataaagtattctatataaaatagataagcaagtaggacatattagacagcacagagaatgtagtcaatattttataataactataaatgaaatataacttttaacaattatgaatgactgtgttgaaacttatataattgtgtacatcaactatgcctcaatttaacaaacttgggagttttcagagggtatatcacctgtgctcttgaacattcgactggttatcacccatggctcctgccagataccactgccacttcctccaggcaccaccttgctcactgcacactgctatttccctccagacaccacagactcctacctgacactgatgcctaaacacaagaactctgatggtaccaaagccccatgagcatgtgaggggaggcagaggataaatgccttatatcacacctacagatgctctgctgaaaggatgccagggcactgctgctttgcatagagtttgagttcaactctttttggttctgttattcttcctgcttcctcccataccatctggcctctttggattcacacaggactcagttgctattttagcctaaaggcaaggccccaggacaaaaatgtaggcagatgactcaaactttgttccttggtcacgtttgtcttgacaaactcctttttacttgggctgtgttctttcccagatgttttctcagcctgccatgtaaataaatgtctggtgggttggccccgccccttcgcaaagcctgctgggcatctcagaacttccccttgagctccgttacagtcctgtggaggctagaattaaacgaggttgcctggcccatatgaggatgcttagcccagagccagtgcttaggtatagcctgcaaatactttaatcacaaggaatagcaagcccttcaaaaagtgacggcattagatgtggattggttgtatttctctttacggaatcttagtaggagtgagaagacttgattttggtgtaagtaaatgtggataaagcacatgtgattaaatagttcagtcattgagtttagggggcattggggtacgatttgttgaatacacttaaacagagtacaaaattgcaccctcaggcccagtaggagtgtgtccttgcgctagggggcctgtttttatgttgtgattccctgggaacattttacacacattcttacacttgtgtgtttatatgtgtgtagatctagtgcggtgggttggtagggaaaggggcagaggagagaaggccaagaaagatcctctctaaatcactgctttgtccttgaactttggactctagagctctctttgttagcctagatataaaagagagacagttcattactttgaagctcacatcatataattctttccattctttgcccctcatcttcttcccaacaatccgaaccaagatttatacattctaagatctgaatgtgttggggcaggcttctcaccatcagctgggacactttagagtgagtcagctgcctcccacagtctaggagacgaggaagggggggtggttcctacctgggaggccagtggggtccttcctgaaccactggtgggagaactggcctcaattacctgcagttgcctaatgtctttatttaaatattctctgcagctccctaca

SEQ ID NO: 28058 - DNA, 1252 bp, Bovine  19866881041549
  misc_feature (1)..(1): n is a, c, g, or t
nttaaaaagtgatgaaggggacttccccttgcagtccagtggttaagacttcatgcttccaatgcggaggcgagaaggggaacaaaggttcaatccctggtcaggaaactaagatcttgcatacagaggagcctggtgggctacagtccattgagtcacaaggagtcggacatgactgagagcaactaacactttcactttataccttaccatgtggccaaaaaagaaagaaagaaactgatggagctagtgtttatggagagagagcttgttctatggaccagaaatcctgaacttttgacttaaggtccaaacaccatcctttaccatactggccacctgatgtgaagaactgacacattggaaaagaccctgatactgggaaggattgaaggcaggaggagaacgggatgacagaggatgagatggacatcaccaactcgatggacatgagtttgagcaagctctggtagttggtgatggagagggaagtctggtatgctgcagtctgtggggttgcagagtcggacacgactgagtgactgaactgaactgaaaacagatgtgcccacaaaaattgttccatgctcaatatatgtgggaagtacttagaccctttactctaagccttctcagaacctttattatattcatgtagacagtgactttctaagatggagctttatttgactaggaaacaacactgaaatcatttttaaggaacccaagtttcagaaataaggtaccaataaaattatttcacaataccccagaagagctaaagcttgaaggaaatgagagaaattgaactgatccctaaagcagtctagaatatggaaatcttcttacttaaatttacactattaatttatagcatgagatgaggtctgccatcagataaagcatgctactgggaaagagtaatagaaattcaggaaagagataaaattcaagtggtcattaaatcatctacagtttcaaagcagaggaaatttcacatctgctgaagatggcttttctttatatatatattttttctttctgaggtaaaaatatgcctatgtgctgatagctagaatattattttaacatcacatgataattaagcacagattaggactgaaaattcatagcttctcagagcataaatgagcatctattccaaacattttgttttataaatgaaaattccacctattgtaattttggagggtcccatagcatccaattcatagtgcttagtaacttaaaa

SEQ ID NO: 28059 - DNA, 974 bp, Bovine  19866881048377
  misc_feature (1)..(1): n is a, c, g, or t
ntctgagaatctgggcacatgacggggaatggagggtggtgccaagaactttagcaactgactggacagtgtggaccttgtctgggagccctggtggtctgccgccgtacccagcctgggactctttcagcgccaggatttattcaggttccttgggctggaagcttactctctgtgagtcctgcttcccacagctaagaagattctctgtgcaggagagcacgggctcattccttgtgctaatggagttctctgaactcttgtgttcccagtgggtgctctcatttctcttctcccctggggagccggtggccttcattcaagctcctcctctgcacagcttgcctcctccccgcaccttccacctgagctgctgatgggcctcccgtggatcagcacctgaggacctgctgggcccggtgtggcttgccgagctggagctcagagctctctgggggtttactgtctccccagcccacaggcctcccgtggcttagcatctaggcgattgacacacctcctgtggtgtcagctagggagcagcttgagcatcttctgtttgctgggaaatcatttcagaggttaccttttctcatttgcatagtgtgaatgcacctggttttgtttcctttctttttttggtgaaactataaaagggagagggtatataagaaaatgtcaacacttgcttatagctgtgacattggctacagcaaaggggcccaagttttgccatttggcagttagtgtaggcctttatcataacgccggtgaggaaatcattataactggggaaagaggagtaggagtagagccagtgtctttctgtatcctggtgtatgtagtaatacttggtgtgtatttaatgatatcttacgagtctgaatgaattaaaaaggcttcccacacatcttaaattatctcattcatctggaagtgccacttcagaggaggctttcggcagagcaagctgg

SEQ ID NO: 28060 - DNA, 803 bp, Bovine  19866881051318
  misc_feature (1)..(1): n is a, c, g, or t
ncaggaggcaggggacatgtggagtctctctcaccctccggccccacatccaggccctttcatcataccacagacagaccctttccaagaacttgaatggggatccacaacctcccctctgatcgctcattaatctgccccttcagacattcctctgccttttggctggtctggcccaccccctccccaccccccaggaggataacattcagagtggagtcacttcttgtgagcagtaagtaccatccaagaaagcaggctgtcttgtggtacctgagtgttagagatgtctgagctccctcaacttaagctgctctctggacctggaatgccctgaaatggtcactttgggagaagtggatctgtatccattgggggccaccaggagccaggctctgctcggtgcctggtgatgatcaagggaagcagacttttgacagttcagccttgtctttgagaagctgcccttaaagagactttacagagttgctttttgcccttaagacgctgcctgtctagttgggaagataaaacatgaccacacaaagaggaagtatattatgaatttcaatgaccacgacagagtcaggggaggaaaggtgaatttccaagctgaggactcatgaaaatcttgaatgaggaagtgggatttgatttgagcctttaaaggattggcaaggtttacacaaagagggtggagaaagggcaatggtttgaataacaaccatgagaaagcacagggtatgcaaccatggggtgactggcagagggttggctcctggatgagctgatgccaaaggtgg

SEQ ID NO: 28061 - DNA, 1057 bp, Bovine  19866881086597
  misc_feature (1)..(1): n is a, c, g, or t
ncttgctccaacctgggaagagagaggagccattctcactcagaactagggatgcgctcttggaaactcaccggttggccctcttctcgttcttcctacgaaggtcattcacgttgacgatcaaccggtactggttgtcactaatcagctcccgaactttgctctgataaattccctggtcttcctgcaaaataaccaccacatgctacagcagctcacaaattaaaaaactggatgtttttaaacagaggcagctctcacagcaagataaatatatcaatctctgtggcagacctgggcccccatttcacccacattttcactcattagcttcggattccaaatacaccctaaactgccagtgtataaattataacgacttcctcacggttattattcctattatcaccaacagctcttctgtgtgcatcacttctgaacttttaatggggaattaaaacgagctcataagaagtctaaaaagacaagtaaaaaccttgtcaaaatgtaaattaaaggtacttttaatatatcaaagtatctttccgtttgcagaatcttgtatttaattaaaatattttatttccctatcatctgtgtaacagaaaaggagttctcatataaggaacttactagccttagttatatttacaaacacagcactatcaatccaagatgctttagcaatattccatggctgtcaatcctaaattgcctataaaatcccctttatttgcgtaccaaccctctttctccgcttcccatcaggtatggaaaaagaatgcggccaaattagaaagtccttttctccagcctgggggcctataacgcggcgggtcactaccgttttcccgcggtcctttccccactctccccccaaattaagagagtagggaactatctctaaaaggtcaacgtgggctttacacttggtttgcacttggagaaaacctgttgactttcgcgagacctagccaccatttgcactcgagagaaaaattacagaattgctcttaaccactgactctgtcgccaagaaagctaccagatcgaggcg

SEQ ID NO: 28062 - DNA, 1467 bp, Bovine  19866881117739
  misc_feature (1)..(1): n is a, c, g, or t
ntgtccttcaagactaaatgagccaattaaagattctgttatcacgaagtagaattcagtgcatgcagcaatactgagtaaaagcaattatattcctgcctctccaaaaaaagtatatataggtgtttgtgaaaaaactatgcatgtgggcacccttcagggttgagtgtgtcagggggtgggaggcgagacagttgttacagaattgaattcatatgtccatcacaaaacagttaataatattattaaccatattataattattataattattaaccatattatgatgacgtatttcctgttatctagaggaatctcatgttatttgtttgtaccttttacacttgaattgtcattcttttacagacaaagtgggaggctattaaggcctttaatttcacctctcctcgacattttttttttttttaagacttaacaatcccaatcagaccattagaaaagttcaagggaaaaaaacaaaatctatggctacatgtaggaaattctctagaacagctcaaggcctatgttattttttttttaaaaggggagatgtaaaggagagagagagagtgaggaggaaagaaaacagagggagagagaggaagagagcaagaaagggagggaggaggagacagggaggaaggaaggaatataaaggaagggaagcaaagggaccgcatctcacttatccatccaagcaccttgcagctgctattactgttatttatttatttcctcccctttggagtcagatccttttttctcatttagtccaacagagattgtcctcctggagtgaccttttattctttccttttccttcacccctccgggctattgccctcatgccagtaactagataacacactctatcaaagattttttttttaaaaaaaaactcattgggaaggcagtaggactgttagtggcatcaatcgtgggctgacacaggccggggtcaaccatttatcttggcgcgtctgtagcccgtggttactgggctgccatcttgacttgcagacgtcacctcccagcctgagaacatctgctcccgagtccttttcttcccttgtttggcctgtttctttgttctattccagtagacatcttttcagacaaaatcaaggtgggaatgagtgaagcccctcctttttatcagagcctttccaaattccagggccagggaaacagttataggctaggaaaagaatcttgcttgggggaggggggcaaaattttcagaataaaactgaaacacttttttgttccttaggaaatccagctatgcccataaagttaaactaaactcacagaatgttgctctaatcccactagacatgagattttaatgaaacatttcttttgattaactcatgctactccatccttttcccatcctgtcttctcttcaccccccacataccatttgcaatcattttttagtcacttattcagcatgcagca

SEQ ID NO: 28063 - DNA, 5564 bp, Bovine  19866881135810
  misc_feature (1)..(1): n is a, c, g, or t
nagtgggttgcctttccttctccatgcatgaaagtgaagagtgaaagtgaagtagcttggtcgtgtccaactctagcgaccccatggactgcagcctaccaggctcctccatccacgggattccaagcaaaagtactggagtggggtgctattgccttctccaatgaaaacttaggttcatacaaaagccttaaacagatgggtgagacaattttatttgtagtcaatcaccaaatctggaaacagttcaaatgtccttccacaaatgaataaactgtggtacatccatatagtggaatactgtcccccacaataacaaggaataaaatactgtttcttgcagcaagttagataaataccaaaggtatctgccagtgaaagaagccagtctcaaaaggttacatactatgttatcccattcgtatgactgttgaaaagaaaaagctgccgtgacagggaatagattagtgacctccacggggatgtgaaaagaaggtgtagctacagagatggagccaaagggagggctttttcaggctgatgcaactgttccatatcttagtggtagttacataaatctactcatatgttaaaaaaatggacatcaaaaagtccattttactgtatgttgttataaaaaaataaatattaaaaagtctaaaaaacaacaaaaactgcttccaggatttcctgtaaaacctctttcaacaaataccatctaatcaagctgttactgcctcactcttccactgcccgaaatagatgtatgtttgaggatcaccagaaactgtcaagagtctccacctggaagacagcgagaaaaagaaacaaacaggagaaacaaaacccagtggagacaatgccagtatagaaatcagaagggaaacttaataacatcagcgaaataagactatcatgttcatgaaagaagaagcctaaaaaggaatttttcagaaaaaaaataataggagagtagaattaatacattaaatagaaaaaaacatctaagaaagtaggataaaaaggcaatgggaaatcagagagaaattaagaagattagaaaagtaattcaggaaagctaatatcaaaataataagagtttaaataaaacagaaaatatagaggacataattatcaaagaaataagtaaagaaaatttcccaaaaggaaaggatatgactttgcagactgaaaagtcctgcccactgcctagcagagtggttagaagaaaaagccatagcaaagttacatcatactgaaattacaaataccagggacaaggatgagatcccaaaaatctccaaagaggaaaaactaataggttacatataaaagacttagaattagagtatctataaactgggttttttgtgtgtttttttgcaaagtcactcagctatatacatttgtgttgtttagccactaagtcatgtctgaccgttttgcgatcccatggactgtagcccaccaggctcctctctctatgggatttacccagcaaaaatgttggagtaggtttccatttctttctccaggggatcttcctgacccaggggtcaaaccaaatctcctgcattgcaggcagattctttaccattgagccactgggggaagtcctccagttacatatacatcccttttaaaattactttccattatggtttatcacaggatattgaatacagttccctgtttatccatcctatatatggtttccatgaagcatctaaaaaccctttaacttcaggactagaagatagaagacgatgaagcatcaactccaaagcatcaaggcaaagtgaactccaacctagtggtctatagtaacaaccttccaagaacggggtctccatttttaggtcaaaatctttaccttccacagaccatcagtttaaaaagttgccataggctaaaacaatgagagttaaatcagaaaagaggcagatgggggaaataggaacaagaatactacagagacatgaagaaattctacagaatgttggtcaagagaaattccaagacctagctctgaaacactttttgcaaaccggtggtacaagttaaacacttgggattgtgtggggtttggcatcatccactaaagctaaagggccagcctctgagccagcagttttaaaatctggcacatactcaacagatatgcatatagaagattgttcataacatctttctctgtaataaccctaaactggaaacaggcaaatgtccagcaatagcaacatggctttaaaaactatgatacagtccataaaagaactgatgctttcgaattgtggtgctggagaagactcttgagagtcccttggacttcaaggagatcaaaccagtcaatcctaaatgaaatcaatcctgaatattcactgaaaggactgacgttgaagctgaagctccaatactttggccacctgatgtgatgagacgacttattggaaaagaccctgattctgggaaagattgaagacaggaggagaaagggatgacagataacaagatggttgggtggcatcactgacacaatggatatgagtttgagcaaactctgggagatggtaaaggacagggaagcctggtgtgctgcagaccatggggttgcaaacagttggacatgacttattgactgaacaacaataatgacataacaattggaagaataaattattgaaacagataaaaacatgaatgaatctcacagacataataatatgccaaagaagccaggcacattagagttgcacgatgtatgattccatttacataaagttcaaaaacagattggaaattaacctatacttgagaagtctgaataatggttctcctttggctggggggtaggggttggggttaactgggagcagacattaggggttttagaggaactgatgatgttctatttctagatctgggtggtgtgcatgtgattttgctttacaaaaattcatagagcgcttcacttgtgatctgtgcacttttccccataaatgtcatatttccatgaaacatctgttttaaaaagtataacaaatactagagaaaagtaatgaatgagacgagagggtgaagaagttaaagaagtttaaggtccttgcatggctcaggtgaagtttaacagtgccaatgtaattaaaactttgtgaagatgagcaggcgtgtcacaaatttaagtccaagaacctatatgattttaacagaatgaataactttcaaatgagtgtatattaaaaaagatattattcaatgcaagacaaatcaagtttgaaaagtagggaaaaaagcatagataatgaattccaaactgaaagcacaagataaaatggtagaaataaatgcaaatatatgggagacatcagcatgtggatggtaattgaaaccactagagaaaatgagatttctcccagggagagcaagtatatgtagaaaagaaggagacctaggatggaatttagagaaacaaaaagatgaaagttctaaattgaggaagacagatccaccagtgaaaatgaaaagtaaccctgagagaaatagaatgaagcaacctcagcagcattttcccgaataagatttttttttaagtagtatcatttgcttgaatgaattacagtaacagcaaaaaggcaaccatcgtacagatacttccaaaagtggggtgatcataatttacatccaaatcaggacatcttggagactgtggaagggggtgctaattaaaagcaaggctaggacagcagaataaaccaagcttggatgtatagtgatggtttgcacacctcttatcttgcataataaagccattctcactgaaaattattctactcatctcaataccaaggtaatgttgggtatgaaagtaccaacataaacaaatatatctaatgggaaaaaatcctttctaataaacaattcttccagaaactagtgtttgttttaaaacatgactcactgatcattgtgtgtcaccaaaataggcaggtggaaggtctgagaatgattaagccaaagtgtctgaaatttttaattcctaaagaaatggcagatttgaaagaaagaggctaaactcagatttctacaaccaaagagaggttggcatcctttttttaaaaaaaaacaactaatacaattttatacaacaataaagcagttcccaaataaatctgagcaatagtgtgctaaataaagatttacagatttttcgtttgtttgtttttaaccctagaactttgcaaagactttaatgggttaatacgcaatgtgaatttcagaggatgggagggatggtaaacagcatgtgtatgtgtgtgtacgctcagtcactcagtcttttctgactctctgggaccttgcagactgtagcctgccaggctcctctgtcaacggaattttccaggcaagaatactggagagggctgccatttcctactccaggggatcttcccaatcctgggatcgaacctgcatctcctgtgtctcctacattggcaggcagactttttaccacggtgcctagcacatcctatatgtaattaacctaagaatcttccttttctcagaccctttcttggaactagccttccatggaaaacacttcagagaatattggagtaagcacgaataaatactttgtgccaaggccattttcccatatgtaattaaatgagtattggaccaggcgtgatatccaggtgtccaagctccacaatactgggcatgatcttgggttctcatatggcttctcaaagcctccatttctgtacctgtaaattcaggagttctaactagatcttctcttaggtattatctatctctaatattacatgactttatttatgttttattaggatatagttgctttacaatattgtgttagtttctgctgtacaatgaattgaatcacttatatgtatacatatattcctccctcttggatctcctttccaccccctccccatcccagccttctaggtcaccacggaacactgagctgagctccctgcatatactagtgatctactttacacgtgatagtgtatatatggcaaccccaatctcccaacccatcccgctccccctttacctctgtgcccacacgttctctacatctgcatcttttttcctgccctgcaaataggttcatctgttccactcttctagagtccacatttatgcatcaatttataacatttttctctttctgacttatttcatcctctatgacaacctctaggtccatccatgtctctacaaatggcccagtttcatttttaatagctgactaatattccattgtgtatatgtgataatgtcattcatatacacaataaattgcatggctttaagattcagatgcctaactaagacctagatcatgcctataaaaaattgtttaacattttccatccaaggactttggtcctgcacttacttgttaagagactgagaagttctcagctgtattgcatcgctggtgaattataccccaggggtgagattatatttgttatgataagcacccttttgtcataatctgaatctaatttatgtcactcttc

SEQ ID NO: 28064 - DNA, 895 bp, Bovine  19866881206477
  misc_feature (1)..(1): n is a, c, g, or t
nagggtcccacatgtgtttgtacatcctttatcacagtgaagttattgacattgaggtacctcaatgtagaattattggcattgttctgtaagaacttgggaaggtaactaactgaaatgtgcagagaagtgtttttaatcaatatcactgtcttatagcaagtagtgagcacagtcatatcagacaaaaccatgtcaactgtcaactcaaaatgtgacaagttagacaccttggtaatgcctgaaagtctaattaaatattggattttccctggaaaaattcagctggctctgtgaacagagaaaagttagcttcttttcctaagagtggggaatatgaaacacatgtctaattatgtaatgtttctaaatttttgagaatcagtctattgccttacaaataagtttatcttccttaaaatagacccaataaattcctaaatactctcacttatacttacttttccaggaccatctacctcatctttcccacctccacttctctctagctacactaacctgtaatttgtccaagtctccatgatctctagctcccagaattttataagttccctctacctctacctccttcatttatttaattattactaaccaacctttaaaatcttccatgtcttgttctctgaagagctttccctgactcttaaatttagattaaatcaatcaccgcatttgatattgttacattatggacagtgttgaaatttacatgaactgtataatcacagaatacaaagatggctgagaaatctcccagctctttacatccagagaaatgtctaacagccaagaatattccctgccatatgcccagaaaagtctcaccacctcctgttcggtgtgttattgcctctgttaacctcagatcctcttc

SEQ ID NO: 28065 - DNA, 851 bp, Bovine  19866881232592
  misc_feature (1)..(1): n is a, c, g, or t
ntttatgtgttaattttcacctgctctgtaattagaaattttgaactctgggaatttttttttaagataaaattattgcccgagtaaacttcagaaattatatcattaacccagagacctttctaagcctagaacaacattgctggtacaagtgcaccgctctccaacatagacaaataaataaggagggaagtttaaaataatttgaaaatgatttattgttggccacctctgtagttagagagtcaaatattcttactttagtttaacaagggaggacaggaagctgctgtgagctaaaggtaaattatgatcaattgcgaaggaggaggaactgtaccaaggagaggagttgggaggaagccttgtgttttctgaggtactgctccagataaagcctggaaaaaaaaaatctctgccttgacctttgttggaaaaggccagagtaaactacaagtctgactaccttcttgaatctttgctggttaaggagcagcttatggtttgggaagggtccgatagttgcactggaacctaaaacaaacccagttatttaaggtcacacattccactttttttctgctctgcttagccatcctatccctagatacaccccatgttagagtaagaagggattacttaacacaccaagacttaggtggatcattctcatggtaatttttatttttaactctaccatcaccatttgtacagtgagttgaagtcttaagtttagaaattcgtggtgaacttatatcttggagcacctaatagtcattggttttaatttggaagaacgaggctataaatttattctcaaaacagtgtatgcagggaaggaagagagaaga

SEQ ID NO: 28066 - DNA, 1474 bp, Bovine  19866881253283
  misc_feature (1)..(1): n is a, c, g, or t
ngtctgactctttgtgaccccatggactgtagcccaccaggctcctctggctatggaattttcacagcaagaatactggagtgagttgccatttctttctccagggcatcttcctgacccacggattgaaagctcatctctggtgtctcctgcattggcaggcatattttatttaccactgagccacctaggaagtccaaggaagaggatagctcataacattttacacgctatttgatcacagagcttgttttctcgtgaactgtctttctaagttattgagttacacagaatgtcttttttagggctccctcaaatgaaggaagttgctctaatgccactctgtgaagttgattgatgggaagatactctgggctagactgggttctgaggtgcctgaaagtttacattttggatggctgtcttttccaaattagtatttatttgctcacaatggtctgcttctgtgttcaccttcaagggctcaatactgccccctagtgggtccagtcggatcctaaattttctgtgccattgtcctaaacttgggaagtgaccttggcagtttctaaaaaaaaaagaaaaagaaaaagaaaaaaaaccaccttttcaagttacaaaaaaagatactactgttatgatacctgatatcacttaaaaaaactttacgacacaataataatatgtgtttgttttagaatgagaaaatttaaggtaagtaaaatgaagaaaataaaaataatctacaatcttacctcagggttaacacttatcattctaacatgtatgtccatgcagtctttttttaaatctacatttatctaaaaattcatacttcccctgatcctaaactaaaaatatgttttttccggactttttcttgtatgcccattttacttgaacgtcagttaagaacctgctccttgagcacttttggtccttttgaaggaggcaggagaggagagggggtgaaaattttaaacatttaaaggggtgattcaggggctaagtgacccactatgtcttaggggtgattgcaccagtgtcttccaagaggggcatatacactttaatggcaccaaatggcaacccttcctggctgctgctataatacaattatataacaatacagtgttatataaacatataaacaacatctaaggctgtggcttaacgaaaacgtagtggcttaaacaacatggatttgtgatcttacagtctggggtcagaagtcaaagtcagttttgtagggccaaatcaaagtttttgtagggctaaatcagtttcgtaggggctgttccttttgggggttcgtctgtttccttgcctttctgtcagcttctcaagacccttgcattcctcagctcatggtcctttttctcccaacacatcaaactctgactcctgttatcacatcccctactactaactctgatcctcctgctcctctcctatgaggacctttgtgttgata

SEQ ID NO: 28067 - DNA, 1305 bp, Bovine  19866881297429
  misc_feature (1)..(1): n is a, c, g, or t
ngtgttggagaagactcttgagagtcccttggactaccaggagatccaaccgtccatactaaaggaaatcggtcctgaaaattcactggaaggactgaagctgaagcttcaatactttggccacctgatgcaaagaactgactcattggaaaagaccatgatgctgggaaagactgaaggcaggaggagaaggagatgacagaggatgagatggttggatggcattgccgacttgatggacatgagtttaagctctgggaattggtgatggacaggaagcctgatgtgctgcagtccatggggttgcaaagagttgaacgtgattgagccactgaactgaactgatatacattttctgagactgacagtagatgactgttagaatgatccataattttgtattagtggctcttcttcattggtttattaacctggataataaagagttaattcaggagatgatttcttctctatcctgaggttagttcaccctaccaaatgccatgtgtcctcactagggctctgctgtgactgaggcgttggtgtgggagtggctcagtcatttctctggagttcttttccatttctttgatggcatcattgctatgtccccaaaccataaagcagcaaaatattgggaaaaccccactggacagcaaagagatatgattacatttagcgctcacatgtcttctcttcaattatccacccaccagagggtcattttattgcacactccctcagggggatcttttggattgtaataagcatctatttaggttgggtttctgggttctagtcagcctttttgtgctaataattaaggtgattgatttgggagcttctggaaataatagagtgaaggcaacatcatgttctagttatcagatgttttaattaataatccaaaggggagaattgaagtaaaagggaagtaaggttattaaataaacagtcagggtctgtcctttgtgccacagtgcctttcgtactgggagatttgattagaatcatgctgtaccttcttctgtgccccttgacttcattctgtgtctcaggtgatttgcagaactgtttgtattccaagagtgagaagatgctgggatccagggatttgggggccagagtcatcgttcagtcctttccggaggagcccagccgggtccagttgaagggagtgcagttccgggacttgggacaagccttccatgagcatgtgagctcccttgatgctggtaggagctatgagaggtgaggaggcccaggcatgatgtctcatctttcttcttctatattcaaggctct

SEQ ID NO: 28068 - DNA, 1092 bp, Bovine  19866881393064
  misc_feature (1)..(1): n is a, c, g, or t
ngaccagccagagcaggggctttgataacagaatgggccttgcctctctctctctctctctctctctatatatatatatagcagatctctctgaaaagatcatgcaagctgctatggagtgaatggatcatggtgggagcgaggttgggagcaggtggtggagttagaaagctgggggttagggctccacagatgcaggactccatggttggtccaccatcccgtgctgcccacagactgtgtgggtccacagtgaggtgatgacagaaatgtcacacatagacagagctacttgacagtaattgtatgtctgttggatctaatgagcaaaaattagagctttcattgtgtatgctaatttgtctgataatttgcattatattttaatgtattggttcccaacagactggaaattttgaaacaaacaaaacccaccccgttcttcttgctcttgtcctccttgtcctcctacctcctatttaggaggtaaagttgatgtgcttagcatagtggctcctgaagttgacttaaaatcagaatcatccaggacagtaaacattcatttgaatgtgggaggattttgaattgatagggatgtgaagccccatcgggcctttatgtttaacacacacatgtacataaatacacaaaaacacacatttatacacatctacatacacatctacacacacatgcatgcacacacagagacaccctccccaggtaattctgctgtgctaaggtttgagaatcactactgtagaattgtataccccctttgaagtaaatagacaggatgttaagaacacaatatttttaatttaaaaagcaggcagtttcagtttctcatgaagaatcaagaattagctttctgtgccaaataccagcagacataaacatacttgcttatttacacactggatatacttctgaaagggaaaagaacattatctaagaagacagagaagtatttacagtctaaattaagtctttgtgtaataagaatatattcaatctttttaaaaaaaattatattatttttcctattttgaagtgagttaaatgacctcattgttgtatcacttccacaat

SEQ ID NO: 28069 - DNA, 1409 bp, Bovine  19866881467118
  misc_feature (1)..(1): n is a, c, g, or t
ncaatttgaggtcggtttctgttgtgtgccttgtcgatccatttcatttggctgcaagatactctgacatattttgttttgaatcactgctactttttcacaaagtgatctatttgggagggaggcggccagagggagaagtgagaaaatagagttaacctaattacaatataatgttttttctttttaataattcatataggatgccttgaaatgttgcaaatgtaacgtctctaaatgtaaggaaaatggaaacttgtcctttatcaggataaagtaaatgaaaaggctaattgatttcaaatgaaattatttgaaataattctcattttttgacatttgaaagaacagtattcctatgcacatataaaatgctgcaaatctgatattgtctaagattattttggttagatcatctcaagtttataagtctgtgtcttaggggccttcagaggaaacacagagactaacattttcctaaggctttgaccgatgtgagttgctctctctgcaactcgactcctccatttgacacatccatactccactatcagcaccagctcagaagttacttcctccatgaagtcttccctgataagttgagattttctgctattggcatcccagacttcctgtggcatatctatcactccaatgccttctccttctctggccagaaaagaagaagaaaatttaactatggcttccccagatgtggagatcaaatcttattcttcactgtaatatacagattcagcacctacttcctggcatgtgtagacacaaatatcagttggtaaaaagcaaatggactgtccttaagtggaagccatttcaaaagaagcagggttttcttccaaacatcatggttattgtgggaaaatattgaaatttcttagctttcaaaccaatcattggttcgggtttcttatctatagtggttaattttggtcctccaagattaagagatttgaaagccccatgagaggtatgtgtgcatgcatgcttcagtcgttccctactctttgcaacccctatggactgtagccggccaggctcctttgtccatgggattctcagcaagaatactggaatgggttgccgtgctctcctccaggggatttttccaacccagtgataggactgaagtctcctgtggctcctgcattacaggtggattctttacccactgaaccacctgggaagcccatgagaggcatgaggataacaatctttcctccctaaagttgaggtaacagaacagtctcaaacaagtaacagtaattcaggggctttgattatggatgcatgtgatcatgcataattatttaaaatatggaatgttgtaactagggtcttgcaggttaactgaaatgtttgttaaaaatggtagattctggtttatcagg

SEQ ID NO: 28070 - DNA, 749 bp, Bovine  19866881467378
  misc_feature (1)..(1): n is a, c, g, or t
naatccgatcctttgatcttggacctccacaggaagcttagatctcagacaaattagataaaaaatgaatttatagcagatatgtgtcctaaggcattcagctgaatgtttgggtcttagggaaggaagaatagtgagtatcaaaacatatgcaacagcaagcctcctttcctcctccaccttgttggtgaatccccattaaaatggaaagataggatttcacattgcccctctatgtctcttagagtcctgttggtgggtttgatcaaatttcagggagactatgggcacatatatctttactctatgaaaaagagaaaggcttggtggtttggggtccatgcaggttcatccacagttggctgtaatttttcttaggtatccttaacctcttttggcttctagaactttcttggacaaccaatatcctgagtctatgattttaaagatttgtgtggatagtagtttttagctgcttcttcttcttttttttcttgcttgctttttgagcattcaccagtttgctaaattttttaagattccacatataagtgatatccaacagtatttgtcttcctctgtctgacttacttcactcactcactggttcctttgcaataggaaaattaacaatgaatattcccctccctccacaccactccctctctatttttatagcctagtctccatgtgctgcatttactgtaggatgacttggattcagtatgaaagacccaatataagctcct

SEQ ID NO: 28071 - DNA, 1224 bp, Bovine  19866881591003
  misc_feature (1)..(1): n is a, c, g, or t
nacagtaaaactatttatataacaaatgggaatcctgaaatatgagttggttattatgtaaagcatgtcaggaaaaaggacacagaagaaaagaaattttcctagacctagaagccaatctctctactacagaattacggactccctgtaggacccaattccaatttgcttaactccctcacaggaaaaatattaatgaaattgaatataagttcctgaaagtaattgccatggagaaagggagatgaagctgacttttttttttcctgtggctgtggataatgtcttcccttttgggtgatgttggtgagatgcaactttccttaggtacagcccatgaggacccatccctgcatctaggccatattctgtcttcttgtttgagcactttagaggcaaaggagcagatcctggagttataaaactcacaatgcctataagctactcagctgctcacctggcttgggatggacactaagtaagtactagtgaccactgtttttttgtcccatttattctgcctctgactgggctgatgacttgaacatttgagcatccagcttaactggttcttttaccagttttctgctgccatgggagattgtataaatgtactggagtgagtgaaagtcgctcagtcatgtccgactctttgcaacctcatggactgtagccctccaggctccttggtccatggatttctccatgaaagatactgaagtaggttgcctttccctcttccaggggatcttcctgaccccaggaatcaaacccggggtctgctgcattgcaggcaggttctttaccgtctgagccaccaagggaagccccactaaatgtagtggcttaaaagaacacccataattgtctcatagttttacaagtcagaagtctagatacttggctggtttctctgcttagagcctctcaaggctgaaatttagctattgacagtactgcatttctttcttgagtctttctggatgaatccacttccaatctgactcaggttcttggcccgattcagttccctgtgactataggacaaagatttctattcccttgctggttgtaggctgggaagggggtaggtggggctcctgcttaaagtttagggctatcctctctccctgactgtgacccacttcacctgcaaagccagcatcggtggcttgtgtccgtctcgtgctttgaatttctcttgccttctcttctgcagcatct

SEQ ID NO: 28072 - DNA, 917 bp, Bovine  19866881619435
  misc_feature (1)..(1): n is a, c, g, or t
nactacgcaatttcctctatgtggtgaaatccaaactagctatctctttctgccaagtaataatgtctgtaataaaccaagaacaccctccttttaaataagtggatgattttttagctgactctgaaaatgtaaatggaccccaattaacgaatgccttaatcattcttcctgtttcttctttatagacacattatttcctgcctaagggtgaatgtattcggggtacatacattcagatatgaatacacatatacatatacattttcagggtacaaactttaatagagaagaactaaggatattcattaactagaactacaaagatctctccaaggacttctatttgtaccagaataaagtctatattccttagtctgacattcaagtcttgctgaatccaacctcaactatgtttcatgagatattccattttccatgagcaactagtcctctctgttctgaatttccaaaaaactcattctctgctctaatcatttagtattttatggctctatttaaaagttttttgctacattatttctcagagcatggaaaatagctattgaatatagctgataaagaattttattaaaacttaaaaatagatatagtttttttcaggatataatttttctggttcatgatagaaaattttaaatatatggcataatattttaaaagttaaaatgatctatgattccgtcacagagagataactcttaataacaccatgagctatattggctaactttcatccaagatctttccatgttaaaaaaacaaatagatcagactcagtatatttatatgatatgctatatagagtttttgaaattgaggggccgggttttatgtatatatatatatatatatatatacacacacatatatatatttcatattcaggattatca

SEQ ID NO: 28073 - DNA, 1022 bp, Bovine  19866881785260
  misc_feature (1)..(1): n is a, c, g, or t
nataaacagcaagggacctattttattgtatagcacaaggaactgtgttcaatattttgtaataatctataatggaaaagtttatgaaagggaatatgtatatatacacatatatatatatacctatatacacatatgtatgtataactgaattactttgctgtatacctgaaatatcgtaaatcaactatacttcaattaaaagaataacttcatagctcaagatataacgactacctctcctcatgctggatgcagttttcagaggtcagaattggtctgtaagccttagctgtttgtttcttgagctgctgtccattacactgtgatgagaagtggaagtgaaatctctcagtcgtgtccgactctttgcgaccccatggactgtagcccaccaggctcctctgtccatgggattttccaggcaagaatactggagtgggttgccatttccttctccaggagatcttcccgacccagggattgaacccgggtctcccacattgtaggcagacgctttactgtctgagccaccagggaagtccaaagagtagataccaaagatggcggccaccaggacatcttgagagccatgcgttcctcgtggcttggccatgctctctctttctcagatggttttcttttctgacgtgtgggccttggattccactatggtgatctttggtgtctttaagatacattggtctaagctgcctgtttttaaatttctgctgccaactccttatttcttgaattttattattgtgtggaagaatgttcgtagttatattctagcagcatttggggatgatcaacagaatgtgaggagcctttgagattccctactgtttaccatcctctttgtcgttcaggttcctacgtgcagggttgcacagtgccggcggtccttcagcagaggcctcagcatgtcccagacctcaggcctgaaggtggacagtaatgtgttctatgatatttcaggccatgcactgctgctgggtaagtgaaatcggcttgtttaa

SEQ ID NO: 28074 - DNA, 2091 bp, Bovine  19866880275879
  misc_feature (1)..(1): n is a, c, g, or t
naataaacactcttgtaatactgtttttaaagaaaactctgctgcaaattcctagttcaaatacaggaacttaggacaaggcttcaaaaaatggcagtggtaacaaccctaaatttgatattgtacagtaagaaatgaatatcctgcatgttaatatggtactgcttctagatagaagacagttcagaagtagtaatttagaggcgctcagaagccaacctacctgggtgtggctgtgactgggcaaatcacctgtggcaccactggacagccactgacaaccttaaggttatatgctgctgcgaagtcacttcagtcgtgtccaactctgtgcgaccccacagacggcagcccaccaggctcccccgtccccgggattctccaggcaagaacactggagtgggttgccatttccttctccaatgcatgaaagtgaaaagtgaaagtgaagtcgctcagtcgtatccgactctgtgcgaccccgtagacggcagcccacgaggctcccccgtccccgggattctccaggcaagaacactggagtgggttgccatgtccttctccaatgcatgaaagtgaaaagcgaaagtgaagtcgatcagtcgtgtctgactcttagcgaccccatggactgcagcctaccaggctcctccgtccgtgggattttccaggcaagtgtactggagtggggtgccactgccttctccgtaaggttatataaacccagaaaattagtcaactacctgcagtaatacaaaacaagtattcttcttctacacacacaaaatataactcaaaaaacaggtatacccatcttataggccacacttaaactactgaggctagcactaagaagacatctctcttcacctccaaaactaaagctataaaaaaaaaattaaaaaatcatcagcattcaaaaagcctcaatgtagaaatacccttttagagttttagacctcctgttctaaaatgtaaaaataacacgaagaattctttttaaattcctggagtgacaagagtgttttttgttttgtttgtttgttttttacttatgtggcaccagataaattttctcaatgagagaagagaagaaatccttttccatcatgagtttaaaatgctgggcctgattcttgctgctaaggaaagtaaatagctcacttccaaaactgaatgaacaagcttcttgaaattatatcaattctctaatgctaaaaagattctctccaaaatggtaagtaaattaccacttacagcacaatttaaagcatcactttgaaattaggaccctctattttaaaacagagcattttcaacactgttatgagaattgcatgatttattaaagagaaaaaccatataaaagtcaacatatatttacacatatataaacaacaagtctgatcaaaattacttgaaaacacagagacgtaaaattctgggggcattttttagtagcatgagtttatatccagtctctcttcttccttaaaataaacatttataataacccttccaggtattaaagctgtataagcccttaatattctagtggaaaaagaatagaggggaaaaaagtcacccaaataaatgtataattataatcagtagtaaagcctaaaaaagaaagtactacttcctatgacaccaagaaaggcctctctaagcaaacaccaccaccgaggccgcctagcgcatggggctttgacaaagattgatcatgacccttcccgttttccagacaagctagacactacatctttataaggactcaaagtttcagtaaagtttcacatactttaacatgctaaatttagcaagttcaaagttttcaactaagtcactctgctgtaaagcaaaaattagcacaagactgtaaatcaaccatgtgtgagtgtgctcactcagtcatacccgactctgcaaccccagggactgtaacccatcaggctcctctgtctatggaattttccaggcaagaacactggagtgggttgccagttcctactccaggggatcttcccaacttagggattgaacctgcgtctcttgaatctcctgcagggcaggcagattcttgccacttca

SEQ ID NO: 28075 - DNA, 3699 bp, Bovine  19866880391982
  misc_feature (1)..(1): n is a, c, g, or t
naaaactgagcgccaaagaattgatgcttttgaactgtggtgttggagaagactcttgagagtcccttggactgcaaggagatctaaccagtccatcctaaaggaaatcagtcctgaatattcattggaaggactgatactgaagctgaaactccaatactttggccacctgatgcgaagaactgactcattggaaaagatcctgatgctgggaaagatagaaggcaggaggagaatgggatgacagaggatgagatggttggatggcatcacccacttgatggacacaagtttgagcaagctccgggagttgatgatggacaaggaagtctggtgtatgctgcagttcatggggtcacaaagagttggacacgactgagcgactggattgaactgaactgaccagtgtcactcaaaacatcaactcttcattttcaaacttacatactcaccacctccatgccttcatctcttattcaaaattcattctccactaaatgatttatacttgtatttcaggtctcagcttaaaaattttttccttgaggaaagccatcctttgctctcagatgtaatcagattctccggttagactcaggcacagcacactgcagggctccttcacacacttatcattatttaagtatttgtgaaaagatgttggtgccagtgtcttcactagaacaggagctccactggggagcagctgatcctagatgtctcctcaagagttatccccactgccattcaccgcacctggcatgtgactgctgcttggtaactgtcgcctagctcaacatttcctgaggctggatgctacccatttaaacctccaggggacagaggtcaagcagaggaggccaggtggtgaggactctggtaaattacagcagaatcccatacagcattcaatccccctcaaaagcaaaacagtaacaagacaaaacaaaaacaacaatgtgtactaaataaaacttatcttccattgtctcctgctcacaggcaatcttgtaagtctgattcaacttgtattctctcaggtagaattgcctctttactaggcaagagtcaatcaaacaacattcacaaccaatgtggaacttccagggagcactctgatttaatacaactttcattaaccctattctaatatgaatactgaacatcagcaaaggatgctatttaaatgtaatcacacagtgtgacagatgtgcatttttaattttttttaatttaaaaataatataagtataaccaaaacttaaagccatgttagaacatatacatcgcacctcacacttgtactttccacccccaaaagcaactaaagtaagtggtttcttccatgtttttctggtaacttcctgtttccacatgtcatctaccaccccttcctacaatcctcttctactcactgaatgtaggagctagagagaaacgtaagcatcacccactccaatccattcattttacaaataaataaattggggcagatgacctactttgcagatcacacaactggttattagagatagaaataaacgcagtaagaacccaaactcacctaagcaccatccagtgcttttcccatgtcaccatatcatctaaaatgaagttcaaggtgacttttaaaactgcaacactctgaaactattagatacaagaatacttttcattttgtatctattttgatataaaatataaatacacatgtggataaacattctcatacattgcttttctttaattctgggcatgacccagactgggatctgaaatttgatcccttgctaatgagggacaactaaaaggcaaagatttaatgatagaaattgtttatagttggccacaaataatgcagtaatggaatatttattgatcccaggttcagtagtccaaatgagtgatgaaggaggaaatgcctgccactttctgaagcctcacacacagtgccgtccaccctcgtaagggaacgtgctaaaaaacggagccaaaattgacagagctatctggacattccaggctgacttattcacaagctggttcttttctcagattcccaggatagaagagacataatattaggctttgtacattgaaaaaataataataatgtgaccttgcttcttgttactgctgtcaaacttaagaaaaaaaaatacatgttacaatggtctgaaatataagttcatttcatggcccatctgtctcaccaactactaacgctcctcctctgaagaccttcagaatccctgtgccaccgtgctttgtctgcgttttattttccctagtttccttggagctctaggaaagattcaaacctacaaccttgatgcctttttccctcccccacgcctccctggcacaagtggtgaacagaaaccaccttgctgcctctgtttaatcacagaacgataatatttcaacataacagaggggctgtttgtgctttatcttttactgcgtttttatggggagcaatatattttcttcctttcctcccctgatactgtaacaatctttcctaaattaaatatgtaacaaatttctcatacgactttattccccagctctttttaaaccatcattaaatatcttcatgctgtttgacagttattcctcatcagtgtgttaccttagagactgcaggctgtaaagggaggtttaaagcatgcagatggagaagaagagcactgaggatattggcaggggtggtaacttgagaccaccccccaacagtctgcagaaataaacaccagaggaccagaaaggtacacatttgagaaacaaagttcatcctatttatctttgtatgcctcagacctctgtatgttccaggcatagcaagattctgtagagatatttggaagaaggaaaaggggacaagagagaaggataaaggagaaatggtagaagaggtaaatgagggtggggggtgggtaggaggccaaagtttggggaggtgttcaatgggggaaaaagacaggtggaaagagagacatttgaagaagtcttccacttactcactgatttgatccaacacaaaacaaacatagatggcaaagtgcttcctcaagggctataagtcctgaataaaatgatactccacagagcagaccatggcctccccccaggcctgagaccacactctgcaatgggcataggcagctgtgaccccaggggcatcctggcaggcaggaagaagggctcaggggagggttcagagttgaaccacactagcaaaggtggcaatcactggattgggggaaatgtgaccgtagtaacattgaactaacagccatgatatctggaggaaatgacacagaccagaagaaacactaatctgtctagtagctgtaattatctggatttatggatcacatcactgagcttaactgaaagacagggaaacagattaggcttagaggttggctatagtcacagctgccgtgtgtcagctttaatttgcagccattctctttgacacatagtctttgtagtgttgagtgagacctggtaaggcttctaagtgcctaattcatatgacttttgctgatgtctggacttcacctaatgtaccatttaaaaaaaaaatctggatacaagagctatatttaagtttcttttaggtaacaaaattgtataagatagtgctactttggcactttttatttctggagtcaatccatacatctatgg

SEQ ID NO: 28076 - DNA, 1319 bp, Bovine  19866880417435
  misc_feature (1)..(1): n is a, c, g, or t
nggaagtcgctcagtcgtgttctactcctagtgacccccatggactgcagcctaccgggctcctccgtccatggggtttgccaggcaagagtactggagtgggttgccattgccttctccaggactttctctctaccaatctaaattgatctaaacttgcagataattactatctctaagaagcttttccttaatctcaccctataggcactcctcccattaaaataaaaaaaaattctgtctcttgaatacccttaaatgtatcacctagaacagcattcctcaaatggagttatacaactcagtcacctgaaagaggtctttaaaagtataaattcctatgtgcccctaccattgacctactgaatcagaatctcttgggtgaaggtttttacccaacaacctttagccaggttcttagtagatccacattgcagctggaaaaggtgttcagaaatcactgaactagaagaggggttgggacaccggttctggtaaatattttgggctgatgagccatacagtctctcacaattatgaatccaccatcaatctcaacacagctgttacagtacaaaagcagtcatagatgatatttaaacaaatgggttcaactttatttacaaaaaatatggtccaggagctatagttttctgatccctgagctagattaatatttaatttagtaaaaatcaactacagtgtctaaactgttactctacactcagtaggtacttttgggaagaactaataataataaataaaggaatccaaagtaatgtacttagtggaccattttaaatttgaatgagacaataattgcaaagtaatgctcctagatgatcttgactaaaatcatgctgacatatggaaactcttggtggtctggggagagggaagcatggagtatacatctgaattctaattaagcctgatcatttcttggttttccatctataaattatattctacctaattgacttcctgaccaaggtttggttgaagagtaatttgtttaatgttttgaaaaggctacatagatgctgagtgttattgcagaacaaggtttctaaggaagaaccaagaattagcagctctaaatgcccaacccccacccgttgtttttttttttttcctgattcctgacaaaagctttagttaaatgtctcctggaaagtggcacttagcccctaactcaaatgtcactctgctctcccattttactcaggaaaacctcaaatacattgtgtgggtgatactgaaagacgtcaggatcaaagtgtatttaaagttgctaagaggaagcagatgttcgtttt

SEQ ID NO: 28077 - DNA, 943 bp, Bovine  19866880428364
  misc_feature (1)..(1): n is a, c, g, or t
nctgcttgcttgacactctagattgcaccaattttctaatggcacagaaccaattttctagtggtttgagttttgactttctcttgacattgcttagtgggtcagcatgagtaagcttttaagaaattgtgtatttgttccttaagtatatttctctttttaaaatgctgatgtgtttttccatatgtctaattaaagtttacataaaccttcatgtttgtgctgtcccttgcattttataagaaaagttatttttaaattgacttaattaacataggaacaattagaaataggaggccctgcatcagtaaattttcattattcattaaatctaaaaaatattgctcttaagagtgtccattcaaaaggctactatctcaaatttgtaacaggctttatccagtctgattcatactacaaatgcatcagaaaaaattaggagacagaataaattttgttttttgtattttttgctcaatttaggtatttttaatgtttaataagagagccgcaaagctctagtcatcttgttcaagtctcgtaaatataactagggacaagaagttagttttagtcaaaagcccaattcataaattcagtaggctgaaggagaaatttttgctttagttaatttctgtgtaaagtaaatcccttcccccaataagaactctttataaaggtaaataatctgtgatgtgatagtgaggcagctcaaggaaatgaagcatatgttttcagtaaaaatatcttttttaatttgacctcataaaagcgacgtttatttggcaaactctctagacagttaagctgcctcatatagatctctttactatgaatccgatcttcattcggtcctatattataggcattagtgagaatgctatcagttacctgactggttaagaagggacttccttaaatatttcttatataacaactaatc

SEQ ID NO: 28078 - DNA, 1114 bp, Bovine  19866880444066
  misc_feature (1)..(1): n is a, c, g, or t
ncaataaatttcaggttactgatggtaaacacctaagtaggaaactttagtatcaactgctagttacataaagtgtgaaaatacaaaaatattctttggcacatgcagctgctactgctgctaagtcgcttcagtcgtgtccgactctgagcgaccccatagacggcggcccaccaggctcccccgtccctgggattctccaggcaagaacactggagtgggttgccatttcccttccaatgcatgaaagtgaaaagtgaaagtgaagtcgctcagtcgtgtccgaccctcagcaaccccatggactgcagccttccaggctcctccatccatgggattttccaggctagaatactggagaaatggaccttaataaatattcatacactaatcattctccttgaggagactaagttattgacagtggttgcagataatagtctctttactagaaaactaaaatattacttttttctgaaaaatgaaaaattttaaagtaaatttgctcttaaagagtctaatttcaggtagtttatttgaatcatgtcgtttatgataattgcacgtgttttaatcattattgtgtattagggagtgctgtattcttaatcttcacttatagaataagaaatcacagtatttgcatttgaaggagtacgagttgtaactatggcagaatacatactccttactcaacctgcccagctccaattcaattatgtgatatgtaactatccattatacctacttaactgtttattcagcagagtaaagagacatcaacctaagtagcgccaagtggcttttacctaagtgcaagattgctttatagacattgttgaattctaattgcatagtggataacatacgaaatgaatgaaaatcatccagaatgaatgaattcttatctaaagtatattatgtaccacttaagaaaaatgctgaatactttaactgtgatgaaagaaaatttgaaaataaggttccttaatttggaatagctattctatggatacatatgtttaatagcattataaaatatcacttctaagacaccattatatttgcagacagcatattcttaggtcacaaagttatgattcatatatatcaa

SEQ ID NO: 28079 - DNA, 2833 bp, Bovine  19866880444315
  misc_feature (1)..(1): n is a, c, g, or t
nctgcatctattttcaccattggatatgaggcctgccctatacccctgtttcagtataagttaggttttgtctttggccctgaatttccacctgtgaggctattttctacccggagagagttaaatctgcagagttcatctggtgtctcgttcttaactgtaccctagtccttcttaaggcattaatagttcagtggtaactcactccagtattattgcctgaaaagtcccatggatagaggagcctggttggttatagtccatggggttgcaaagaattagacatgacttagcaactaagcaaaagtcattatgattgctcattcatacatgaagcttgtgagactgaaatttggaactattttaagattttttatagaaaaaggatgacctgggtgaatcaggttttatgatagaaatgattttatccattatggtatttgaggcaacaggctttaatccttatttcccaagttgaatttgtctttctatacttactatgggcttccctggtggctcagacagtaaagaatctgcctgcaatataggagatctgggtttgatccttcagttgggaagatcacccagagaaggaaatggcaacccactccacaattcttccctggaaaatcccatggacagagaagcctggcaggcttcagtccatggagttacgaagagtcgtacacgactgagcaactagcactttcactttccaccgtgcctagctgggaaaccttaattatgttactgaagtcctctgggattcaatattaccatctagaaaaatgaggataataataacacctacctattaggtggctgtaacactggtacccagtaaacacaaaaaatacttactgtaggcttctgttggtgtgtttctcatgaagaaagaccaagattcaagtacttggtccttgatttggagttgttcattgactaaaacccgggcagtatagaagaaataagcctagcagtaggagagcacctaaatgctggaactactcactgcagggtggcaggaggaactgggggttgggaaagcttgggacagtacaggagcacactgctggtgactatcattctgttggtgggactcggcatctctgtgtgcaaacaccctctatttcacagatgaagcaactgagaccttgtcatatgtctcacttctctgcttcagtgagattcagggtatggggaagatgatttccatgtttccctccttttcactttaatccctattgaatattgggacagattttatccagtacaccagacgtgtatattacctaccagacgtgcttcagaggtggtgagaattgtcctctaatggacaaacaggatgtggttgtgtggaggcagtgagactggctggagaactccctaagctgcatgccaagttgctctgctgacacctagctgaggccagacaagcctgcccaaggccagggccctggctaaggaagggtgggtcctgggagcttactgctatgacacatagcatccacatcactggttccttgagtcatgttgccacttgttcctccacttccagttctcctgttctcaggcatgcccagccaatgactgggtcaacagttgaggtctgtaaaccttgcagacctttctcagggattaaagggctgcccgttctgtggctactgtggtgcctggcgcattctccaggatggctgtgcataggaaatatacttctacagtggagactatctagtattttatgttgacattggtgtgtggtccctatggaatattggtaagatgaggaaaatagagggcatgacattttaatacatgtcaagatgtctttaagggatgagaaaagcctctaattagctagcacctatttggaatgattccatatgttatgtgttaagacactgttggagagcttggccagagttatactcctgcatttttagagtacttgtaaagaggagtgttttctccatgaggatgtgagttactttgggagacttggttatttcttcttaagagtctaatagcatcgttcagtagaactttttgtgataatagttacattctgtaattagccgctagcctcataaggctcttgggtgccttgaaatatagctagtatgactgcgaatgggatttttagtttctttaattttaattaaacagccagtgtgaatattacctaccatactggacagcacaggagtgcaatactactgcctaatttatgggcagcatacccaatcattatatgttaaattgaattgaacttacattctttagggcacttgctaaaagatacctgtataatatggttttcaaatttatagcataatttattttcagtaagtctagattttctattcatataacactttaactaaaaacttattctaatccaaacctaaaccgtcattattactattgcagtgttttgagacccctgggcttgggggaaaggagaatcccgacagtgatgcatgactgttttgctatttccataaatatactttatagatcctctctgccttccacagggcttcctagatcatttcccagtgaaactgggaaactggatatttcatatctccactgtctctcggctgcgtgtgcggggggaagagagtgagtagcacttgccattgagagatgtctaggtttgaatccccatctgcaactttggaaaaatcatttaaatctttataacttcagtttttcttatcaaatgagaatgaactgaattttttcagccctaggtgtctttcagagctgaagcataagaatcttcgatttaaaatgtgtgtaaatctttctgagctggaaacactctaca

SEQ ID NO: 28080 - DNA, 1495 bp, Bovine  19866880446099
  misc_feature (1)..(1): n is a, c, g, or t
nacaaggacattgttgaaaagaaaccacagatcatattaatggctaccagttattgaagcttgttgcttgttaccaagcacttttatctttgctgtccttaattttctcaaaaaacctggagaggtaaataatattgttatctcagtttgactcatgaggaaactaaagtaacaagaccaaatagcttatggaagttcatgtgccaaatggcaaaacaagaatttacacttgaggctgtctgacagccctgtctgctcttccgcagagtgaaaccaagcaggtcacggcaagaaagtgcaagtccttccatgaatggagaagagagaaatgtaaagtggaaaaaaggagaaactgcttgagggaggaaccacatcgtaatctcagttatgtgacccacagtttctagattagagtctccaaaaattatttactgagtgcagtggttataatcaatcaactgcattcactcgtttgcactctgagctgttaatattagtccatttacacaaggaaggaaggattacataaggaagacctttgtgccacttactccctgcctctcaccaccgcttcccctgcccccacgtggcaatttagctgtagactgttcttaaagacagattttgcgggcaaagaaggcaatatacagtaattcagtttcctttattacaaatttgaaaacctagctttcctttaagctttcaatttcaagttccatatctaagtctctcttttaagtgaatgtttacaatttagttaattaaattcctttgaattattaaactgcatttatacatttaatatattcaatctttttaaaatactttattactcaacaaacaaaagaatcacaagtcatgctcataaatatgataaattaattttaaaataggatgaatcttattcttttgaatattacaaaaatacagatttaataaactcatatcttttcattagaaatcacaaatctaaaacaatgacagagcttatggagatagtttaaattggcatctcgaggataacctgttaagcattctaaaatgtcaaattatcttaaacataaatgtttataagaccaaacacaaatatgcacaaattatttctaagcatagaataaaaaatttactttcgtagacttgaaaagtttaagtaagtaatgagatacttctttgtttaacttgatgctttactgggactaaaacaaacatgctttaaataaaaaaattctactggtccaggtgagttaggatgagtggctaatcgtcctaagaggttctggctggatatgtagacattagggtagcatttctcatagctgataaaacatactgaatcctccttaatgccagtcaatgtgaataacaaattatcgcctgcaaatggctagtggtcttgccgctgttcctgttcacagattctgcctgcatctatttcttgcaagttatttgtatttgtgcccctactgctagattggggctagggtaaagaacccga

SEQ ID NO: 28081 - DNA, 2579 bp, Bovine  19866880465496
  misc_feature (1)..(1): n is a, c, g, or t
nataacccggtgctctacttctaaatgtctaggtaaaataggctttcataggcctgtttgctccttcagggagaacttgactcataaataatacatgacttgtatgttctctaatttggagaatattagaaaaagtaggaattaactctcaatactccatatttaacatgacttgtaatgttttccagaggttcaaagtgctgacattcatgagctgacacacacaatacagtcctccacccttatccaggcatcaagcccattgcttaaagaaatgcaaccctatgtcaaagggagagaaagtgctctgcaactgtgaagacagaattaggatccaaggcagcagtcactaggatcaagattttaaaataacctgaagaaggctaggacttctagcagtggcatcaggtttcccctgaagtagtcagctcacacaccattagacatatttaaaaaacagaaatacctggcacttgtgttaaaactgaaaaaaaattttacatgttaagcctgaagaattctgggcctccctgaggactcctttgcccattgagcagtcactccaaactaggtcttgactaatgactttcttaaaacttggtgcagggacttactgaatatgtctgtccatccatctgttgattcttctgtccaaccactgatcattcattccatccatccatccactcgtaaacactctctaaacctttctgtcccaggagtggttatacttatggcacctggccatttcctttccaccatgttctcccttccctggtattctttgctctctctccctcctgctgctcagatatgatcatcttaatccaggactctcccttgcacacactgtcgggtgtgtacattctgtgtctaaccacttactctgacttgttctctctccatgagacaaaccccttaaaattctggggaacacaatttctcctcttgtcactcacataattttacttttataatacccatgtgaagaaggcaacattagtattaatgtttccactttggagctgaagaaacagagacccagggaaattctgttaccaacctaaagtcacataagtaaagtgataggaccattacctgaatctggttcctctggctccaagcttggtggtctatccatcctcataagtgggacaactaggaactgataatttaaatgggtaattcttctttaaggctagaagattaggtatatatgattccatttttaagtgttatttgtctgtcgataaaactaatacacagatctataaatgttcctaatatcaatctctttttacagagtacgttgcagcagttataaactgagggtaccattatctaagttggttaatatacttttgagattatacagaggccaattttatctcattttaagtcaggttaatttaagaaagaaagtaatttcaaagacagtaagctacagtgttatagaaaaacctttgccagctggctataaaactctgaaaattaatgaaatcatcacctcttaaaatttcctctagaactgtattgtcaggaacttactttttctaaatttagctgttggcaaacagttactcttaaatctaataaaatttggtaagactttctatatatactggggtgtgtctttttacatagtaaaattctaatctaaacaattgttattttgtggcaaaaatgaatcaagatgagtagtgctgggaaactagaaaagaaactccaaggaaagagtctctaaatgtttgtggtaaataatttagcctgggttggaggaaaatcagagttttatttcaaccctaaatgcacgtactgtaagtcttcaagtatccaagtagggtgatgataaatgtcacaaaaatccaagcagaaggaagctgcatagatcatcagtcctcagtaggatcttgctgaaggccaagttttggtgaataaaatagttatgatcgccataagtttgggggcataaaatgtgttacatttgcataaaatttacataaacctacctaaacgattccagctgctgcagaaaatatatgggcatcatctcacaatatcttagaactcatataccttaaaaatgaaagaagggcttaggaaaacttgcttgcaagattttctgaagaactctattataaaatttgatagcttgattaagcaaaatatcaataactgggttaaaggaaatctgtttggctaattttaaaccaagtaaatccatttttaaaaatcttcattgctgaaaatatgcctacaatatgtccctttttcttctccttaattagttcaatatatggtatggaatattattagaggggacaaggtcatttaggcaaacactcaaatagcttctaatcctaagcctgacatttgtggcctcaagatataaggcaaatactagaaattctcccattttatattttctcagttgtagaacacaggacgtgtgtgctaagtcgcttcattcatgtctgactccttgcaatcctatgcactgtagtccaccaggctcttctgtccatgggattctccaggcaagaatacggagtgggttgccacgccctcctgcaggggat

SEQ ID NO: 28082 - DNA, 1888 bp, Bovine  19866880488260
  misc_feature (1)..(1): n is a, c, g, or t
ntaaaagtgaagtgtaattatttgataatcacctgaagcagctttcccctctgcctgcttacctccagcacatcttcaggtttcagctctcatgtcccctcctcaaggagcccttctctgactccctaggccaggttacttccctctgcagcacttaacctttattaatattaaagacttccctgtgtcaaagagacagcaaagagacttcagaatcctctgattcacgttggaatcttggctctgtctcttacttgctttgtgacattgggcgatttatttaactttgctatgtttctgtcttagtccattcgggctgctagaacagatcccagaccgggtgacttacaaacaacaaacatttggtttttgtagttctggagcctggaggtgcaagagcaggatgacggcctgggggtggttctggtggaggtgcttttctgggccctcctcgtgccttgtcttcccaagaggaagcaaaaagatggctctctggggcctcttttatctgcatgcactaatcctattcaggagagctccatcccatgacttgatcacccccaaaaggcctcacttcataaggccatcacactggagtttataatttcaacatgtaaattttggagggagaaaaaatagtctatagcaataggcagtcacttcactgtataatggggaatccctattacatgtcatatgagatcatgctcgccagcctggcttataccagagacaaatagacacataaaggacaatgcaagtttacattaaaaaaatgcttgtttactggcaggtatagatttcctttttaagaatttggtaatatgaatatattatgatctgaattcctactggacattatttttcttttatttctgctcatactaatgagcaatattttaattgttgacatgctcttttcctcatacatctctgtcttgttcgtcaattttatttcccatatctttgaaaatggactttgcccttagctatggtgtctcagatggtaaagaatctgcctgcagtgtaggagatccagatttgattcctggtttgggaagatctcctggagaagggaatggttactcattccggtattcttgcctggagagttccgtgtacagaagagcctggtgggctatagttcaaggggttgcacagagttggacatgactgaatgactaacactttcacttctttagttactttcccaggtctgttcattttttttttttttttacttgttttatatagaattgtgtctgcttttctttttccacttcttgactcgtattacttttcttcatcagagctcttgagcccaatataccatctgtctcttcctcctattttagccatctcagatcttttatagacctatagcctcaacatgacagagttgaataggaccttagagaaccaagggctagtgccatcattttacagatgagaaaattgagccacagaaagagaagtaatttgcccagcatggtggaactagttcttggaagggctggggtcagacctctggactcttaatctagtccattctgcaatgggccatgccacaccactttgcattcacatcactcaagtctttcattttctgtaacacattataaactctcttttacaagagaacattaacatttcctttaagaaactaagatcagcaagatttttctgctctcttttctcttaaggaatatatttaggttgctttttaggtctgaactgggtctatagactaaattgtttggtgtggttagactcatattctgctagaaaataggcaaagcatattgtgcaatgctccgctcagatagttggcaatgatgcccccagtttctagactacatggaaacactgagatccaacattggctttt

SEQ ID NO: 28083 - DNA, 1432 bp, Bovine  19866880509353
  misc_feature (1)..(1): n is a, c, g, or t
ntaaaagccctaagtaaggcttggctgtcataggcaaggagacccttaattgtgcccttgacataatgagtatgatgtgtgaattacattttttaaaaagtgatcctggttttctccagttggtctctgttattttctcgtgaacatagatgagtgtaacctctgctgaagacaccagtgaggacacgcaggcaggcgggacaccttgttcttgcttgtgatcactgaaacagcaagttttcagtctggtttttctccctaggctctcttaaatgtcataccaagtaacactgtagacagaaagctaaagcagtgatggagattctaacacagcatatgggttcctattttcttactatagtccttgctctatagccatggggaaaaagacaattgaacagggaataaacatatagaataaaatcttggttatccagaggcaaagaatacatgaattctgtgggggtgttgtgtgaagaggaatcataggacttacatgatggtgtgtgagtgcaggggagattaaaaggtatttcttaggtggacataggattttaggaactgctaaatcagaaagaagatgatgccttagttacagggttggctctgagggagttgtggaaagatgactgaatgaggcagccttggagggtacggaggcaactgctgggcagtgagagaaatgagagaacttacttttatttattatttttttaaaggagcgttagtctttaatgttggtcttccctggtgctcagtggcaaagaatccacttgccaatgcaggaaacataaaagatgtgggttcgatcactgggttgggaagatcctctggggaaggaaatggcaacccactccaatcttcttgcctggacagttccatggacagagaaacatggcaggttacagtctatggggttgcaaaagagttgtacaagacttagcgactaaacaagtctttaatgttaaggagattggatcttaacgcgtatgaaagatcaaaccaaaaagtactgtttggagcaccagttgtatggaggcactgcagcattctgtattttcccctaatgttcacagttgcttcttctgaaatgaacataggtggaagaagaagagtttagactatgtctgtgcaacttggctatttttgtcaagggagcaaaggtagtccaagatgagccagcctggagaaaccaatgcatttgtggcctctcctccattgctatttttaatcttataaactaaagcttaagtactatgacacagtagccataacactccttacggctcttcacaatatggcaattactgaaatgacttctttcccattatgcggccaaaaagcagtgagatcatgaggtaggcagcaagagcaaacagtatttaattggttactagaagggcgcggtgggaataaagaatccttcttttta

SEQ ID NO: 28084 - DNA, 1531 bp, Bovine  19866880513361
  misc_feature (1)..(1): n is a, c, g, or t
ntcccgcagttatttccctaaggaatacatgtgcatacctaccgagtgcctagatccatgaattctaccacagcacataacaatttctcggttaaattcagtgaaaggaactaagacattgtaatcagctgctttatgaaaatcatggagtatgtaaggaggaatggaaagagtaaacctgcaagagagggacgctgggccaccagcaaagttcacacatcagctcagcgactcctgggtcactgcagccagacagcatgcgcctcaaatctgcgcttgagcagaagaacaaactgctctatgcatcataaatcttctgggtcatctgcaaatagttcaaactggaaatgttaaatccatgaatgccaaggaggcactcatatatcaaaatgaacatttgtgccgacaatatgagtccaactgagagaaacgtgcagctgcatttatgtgtgaattggatggataaaaatctatccattgactctctgaaacaatatctctatagccccctatatttcaaagtcagtgataggtataatgagcagatttttctgaatcaaaatcagaccgtgtgacttgagaaaatattttttctgcgctttgcgctgtaaatgtatttataaggaaggatgccttgggctcctaggaggacaaaaaagctacaaaattacagatgctgacaggaagtgctaaagctggaaggaagaaagttcatctgaagaaggtgggaggtctggatcatacagcatttaggtgcacataagactgcatctgggcaagaagagcccgggagcccgggcacctgacagacaggtcacccagggtgtgtctgtagagaatggacagcaaaagtctgagacgaagtcgaaatgaagaggcagaagtgtcctgctccaagatcaccaaggcagttgcacaaacatctaagtgattggaatccacccaagggagaacaaggaggaagacaaaaaaaaattctgaggggttctaatttgaatgtgactgaattacaaaccggaacttgccaagaagtatctgaattaggctgagtttacacagaaatgactcaactcaaaactttctgctgcgtcagaaattacatttattgtaagaagataagacaattttgcacatctgagtgtgtgactgggaaagaaaaagccatctcttgggctttgtttactctcttctcttcaagtggacaaggtccctccttccactgaggccaagccaaaggcaatggccactccctgagagctccctctagagccactgcagtgggaaatggcccagctgaggccaccagcagaggcaggtgtatctatgctttccgtcattcacttacatgctcaacaattgtcttctttgtgctccacgcctctaagcctggaattctggatcaggcagccaaggagaagtttgggaagccaagaacaaccacaccagacgttcctctaagtggacagtcccctttaaaacacttccttgggcttccgtgggggctcagtggtaaagaatctgcctgccaatt

SEQ ID NO: 28085 - DNA, 728 bp, Bovine  19866880513399
  misc_feature (1)..(1): n is a, c, g, or t
ntatgcgtctcttatgtctcctgaattggcaggcaggttctttaccactagtgccacctgggaagctggtgtcatccaaatatgatgctgtaggaaggtgttaacaaaatgtaatatcctaagaagacatttctggtgggataacagcagttcaaaggggaatgatacttgtgttagtgtcatttattttgttccttgtccccacgaggtgggataagaataatgttttgcacagatctagatttctgcacaaggaggatggggtagggtgagaacctcctcagtgactcttagctcagaaattcttcctttgtggaaacttaggacaaaatgaataaacttcttctggaatgtgatgatacctgggagacagagacatagtgtgaggtcatttggggcccaacagctatgctcaattgaattagaattataaccagtgaggtcattgattttggaccaatgctgctagggtgtggttccctagagagtaccgaaggcctactacccatcttttgggatatggtcaaagatgaaatagagcctggagaaatcagaccaagagcatcatgggaagggaacacagcctgcaaagccaagtgacagtgtgtatctctggaagcagagcccagcactgaggtatgcatgcacgacgtgctggagacagaggaggcatgaatttccctaggaggacagcaaggagggccttgtcagctctgtaaagcagtgca

SEQ ID NO: 28086 - DNA, 1717 bp, Bovine  19866880574122
  misc_feature (1)..(1): n is a, c, g, or t
nctaaaggaaatccaccctgaatattcattggaagcactgatgctgaagctgaagctccaatactttggccacctgatgctgggaaagattgaaagcaggagaaggggacgacagaggatgagatggttggatggcatcaccgaatagatggacatgagtttgagcaagctccaggagttggtgatggacagggaagcctgctgtgctaaagtccatggagtcacaaagagtcagacacgactgagcgactaaactgaactgaactgaaagcccagctgcactatggacactgggtcagaaggacctgtcgtagcaatccagaggagagattaagtttgtgtgaatggggatggaaggaaatggaatcagttgataatgggaagaagaaatgacaacacttgctaatggcttgaatgaagttaggaagttgaaaagaaagaagactcagatctgacttccagcttttgccttggtcatcttggtaggaagagataccattcattcataaacatggggaacacgtcagggggtgcaaccttgaggcagaaatccaggtttacctttgtgttaagaggatgcccagagagggagatttttttaaagaattatgccagtcttccaccatctcaaaagagaaactctccttggggaaaatgttgctgttcttgtaagagtagcctggctgttctgtaaaaattaaaagttaaaaagtatccccttgccctgagaaaaaaatgtccccttcacaaagacctgagaaggaaaagcaattcctctcttgagtatatgataagataaatcaattcactttaaaaatgccttctgagagaaaagcactcaggttcctaccaaaactcaaaggtatagacactactgggcaaagactgcagggcatgctcaaggtctagtatcaagggaggaccccaagattcccagaggagaacttaccagaaacagaggctatggtattataatctaccctgttggccaaaaaccccataggaaaccccagctcctgcacggcattaaactgaaattggaaatcattccttcctggcctaagtgttaataaatagtatttgtgcatgtgagctggaactctggagtctgagacaacccactgaagctctggcaagggtgaagcagcagatttaatacaaggaagagacaaatatcactggtttgtgtgcgaccagtcctccacaataacactatatggttataagagaaaaagcaagaaagaatacctaaggatatcgaggactgactctctttggtcagaggcaattttggaacattctggacaaatcaagattgataggaaatcaaagagaaatgtaccgggacttttcttcttaaaagctagttggcatctgacctagtgcattaaaaacagttaagatgggctcgataaaggacagaaatcgtatggacctaacagaagcagaagatattaagaagaggtggcaagaatacacagaagaactgtacaaaaaagatcttcatgaccaagataatcacaatggtgtgatcactgacctagagccagacatcctggaatgtgaagtcaagtgggccttagaaagcatcactatgaacaaagctagtggaggtgatggaattccagttgagctatttcaaattctgaaagatgatgctgtgaaagtgttgcactcaatatgctagcaaattggaaaactcagcagggccacagga

SEQ ID NO: 28087 - DNA, 3178 bp, Bovine  19866880585009
  misc_feature (1)..(1): n is a, c, g, or t
ntggaatatatacatatatatacacacacacacacacacacacacacatttttaaacatgcttccttcctttcaaatccaaagttccaagtgaaaggatatgtgtcctgggcattaggtgagacacacagggtgttctttatgtctccatatagaacagaggcctccacagtataagactctttgagctgtagaggaatctcagacctccatggttccatatttgtttaccctgtccccttgtgtggactggcccatggcaaaccaccataaaaaaataatgaagtctcataagaattgtgcttgagtttgtacattccttggtgttggctaaagccacaggaactctggctgggttttaaagttacacccattccccattgcaatgcaggtctgtgaaataatgccttagctctgccaaaaaccacaatgattatcaacaacgtaagtaatcaagtaaaagcactttccacagtccactgaccagattgtcaagaaagcaagaagtagtagcaaaaattgattgccgtttgcgaaagtaatttctatctgaattatattattgtatagcaacagtgatgcataatgtgtgcctggcatctttgcagtaaacattttaggtttaatttagaaatctgagtcattagaaaacttctctctcacaatgataaaggagccactgtggactcagaactattataatctgaagagggaaagggaataaacaggcaagctacacacactaaaagtgaaagaattaccattgggccgaaataatgggaagaaattcaaatgacagatagttgcttactattgaacagttaatacaagcatggttattttacattattaaacagcttgagcatttttaactttctaacataatgtgctatggtcattgatttgttgttgcttttgttgttttaagctcttcatttctatgagggaaatgggcttcaaattataggaaacaggccaaatagaaaaactaaactagacctccctgtccctcacagatacccaatacgacttccttaataattgacactaccagtattcaatagctaagttggcaagatgttcacccctatgcagctgaaaaattttatttaaatttaattttttcctattgaactcttaatgttagaacctggaagatatctattgaaaagcatcaggccttactataaattaatgtagtggaaacacaataaacttgggccagaggcctcctcccaagattagtaggtgtgagtcagtgcttcaaaacctgattgcttattagcatgaggtggagggcttttttttaaaaacactgatgtttgagctgccccctccagggaccacttactaaaacatctggtgagaatggggtccagccaccatgtaggttttgagcccctcctccacaagtaattccagtgtacaacctggttagagaatcactgtttcatgttctggcatgcctgcagagagagagtttcgtgcgtatttgtgtagaaatacttgcaaccgattacactgaaagcgcttggcactcagcgttagagacacctggggaattttaagagtgctgatccctggttctcacccgccgggatgcctgatgttctgggcatggacaatcacttcccaatgactccgaagtatagccacttttgagagccactgctctccagctgtgacactgaggagggctgagccggaggtggtcaactaggagtattaacaagataggacttcaggttagcctacagacgtcacgctcaaagaataggagtccttcctcccgttgccagaactgcacgtgctgatgtctagaatgcacagaagtacgtgcataaacaagtgtctattttgagtaataagatagagttgtctccatagaaacaactgactaataatcataatggttaattagataagtgatttccaaaatctatttgtatgataactaatgtaataaacttcagacttcttattcagtgacatgtttttccttagttctcttaacggactgtcagggcttggcactcaggtcaacaaaagccaggttaaacttaacacctccagaagaattactgagtgtagagaaaagtagcctacaacaagcacaagtgtgggagtcagaccaaactcttgcatcctggctctgccgctgattaagccgcctcagaaatgggggttgaaccttccgcccaaacttcttgtcaataaaatggtagtgatgctgcccaccagaaagcacggtagtgaggagttcagagacctaattttcctgccacagtgcttcacataaactattcctagaagaagcatagtaactgttattaaaatcattgcctagatcaggaggctgttcagggttaacatgccgccaaagttaaatttctccagacaggatgaccacaaataaaggtcaaatgactccttactgccatctcatcagaatacagagtcttggaataactgaatttaaccgcctattttttcagcacatttccggttttttggaccaatgaccaaaatatttggtggttatccctggtgctgtttccctccctggccacactggtttccttccattttcctcagggtgaagacgactggcctatcctgcatgttccttcattcctctcctgatcctgcctcagtgcagaggccaatgccatatctcacggacaagtttctgaaacttaataaaaacagaagatgccaccatcaatcttatttactcagctaaccaacaagcccaggcaatgtgcacaggctggaaaacagtacgaaatccatggctctgaccccctgattttagacatagatgagtcatagtgacgacctcagcagagagattccagatgactgttcactttcacatcctcagggtacacttcagcaccctggggagggaggttctgttccagagcaggaaacagaagcctggagaagatgaaaagagctggtacaagagctaaggcctaccaattcctggttcaaggctctgtacacgcagcaagttagcagctttccagatttttctcagattgtctgcatagagcactaccgtagtgaaagtgtcatccgtgtatagcatagaggtgaagtgatactcatttttccctgagagaccttctcacaggtaaatgtttcgggctgagcgcatgtctgacgggattcag

SEQ ID NO: 28088 - DNA, 1540 bp, Bovine  19866880592063
  misc_feature (1)..(1): n is a, c, g, or t
ngataattaatgatgttgaacactttttctgtacctgttgatactctgtatgtctttggtgctttcatgttgggtgttatatgtatttataattgtatatcctcttgatgaattggtccttttatcatttataatgatcttctttgtctctcattacagtttttgacttagtgtatatttttgtctgatatatatatagctaaccctcttctcttttgctttccatttgcatgtacacttatgtatattttttgggctgaagtgagtctctaactggcagcatatagtatggtgttgtgtgtgtgtattttaaatctatttagccactctacactgtttgactggagaacttagttattctcttccttgctatctcatcctgtggctgatattggtagcccatgccttccttccttgctccaagctgcctctatacatcttaactttgttggtctcagagcatggtaaaacttatgtgaatcccttatgcagtgtctgggaaggctggggaagttggtcactcaaccccactctccctttcccagtgaggagaaatctctccagtcaggaagttccctcttgatactgagcaatgccttcctgggggataggttgggaaagggaaaatgaagctattctttgttttctgtgcagtttttcttaagtgttgttgttgttagactattttgccgaggttccctgcgtggactcctgagctctcccagagctatttttgttcatgaacagatgtctaattgttgatctttgtgaggatggaggctggtgtctcctactctactgttttggtgatatcccagtcagcttaatcttaatatcgcaaaccagagactctgtgtaagcacaaaatatgcactatctggcttttaagttttttcccctcaacttctacaattttctctaaattgatacatttttatctcttgcagcaatagtaagataacagaagttacagtgaacttggagtcagagaatctgagattaagtcctggttaggttacttaagagctttaggacttgcagccaaatgagcaaatttatctgggccacagatttgtcatctgtaaactggggatgataaagctcactctaaaggttttctggggtaggaagggagttggagggtacagcaaatgagaggacatatgtgggtcaaaagcaaactgataagtattgtactgatgtaaagtattcttgttatcttcaactatgaaaatacatttttccttggagatgtttcagatgaattgctcaaaaacatgtgatcagttttcaaatgatgattccccatgttacaactctctaggaaatagaagccattttgtttcaggagaatttctcaaacatttctgtactaattaaaataactctttgaggtccaacaggcagaactggctcaagagtttaaagggactgccaaggcaagtagtcaagtgtgtctgtggtaccaagagacttgtgacttcctattactggtcctttttttataacaaacacgttcctctgtgcaaccagcacacac

SEQ ID NO: 28089 - DNA, 2228 bp, Bovine  19866880644374
  misc_feature (1)..(1): n is a, c, g, or t
naatgaaaataaaatcaacttatttaaccaataagtgacaagggatctatcagattggtattttggcactatatatatatatccaattacatgactattatttcatttgaattatctcatttttcaggaagttgcatcctgacctcagggacacagtctctggttgtctttccaacattattttctgcctcttcaaagtcatgactagggaatatattaggaattttccatttaaataataattttgcctcaacaatagtataataatgttttattcattttttaaacacatcatttgactcttctgccctcattgttataatttgattgtatgtttggctcaggctggagggaaacactgagtgaggaggcctttgctatttttaggataaccagccagctaaagttgattttcatttggtggatcccaactgcaaaagagttggtgaacttgtcactggatcttttattctgaagaatcgtatagtgttgttactacgtgtttaattaaattaactgactgagcacttgctacatgcagagttgcacagtggaaaactaaaaaaaaagaatcctgtcgcattatcggttatttccttcacagcacttattgcattatctaattatcttgtttgtttgtttctttacacactgtctatcttgtccactggaaatgcagagacttttttttttattactataaaactagcacctggcacattacctggaacacagagatttcaaaatacagttttttatctgactcaagaaaagatgcttatattttctggtaagagaatattacctgattctcccacttttcccatttttcaaacctctgcctcattaaatcacattcatcttagccttaagctgctcttctctcctctaatatctcagtggttactgctggtcttattattcaatgtactattatataccaatctgtaatctctttaaaaaaattatgtatctttaattggaggataattgctttacaatgttgtattggtttctgccatccatcaacgtgaatcagccataggtatacatatgtcacctccctcttgaacctccctccaacctcccaccccatcctacccatctaggttctgtgatctcttttttattctcacttaatttatgcttctttttatttattttcttattgatatatgcaacagaattttgttgcaagtattactcattataatgattactgtaagcttcttgagatcagtgggctgagagtgttgtttctcctatggaatcttagcaactgaccctgtactgtgtcaatgaataggtggataagggatgactttgtccatatctctaaagatgaagaccaatttgacctgagacccattttggagtttttcctcagctgtacatgtgtccttaggtaagcccccgatatcagcgttgcctcagagattttccccgttttgtccctcctcttggctcttagatggacattcgttgtctactgaatggagaacagatttgctgtccagggtcagcgctgtgcttgagatggaaatgggagcaattcagtttctgagggagactgtactcaagccctcctgacaatctaggggcctggtcacttgtacaggccacagggctatgtggctcaggccttggctccatcagggtggcattgtccagtatgtgaaaccgctggggtctttttgggaagagaacactctccgcgtctccaaaccatgttgtgattgtccaacacagccttaaatatccaagccttattaaactgaaggactcagagagaatatgagtgcatgctcattaacttaagtacctggtatacacatagggcactaggtcagggtctatgccaggacaaggtgcgggctcccagtgccctggaattgtattggatatccacagcaaaggcatcacagaagactcctctacaggggagtggacattgctagggttttcctgtaagtcatgggtgtattctccttagacatttagcactaagatttttgtaccaacttgtgaagcagtgccaagttctattgcctgagagctccttaaaagtttgctcagatgctgacggaagcaatcaaagcatgggttctgtttattcttttgctttttttttctttttgcaaatgagaaccagaagtgtaaatgttccataccaatagaacgagattgtatcaaaaaccacacctttgcccacatacacaactcccgtg

SEQ ID NO: 28090 - DNA, 1572 bp, Bovine  19866880683561
  misc_feature (1)..(1): n is a, c, g, or t
naatactggagtgggctgccatttccttctccagaggatcttcccaactcagggattgaacctgggtttcctgcattgcaggcagatgctttactgtctgagccaccaggggaagaagtatattaagatatatatcatattaaattttttttcaataaaaccagaccttgtggtagctgttttcatattttcagttgagtctaaagccttaatggtttgaatgaattattccccatcttcttcttatcctgtgcaactatatgaagctctgtgagttcattactggttagaaatgtgtataaaattctcttaccaactgccagtcagaagtattacaacaaaagaacttgttttagagttaaaagagcttgatttgtgtcttagctttaccacttactagatcaacaacctcaggcaagtaaattcacttctctgagcctcaatttcatctagaaaatggagattaaaaatatccttgaccagggtagtgttgaggattagaagtagtactgtcaaaggaatgttggtaaagtgcatgccaatggtagtttaatttattgtatttattgatctttttcactgtgcagccaaggattttccgaagagacagaaaatatgatttgtcttcaacatatggcaatttttaagttagaccctatgcattttcttatttagtccaaccttctcagctgatgactagggcttaaacctttatgcttctctactgattcaataacgtaacagcatctgcctcttttgaaagacaatgagccaataagagaatcctctgcactccaggcaggaaatgtgttcgggacatctaaggtagcacatgtattgttagtattattcacctggatcattttttgtgctgatacagtaacatcatcaccacccaaagtggaaaaaaataaattatttatagctttgcatactcatgctgggtccagaaagcatttgtgaatagtgaggacttgagctgaactctccaaaggaacaatgaagggggtcagagtacagtggaaaggagacctgtggggatcagcttccaactgcattatggcaaaatgaataattcaagaatattgttttggatcagatatccctttcagcatctttaaaaacctttctttctatagaaggattgcatatctattcaatatcatgtcaaggattctttcttgactatagcgctgcatgatagcaaaatgaagtaggtgaatgtttcagagagatgataatgtgttcattacagcaaaatatttatttcagttatgatctctaaacacttgaaaggtatgttttgaattcagtaatgtctagtattttattcacttgattttccatcttggttataagcattaggataagggtaggaaaatgagatccatgcaccagatcatcaataaatgttttagtctgttatactttttctaatttcaagcattttatttttgtagccaatgataccctttagaacactgtttagagaacttctctaaacttatagtttagaataagatccctttccaaaaggatcaggccagtgaatcctaacggaaatcaaccctg

SEQ ID NO: 28091 - DNA, 1390 bp, Bovine  19866880714704
  misc_feature (1)..(1): n is a, c, g, or t
ngtcatcacagagcaccaggcaacactccctgtgttatgtagcagcttcccaccagctatctgttttacacaggatactgtatatatgctgaagccaccctctccattcatccactgtctccttcccccactgtgtctgcaagtccgtcctctgcctctgtgtctccattccttcccttcaaataggtttatcaataccatttttctagattccatatcacagaggatttttgcatagcttctgggactgcctttagtcaatccttaagataatagtttgaatgccaaactattgacctttgaggactatgaagggaaaacaggacagaatatttggctaacctgaaaaattcagtcactttaccatacacatttacttggcagggaggtaatggcagcaaacgggataatacttttcaagtggaaacacattaatcatttacaagggtgaccccttgtccttatctagatttgaatagcagagagaagctggagctggaccctgagtttccacggtgactcccagagcaccagtgctcaggggtagaactgacaaagaaagtcacaactcaaaagggagtatcatctacatacctaattctactctccttttcatcccgggtcacccagaaggacagaacatcccttgagtgcctgtgctctatttcatgtgctctggggttagatacaagggtgatagtctccttacccaacactttgtctaaaaaattactatagcataatagtaggtgggcttggtgtcagtctggattcaaacctaacgaactgcgtaacctctctaagccttagtttcagcatcaataaaatggaaaaaataaccagcacctcactccctggaatcactgtgatgactgacataagcaaacaacgtggttcatgctaaaaattcaataaatgttaaccactgttgctggaaaagaaaaacaaggtgtggtgggttcatatcatcatatcagcaccaactatatgcagttaatatcttctagtgctttcctggagcttcccaggtggctcagtggtaaaaaaaaaaaaaattcacctgccaatgctggagacctgggttacatccttgagtcgggaagatccccggagaaggaaatggcaacccactccaatattgttgcctaggaaatcccgtgaacagaggagcctggcaggctacagttcatggggttgcaaaagagtcagacgcgacctagggactagagagcaacaacaatggcaggaactttgaaaagcataaaattagaaagcatatctcctgaaattaaatagctataatattttgaatagaaaatgtagaattataatttttaaataagttaaaataggctggttttcagtgcagtgagacagaaaatccaagaaa

SEQ ID NO: 28092 - DNA, 1385 bp, Bovine  19866880716475
  misc_feature (1)..(1): n is a, c, g, or t
ncagcatggaacagaagaaatataataacagattcaacagggactttaaaaatggtccacatcaaaaaaaactttaaaagaaaatcttggtaaggggaagaattctgtgagctttttgagcctgggctgctatcttcctcagtgcttccctttatctttgagagtctcagttgcatgcacagaggggatggtgactgttaattacaggaaaagttaattagaatctagatctcctaaaacttttccctaccttcagcaattcctcaagttcctaaaagtgctgcttagaggaaaacacttgcacggacgcagaacttaggctgtgaaagtaattccaagatgattacacagagaaggctgtgacttgtaagcacaagagcacttggcattttggctcacaatggtttgccattaggaggtgactctagatgtctgggacagaaagtcctcaagagctgtctcaaaattgatgattcatatgcctcaatgaaagagacccaaaactagggagagaaaaaggctgagtaaatctcccttctgcacccaaggaccagtttcagtagccaagatgcagttaatttaacctacagctctttttaacccaaggttctctttaaagaagtctcttctagaagcaaattaacatttggtgcacaaagggaagtgagatgaatgatatgcaagaagagttgtgaggttttttttttaatttttgctttcgtttttttagtctcctttctaaatatgtgtaggaaaatatggtcacatgtacaatcccctgaaggactctttcttttgcacttggataataaatgctaccacttaaaaaaaatatattcatccttaggcatccactttgtcacatcctggagccaaaattcataccagggacaggtagaaggggaaagaattgctacagcataagcacataagcaggagaggggaaatctggttaatgtggatctttcatgaaataaagtgaccgtaacttctggaatcaaaccttgggactaaccttcacttcaaacttacagctggaggtctctgaagtgcagtttcctcatctctaaaatgagggtaataacacttgctgcttctggtcattgtgagggcaaaagcagatcatgtgcaggatgttcagcccagtgctttgcacacagtatgcagtctataaaaaagaactatgctggcagggactttaacactctttcctaaacaacgttaacatccaggtgtgaggggtagaaataataatggttgccacaaaaccagctgccatatggccagacttatttgcctctctctccccacaatgaatttttattctggcacccccaaaaatgaatagctgtacactgagatgagtgcaaatccaacatctatta

SEQ ID NO: 28093 - DNA, 1164 bp, Bovine  19866880732405
  misc_feature (1)..(1): n is a, c, g, or t
naaccctaaaaaaaatatgtccaggaaaaaaacaaaaatgaaaatattcaaaagcccagggtaagaactgtgaagggctggaaaggagctagaaaaaccaaggacagcattatactaatgaggagtggggctgaagagaaaacctttaagaaggcagaggatgctagaagtcaacaggaaatgaactgtggctttggaaggtctgagagttacatgtgccctaaatgtgacccctggcaaagcaggccaggtctccacaggagacactaagagaatgtcttaagaaatgcattaggttccagagtttgtcagtatctgatctgagaattgcctcggagggtcacctcctctatgaagccagcctcacataccaacgacgcacattgttgcctatgtgtgagagacctgcaggtatacacatcctatcctactcttgcctgagtgtgtttttaatggaccgacaaaaatggcaaggctccagtcaggagcataagggtgaagagcacctctttgtcttcagcaaccaaacacccacttcctgtgaagtcagatggataattacgaggaaagcaaaaccgtatttcagggtcattggtccagccttgcaacttctcaacaggaatcaatgtagtgagtcagaaaggcttgtctggatgtgtctgagtagcgaaactatacctggagcattcagcaacatctgaagcatttctagaagccatctacagggaaggggaagccaccacccaaagtcaggcatagactttcacaacagtccgttctccctaggctgccgagtgtaaaagcggctgatgagccagaacacaaaatcaaattggcttaagcaatactgaatcctcttagattgcaggcctctactgcctaactttgggaaaaccaattaaattacggccctaatgtctcttgtcagaacacaaagggtcaaagtcttcccccacttcctgggaagaaaccagtagctgggacagctggaatcacactggagtgtgcaagccacaaacgtctaaatgacccagccaagtgagtccatccagttctcgtcagaaaggtgccctggagcaagacagacaagcagagcagattcccactgacagacctagcagggcagaaagcccaggaagccggtgtgattaaaaccgatgaatg

SEQ ID NO: 28094 - DNA, 1397 bp, Bovine  19866880761061
  misc_feature (1)..(1): n is a, c, g, or t
ntttataaatatgtttacagtggtcaatattctagagacactagaaaaatagtttttctgataaggtatcagttttgcagtgaacacaatgaaatatgtcactttctagttcaagtcgactccattattgaaactctaggcaaagccatcacagcccttgtcatggaggccatataattggtattcattgcacaacctacattccctaaaagatgattgacactcctgcagtttgtgctcttgtgaaactggccttactgtcaaaacctgggcaaacacaatgatctcaaatgattaactgaaattcaactgaatacaaagctaggaggaagttttcttcatatctttttactacataattttttaagttatgattagaataaaacaatagatttacactccccaatattgtagctactagttgcatgttgctattgacatgagtctaatccaaatgtagatatgctataagtatacaatatgtaccagacttcttagacttagttttttccccccttatgaatgcaaaatatcacattaaaattctttacattgattacatgttcaagaaataatgttttatatttatcaatttaaataaaataaatagcaaaattaatctcatttaattttcattttaatgtgattactaaaaatttagattatatatatatatatatataatctaaatggaactacatatatatatatagtatatatatatataaactaaatggaactactatatatatatatatatatatataatctatatatgagccatatatggctcacattgtagttccattaggcagtattgctttcaacaaaagaggagataatgcaccttctcaaactggcctcgttgatgctatttgaagctcatgatagcatataatcatatacacaacatgtgagtccaagatagtaatgttgctccattccactttattttaatgcatctcatgtctctctacacaactgtactttcagaatattcttttatgtataaaggactttgatatataacagcatgccttatagagtcttagaactgatagaaatcctaaaaaaatcatttaagtcagtcacatctttttaggaaaggaaactaagaaatagagagttaaagtgatcaccttactgtcacttaagagtaaagctaaaaatggagccctatctgaattccaaaccacttctatcatagcaatgctacttaaatttgactgcataccaaagtgagaataaaattattccttgctttttccccacagtaaatagtcttaattttacaaaagaactttaactcaaatgcatttttttctggtttgtaccttttggctgccttcatctaattctgcgaccccttctcaccttctggtaaccatgaatttgat

SEQ ID NO: 28095 - DNA, 959 bp, Bovine  19866880792020
  misc_feature (1)..(1): n is a, c, g, or t
ntttaaaggagacgctagcttgtcccccatttttatagacagataaattgggaacttagagacagcatggtcaacccaattcccttgaccattaatggcagatctcatgttcaaactcagtttatttgcagagcctgtgtagtaaccgcttgtttaccctgccttttaaagtctcctggtcccttttatttacatttctattatattcattttgatgttgtgatactactaattcttaataagcctaccgctttcaagtcagctttctttttcttgaatttaaaagtaggacatatgtttattgaagaagatgtggacattatgggcacattaaaagaaataaagattgcttgtaatccaaaaacaaaaatagtcttgtggtccgaccaaatgcaagttacataaatggaggtatgaatcacctgacgcagttccatagcttcccacaaatgggaagatcatgtgtcctataaagaaaatgcctttgttaagtggaaaaaaaacaaaaaaagaaaggtgatgagaaattgtatctcagccccaacaggtcctatggaaaaataatgcatgggcacaagcaaatggaaattctttaatttgttagatggcaggattatggtcaatgacccttttctcttccactgggtatcccattaatgttgtttatgtactgagaaaaaaatagataataattaaaaaaaaaaaaacaaacaaagaaatggagttcttcatcactgtattccttgtaagaactgggtttcctcctgctgaggaagagcagagaagttggagttacctgtaacacgcaagacggtgctcatgtcagagaggagctaattcatgtttctcaaagatccccgtgcaccacgctttgtatgaataagaaaaggaagtgcagtatttggattacgttgcctcgattactccttgtgtaagcagtatggatatttctgactgtc

SEQ ID NO: 28096 - DNA, 880 bp, Bovine  19866880806547
  misc_feature (1)..(1): n is a, c, g, or t
naaaatatggaaatattcacatttgtggttttattagggcatgtttagatttttcaaacactaagctattttttgaaagttctccactcagcaaaatagggatgcatttgaccaaccactttttcttcctccaatttaaacccatttgtattccaacaggaatttaatctgtacatttatgattcatttgtgcttaacttgtcaaaatgtgaagagtggtttgaaataaaagaagccattggattctgatgcttatataatttttatccttagaatcagaaagccgtgtctttacagagaatcaacaatctgatactctataggcaaattaatcagatatgagaaattgcagggctcaagtagatcacagatatattgctgttactttgaattttaatataagatatacatttataagtaacacaagtaagctcttaagcctaactttctttaagcaaatcatataattaaaataaatggtgatctattttaaatgaagtttgtatttattcctttcttttcagggccatgaggcaatactgcttatgtggcatattgcacaattctgggaagcaccattctcaaaaacagaacaaatcttcataatgagtcagtttccttgtatccttaaatttcattcttcttttctgaactcaaaattcaggaaagagcatcacccaggaatatcatcaggctgcaatttctttatcaactaaaccaaaaattcaatcttgatttgccaaattttcaaggacttacaagggcttcgtgcatattaatctacgatagtgtctggtgaatttataatcaggctttgggtttaactccatattcatgttaattatatctagatatatgtctcttaaaaggtcctttactt

SEQ ID NO: 28097 - DNA, 1329 bp, Bovine  19866880873885
  misc_feature (1)..(1): n is a, c, g, or t
ntagaaatgattatactttggcttcttagtgaagcaattcacagtcctgtattcaggttcgtaatatgtggaaaagtaaatattaaacactagattcttttatagcacagagagaccaccaatgacaaaagcccaggaaactccatcagctaacatagggtgagactcgtgtatcccagtgtaaacccactccccgttttgacagatacacacttttccaggagacttgtcactattgctttccctttttcttatccttttggtctgctctctcccctcaccttcttcccatgacctcctcaaaatgcataagttaaacccatataagatacaactattctggacctcactttaaacaatgtgagaagtgctaaggcagaataaaagttgaaccaaaatgttgtaaaagatggttttaatggcatatctaggtgttaacccactctggcttaatgaaccctccttcattccaaaggagccctgtgactgagaatgacccagaaccttcctacctcacacatcacctggaagactgccaacgccttactgaggagtccagcccatcctctccgtcaccatggatgtggtagcccacaggatcaccaccactgtgtgctgggaattccttcataatgagtattcagttattataatgccatatttagggaaaaaaatcatatgttaatttttaaaatcatttttggcataattccaagatgtaaatgcttttgatcttctttattttaaaatctacagttctattaaaacctccaaggagctagtaggaaattctgcctgaagggtaagagaaatcttcacagaacagacaatctgtgagctcagccttgaagaaatgggttggggaggattctaggtgggcagagaaggatatcattactggagacagaaagaatggaagaaaagtgcagagatattcttcttaattaaagaagtacaatcacaaagtcaaagaaaccggccttgaccattctcttatctccactttgtccccactttgcttgtccctcatccctcttgtcacctgccagaggcacatgtctgcattccatggcccttccattcaagagaagcccaaatttcacagttcctactatctcatcatcctggttcagctagcaaacagtaaaaccatgaacctagctattcagctaaggtgttaaaattaatgccctcacttcttccatcaaagtgtcctcaatttgctgccaagttaatcttttccctgtccatagcccatagcactctgaaaccctaatactacgcttaggcccataatatacctattcataatgtgctgcccttgtttgt

SEQ ID NO: 28098 - DNA, 1761 bp, Bovine  19866880941188
  misc_feature (1)..(1): n is a, c, g, or t
naaatttgtaggtttgtgcacagaaaagcatgttgggaaagcaatactcgggagtccttccccttccttgagcaggccttcacaaaagaaagctttctgttacttctgcaggaagttgcggagggaggcctaataggattcttttgcacacagctcgccctgtgccgaggtgaatcatacatttctctgatcaagccttgctgtcagtgactcaggcctctcacggtgtcccctgtacccttaccctgggctgcctctcagctgtggcgcgcagcctctctcattcacaggagggcagatgccgtcttccagtcaagttctctctccaataaaccactctgcttagggctcaccctggtgtgataaaactgtggcgggcctaataatagaaaccacaaatcctgcctgccaatcctgcattctaacctctaatccacttgtagcaaggacaaatgttttcaggaaaataaaatgactctgcgtagagcacagtgacacaacagcccccgttgtcaaaatttccacccaaaagcctagaaacaaggggctggcttctacactcctctcctcagtcgccatatacctggtttcagccttcctctaatttctaatacagcctgagtgacaaaagcaatgaaaaagaaaatgaaaagaggacacgggcaggaggaggaaagatacatacaatttcatcattgttacaacttatttaacgatgggaatttgtcttctgtcattcagtacaaggcagatagcccaatagaagttcggtgttagatgaataggactctcacgttaatcaaacggaaagttggctacgtgggtggattccttaactgagtgactggatttgaggacctgcggcagccagcacagtggaaagtatcctcagaaaacccaagattgagtcccagctcaccaccccaccaatcagatctggttccgagagacaatttatttcatccctccagcctcggaactctcatctctaaaacagtgttgaaagtaacagacctattggctgcacagagctgatgttgaaccgtggtgagagagaatgtctaggaaatgctgtgtaaactgtaaatctgtctgtaactaggaggaatgattatcactggacacagatccatcgattgtttctgattggctgtacacagaattaaaggcccccagaaaatagctcagccttcctctctagcccccagaaaatagctcagctcttcctctctagtttgactattctactcaaaccttgcctctcacccttcagtcctgagggtctccaaagacctctggctctcagttaactgttacacccccagccagcggtagggcaggagttcctggtttgatttgtgttttaaccagctcggccctgctgcggcttggtcaccaatgtgctgtcacaaagacacaaaccagagtggaattaaacacaaactatggtgagagaggagttctgagaagaatctgatttaacaaatgagctatgtgaacaggactcggaaaactgtgactgcagacttctctcaggagctcgaactttctcagttttgaaacaccacatttacttagcctggtggtgagtgtcagtgaattaacaatgtgcactgaagtctctcagctggcagtgtgataaaatttaaaatatttttctcgttcagtatcatgttagaattttcatggcattaatgaaaggacgtgatgcaatggaaaaggatctgcttgctaatacaggagatacaagagtctcaggtt

SEQ ID NO: 28099 - DNA, 1953 bp, Bovine  19866880944769
  misc_feature (1)..(1): n is a, c, g, or t
ntttgatggagcatcttcttaagaccctcttacctagtgaaggggtctgcgtctagctttagggaacagggttggattatattcattaccctgtgtggcaggctttgtgtggaagtctgttgttagcctatccatcacagttcattttatgtgtgtgcacacacacatacatcctatcactgtctcagattctgtgaagttaaataagtcagtagatagcggaggttagttatctgtttactctagagctctagtaaggaaatgccaataggtgatcataaacctaagccctccagagaacaccaggccttggtaagctgagcagctggtggatccatcctgtgtttgtgcataaggcagggagatgtctaaaaggtgtgtttcaggaaattctaaaaagccattatagtggcctctttatagtacaacacataccattggactaatatttacctaatgagccctatgtattaggtaactcactgggctctaggacagagaagactggcgtgctgcagtccacggagtcacaaagagttggacacgaccgagcgactgaacgacaactgtgtacaacagagatgaagaagtcagagtctatgacttctcagctctccctatccagtgacaaagaaggaccagaaagaaaataaccatcagggttgtaggctgcacaaggacccaggtcagcacatacctagtgctgtgaggtgaggtgggaggggaaagccatggaaaactgcaggaagatattaaagttggatgttatggttcagttagaattcaccagggttatgagaacacagggcattgcaggcagagggaagtgtcggggcagagcagtggagtgaactctgctcctggccagtgaggagtgcctggcttgagcttcagagagtttggagaggatgggatagaaatgtggaagcggaggctagaaagggtcagaggtcacatcacaaggaatatagctttatcttgttggctgcagttagggtaatgataaaattgatggtttaaactgggatgattttgagagtaaagaggagatgctaaaaatctttggaatttaaatttttgaatattcatttatcataaacatgattctattaagttttctgaagagaaaatcccttattaaaatatgaaaaacatttgtttttgaaaaacaaaaaatatgaaaaaatcttgtatattaaagtaaaaattaaaaattgctttatgtgaacaataaaaataatataaaaagcaaaaattattcttactatagccacatattttaatctgcctgtttataactaccttgaataccatgccattagtatttttctgaggttatgtttttccatataatcttatttttaatgttttaataaaacagcagtgtttaaagctcctttttatggtatgtagattacaatgtttgataactccaatgaactcttctctttttttaattgagaaaatactttccctgcaggcactgagaaatgttcaaaacaaattatgctaaatggaggatattctcaattcaatttttttcatattaaaatgtgtaaacatctctggctgttttcttcttttcagtgtatctttcttcagcaaattttttatgagataaaattcatcaaacaagttgtttctgtttatgatgtttttgaatttttgccaaatataaatgttgcaaattatcagctttctgaaatttcattatgtttcagaacagaataaaatttattcaatgaaaaatagtagcttaccaaatgacactccctacaagaaatatattttaaaggacaattatagaatttcaaaacaaacctacatacctttaagcccttgtcatttaagtaattcagtttttgctttgcttttggggggggaagtttcaatgacttccttgtaagctttgtctttagaaatcaaaattcactaaaaacttcaaaaactgat

SEQ ID NO: 28100 - DNA, 674 bp, Bovine  19866880975881
  misc_feature (1)..(1): n is a, c, g, or t
naaattctccacccagtatcatcagatgtagcctgtttcctttctcagggcatgtggaaacttttagatggtcttgaggtcgtatgagggctgagggcgactccaaggggctaaactgagctttccttccggcgccccacctccgccttccccacatactcacaccattcaaacagtgttccccggatgcagctattctgtgacaacttgctctgagtcccaaatgagaaaggaggcaaaagcacctcctatttgcatacacctcattctaggctcccacccccattttgggggaggggcgggcgtggggtgcggaggaggctgtgatgttcagtcccatgtgcaggctcctataccccaggcacatgttagacctgccactcatgggccaggtctggctcttgctgtgttaaatgaggtcaggacaacttggagtggttttctttcctttcttttttccctctcttcccaaaggttggctttcatgactgttgtcttgaagtggatttgtaaacgtcagatttatgacccaaagatgatcaatggcctcttattccttgcagcagtaagcctttggcttggctggtatgtcagagctgcggaggaacataatttaagggggaaagtgtattcaaaatgccaaaaatactatccccattatatgctttgggttt

SEQ ID NO: 28101 - DNA, 802 bp, Bovine  19866881061884
  misc_feature (1)..(1): n is a, c, g, or t
ngtaataataataatagtgaaaatgctacttttcatttgtttcaaatggataattctgtttctcaatacacctgggtttaagtcagctctatagcattgtagcaaattattcaagtctcacctgtaaataataaagggtaataaagactctctcagaggctcacttaacaagctaaaggtagctggtacacagtgaagactgttcaaaaaaggtagctattattcggaggcatttatgaaagagaaaaaagtcagcgggcatttaaggtctgagtttatcaggaggacagggttggcttggtgttttcatctgtaatttctttcagcggcacttgtattcagtatctcatccatcatagccccgtgtgcacgacgtaggccattaacacatatggttccggctctgcttcacggataggaatggattgctcaacaggaattgctgtgttcttatgttttaagtgctattttcccctgaggctttcagtatgtcactctatttcaaaaacaagtggctcacatgtctagaaaaccatgtgttgaagctcactgttagagattctgtttattcacaagcaggtcatcagcttagagagaaaaggtccttattttaactccaggctcatatgcataactacaaagagttgggggcttaatggttcttttgtcaagccaccttgaggtcagtagtcctttcacgattaattcatgggaaagcagatattcttgtgatgtgtggcataggaaacaagtggcataggaaatatattggatttacatagtgccagaggatatatgtaaa

SEQ ID NO: 28102 - DNA, 1280 bp, Bovine  19866881077729
  misc_feature (1)..(1): n is a, c, g, or t
ntttcattttttctctagaaactataaactgctgtgtgtggtaatacagaatatcattgcaatctatcatgacttgtatctcatagattctaacatgtatctttttacatgttaccatctctgaaattggctgcatcttacaactgaaggaatcatagtaatggatagtattttttcttttataggaaggtgatatatcatgcaaccaatggtactttagaactgatgaaaagtaatttaagtctagtcatagctaaagttttaaattcatatttggtagatattgtgtgatatctggttcaggctcattctatcttttttgctgtgtttttctgtactacataagctacaatacttaaaaatttcccagacttcaatattgctggagttctggctgaaaacttgttcagttgctaagtcatgtctgactttttgcaaccccatggactgcagcactccaaacttccctgtccttcactatctcccaaaatttgttcaaactcatttccattgagtcagtgatgccatccaaccatctcatcctctgtctcccctttctcttcttgccctcaatctttcccagcatcaactcttttccatcaagtcagtttttcgcatcagatagccaaagtattggggtttcagcttcagcatcagtccttccaatgaatattcagggttgatttcctttgggattgacctgttcaatcttcttgcagtgcacaggactctcaagagtcttctccagcaccacagtttgaaaacatcaatttttgttaaatagatgagcacacaaaacttggaaggtgaaaatgagacaaagggtgtcttcatgttccctttgagtgtgtgtttctggcaaacagggtcttgaagacaacatgttcctttgcaggagcattccaatggctctttcttagctttctgggaccgagaggcacctgtggaagtggcaggaggagctttatagagctgattccagcttcctcatctctggatcactactctgtggtgtgctctctggctcagcgtttctaagtgggatcagaattcctggtaggtgagttgtgtggtattctgggagcaatttctggagaatttctaatccttacaacaatttattatgaacatctaattctctatattgtataactgcttgcttaaaatactttgtgggtttttggtttcctctaccgtggtgactgatagttacaacagattattaaatacactgtaaaacaaatcaaggtatcaaagggatgaggacttttacctatttt

SEQ ID NO: 28103 - DNA, 1280 bp, Bovine  19866881084058
  misc_feature (1)..(1): n is a, c, g, or t
natggatactgctaagccaaagaccctcccgcagctgtagcgctagtcaaattcagggtggatgtttgtcagcagctgtctgagttcccgtgacagcacccacggatggcttgccaggctggagcaatgctctcagtagcagcagatgggaggcatggagggggctctggatcagcccatggagagtaccctacccagtgccccaccccccacagcacgagggctaagctggtaatggagagaagagactgaaaagagactgactgcctggcaattagtaaatgagctgtccgaaaatcatttgtattgcaaggagaaacagttttccttcctcttgattttctgtgttttcatttatttacttaattacataagccccacctcatttaaaaaatgatagggggaggcttggcgtgatttaaacagagctccacggaacatgcacccaggaaacaatttgcttctcactgttccaggtctgtttttagcttccaaacaattaagcaggagccccataagctctcccaggctgagcctgcacccacagcaaccatcagttggcatttagggggagggagaatgaagagaaagtgagttaaccttttccacgcccccagacaacagcttcatttcaacgaagatccaggaagagctaaaagaggtagagactccacagtccttccaaatttacccttcttccttgtaactcctgccctctcagttcatctggaaggaaagactgaggaccaggcttctctctagagcaccttatcattcttactaagttaattaggagagaagcagaaggtgtggtcaaagcaagcattatatccagctgcacacgtttaaggcactggttggaaggggttaattatttcctgtggatgaacctaaagggagcaaattgcctgctcagagagcacagagtacaatgcacaaatagaaggtcatttgggtcaataactatcatgagtctaagaggaaggtgggtgaagggagagctattctgaagctatagaagagatgatctcagtaatcagccagtgttaattatgactcctctgtgctaggagcacagaacacaaacatggccggtaataaggtgtggtccctgcctgtgaagcactcagcatctagtagattccagcggaaccgcctttaacttggggttgttttctagagccagcgtctacaacaaaaactgaaacgaaaatgctatgcgaaatatcatttgaaaaaaaaatcatttaagaaagaactgggttttcctccagtgttag

SEQ ID NO: 28104 - DNA, 5149 bp, Bovine  19866881100464
  misc_feature (1)..(1): n is a, c, g, or t
nacggggcagtggtgtaggttctgtggggcatcctttgaggggccgggcagggggctgagatggtgctcaaggcacaatgtacccccgagaggctcaattagtctgtaggaaggggacctttccctacctggtccacagaagagccacatatctgcagtttgtctagaggggatacatttccttatctgcaaaaaggcactgtatatgctaacagcttgggagctaggtaagaaatgggatggataatgatatatcgtccacaaacctgacaatgctgagacgagaggaaccgtcacttttaggttattattgttcagtcattcagtcatgtccgactctgcagccccatagactgcagcacgccaggcttccctgtccttcactatctcccgaagtttgctcaaaatcatgtccattgagtcaatgatgccatccaaccatctcatcctttgtcatccccttctcctcctaccctccatcttttttagcatcagggtcttttccaatgagttggcccttctcatcagatggccaaagtattagagcttcaacttcagcatcagtccttccaatgaatattcagagttgatttcctttaggattgactggtttgatctccttgctatccaagaaactcttcaagagtcttctccagcaccacagttcaaatctcttgttcactttagctcctaaagccccacccatctgcaaccctgggatattggagcttttggaaaaagccaaccagagatttgatgccaggtctaggtttccttcaggagagggtaggagtatagagaagagggggaagggctgacatgtttcatgtctaaactttatgacgtttgagggcaggaactctgtattattcactattgtattcttagtaccgtgcatgcaacaaacctgtgtggaaggaatgcactcaaagccattttattcttttatcttgcttgtgttttcagtaacagagagatggttaaacctatctttatttatttattttttaatatccacaaaattcaatcctatgttaatctggcaaataaggcacctatgtgaacatttttttaaatcttttaaaggatcataggaccttagcgctaaaagtgtcttagtctaatctgcttagttgcaataaaggcagcagtggtctagagagtttaagtggcttgtcattgatttcaaaaccagttggaggcaaagccagaactggaggtcagaacaatagatccccaaacccaaagtctttctccaagatctcttgccctgagactaagagatcaagcacatataagcctctaacatgagtgttgtctgctgtgttaggcagtcagcctcccacactgagaaggtcgcacctttgcaagcaccagccccatttccctagtgctaactctgacactacacaatcagctgtatgtttgtgtactctacacactcctggactcaaaagtgagtaatcagatagcaatctgaaaacatttacataaatgggccccaaagaaaatacctactagtctgtcactttcaatttctttgtgaaatgagccatggaactttgaaaaacgatcaacactgcagagcacgtaaatgtgtcatacaccatcgtttaacattggaagggctaggtcagagcagtaataaactgggaagccccatggagtcataggaaagtggtctggttttgcaaataccatgcatcacagatactgaggagacccaccataaggtagccaggatgaaacaagagtcatttctttctcgggcaaagtattccagtgactgccgtagaacaaggtggaaattgttcctaaagaatgctggattccagacaactagggaataacatttaaaagggtaactttgtctagggaggaagtacagattttctgacctccatttctaataactggaatggcatgtgtgtctggtaactcaaaagggaagaccattataatagatggaacattttagtcaaataattacaagtcatcccttactcaggcaaaggaaccaactggttgggtgtggtaggaaagtgaaaattcagaatctcaatcacatggggtcacacaggcatttttggcacaagatgaacttgaaaaatataataaagaaaaaatctacatcaggcaacagatttatgggctgaaaatgtccctttgcccttaaaaagacttctggaaatagattttcattatattttggacaacatgatgttctatcttttgtatctagaaagttcaaaatgaaccagctatgaaagaaaataactgtcatacctttatgtctcttgtttctatgcaatattttctcaactgagaatattttatgcctggtattaattaccatttcatttctattgagtgccagtgttaaagatgctgcattgaagacgtgatgaaaactaactaaattggcaaaatggagttgagggtaggtggttattcaaggagcttgtgcagctttctaaaacttgaagcttttccatagcagggttctatacataaagaatttttataaatggctaagattatggaagagaaaagaagggaaggacctgaaaggaaaccttgtaaacagctgtctagaactgagttgatatggtttaaactctaaaccataccatccagcttaaaataatcaagaatgttaagggaggggtactaacaaattattctttaaagataaagttggttccccatttgagcaacaaaatatagtagtgttggactataaccaaaaatacaaaatgtataatcatgtatacatactgatattaaattttaaaatattaaatagtgaatgaatggaggaaaatagaccaatctcccttgcagaagaatttcaaataatttccatagatactttacccttaaggaggctgagcataattccccattcactccttaagtatgagttgtgcacagtaacttctttccaaaggaaggaagagtatatactgtgaaagaagggaggttggggtggggagaaaaactttacagtggagagatctggcaaacactacctccatcagttaattaaggcgaacaccagtgataagtcacattcacaccatggacccttggtaagatgtaatgagtacagtgtattatttctctgtgtgtttttcttgtttgttttgtttttatttttgcataaaactcataacctagtctactcatgaggaaaacaaatacatcccaattgagggatattctacgaaatccctagtaggactttccaaaagtgtcaggatcttcaaaaacaagaagagcttttttttaaaaacaaaaccaaaaaaaaaactgtcacaatcaaaggagcctacagaaacatgatttctgaacgtaatgtggtgtcctggaggggattctggaatgggagaatgacattaagaaaaaactaaggtcacagtatggactttagttaaaagtaacatatcaacatgggttcaagtatgccatagtaatgtcacattctaacaacaggggaaactgggccatggaaactccctggaccatatttctgttttttctgtatttttctaaaataactctaaaataaacattcatttaaaaaaataaaacggaagttggttttggcaaaaaggacaatagaagaggtgaggaaatagaagttaatagtcaaaaagtaggagctctcaacccaatggagcctgatgtgtcagcattagaaaaacacgaagtcaaaattcacctctgaatgccaaggagaactgtttgaaacaatgctttaagaaaagtggggaggtatttataagcacaatgaacactttgcctgaacaggagcaaaaaaataagccgcctgtgggaaggcaaacaggccagggtcacagacacgtcttatgtagcatctaaaatgagataaaacacccgatgagaggaaagtgttaagcaaacagggcccaagttagccacaagaactcccatgttatgtgttctccctagtgtttctaattatgaggaagttaaattctttctacaaaaatatcacattgacattttttgtcacttttacaaaggttttgatgtctcgatacagacaggaactgcttctcactactttgaattttgcctcgtaggaaagaacctgaaaacaacatcttgcaacactggatctgaccagccttccatttcagcagcaggttcttaatttggaaggactgaatcatccatttctcacctttctcaccagccaagtatttttaacttactgtcagctacggagtgaacatagtctataagagaaaagatagcccatttttcacttttccacttttggctgctgaacccaagaatgcatcacagcaaaaaggagggtcttttatatgaaaataatattggtttaacattttttttccattttgttaagtacctaaaatgagtccctgctactgacaggacccacttcttacctagaggcagcttttctgcactctctgaagtacagaaactgtgggcagcagccttgagctccccagtggccagggtaggaaggtcatggggatgcatccagttccccataccagaaggacctgacctggaagttgagcctctgtggacctgttctccttgacctccaggttctggaatgggaaagagacaaatcttgaagtgttgctcaagagccactggacacactgatagtcagaaactcaacttcataaaaacacttaatttcaacatctaaaagaaacagttgaggttctattagattcttaggtttaaattgagaaaatgaaagtagggagaggccaaataaagcaaaactttgaataagaagagagcggcattttctcatcatccgtttaagcagataaaatggcaattaaaaacatttacgcatggcttttgtttctcgttttgtctgtttgcatgacagataaagaataaagaatagatttcatggtcagggacagaaaggcatatggcaatgactgggtgttgcagaatgatgaaattcagttctatttggtgcaatgaagaacagaggaatagattataccttggaacagaaaggcaaggagaaatatcagagccaaagaagacgatgatgaacagagaggcatgctgagtacatactccatgcccaaaagtgtgggcacaaagaagatgagggaat

SEQ ID NO: 28105 - DNA, 1063 bp, Bovine  19866881157625
  misc_feature (1)..(1): n is a, c, g, or t
ncatgaacttctcactccacccctccttcatgcagggtttattcatttctgctttagaaatgttgggtttgcaatctgcaatggcatttaaatgtgggcaacaacactgcaggtcataaaaaatacacagtatgactgttgacaagtttttattatcgtgtggaatattttagaatagttcgttacttatagcacattgtttagaacagttcctttcatttgatcattaaatgccgacctttagggcacatcaggggccagtccacccactgcatcagctggctctcatagcaggccagaaaagagctacctagctctgtttaattgcctcctgtgatggaggaggagttcatgacctccattcctctgtgaaacagctgcacttgttagaaagtctcactttatgctgtgctgatacacgcctcactgtatcccctcccccatcctccaccccacccctgctgctcttgaaccaaataaccctaaattcgcatccacatggcaaccccttcagttacttcaagacccctgacaagccacatctgaagtctgctcttctatattttatgcctttgccagccttgattttttatttatggaccacatcttgctattttactgcatgcattcctgtaagcagccttaaatcctgtgtgggataaggccatatataaataaatccttgtgcctttcctcaaggcaacaactcaagttccccacccgacggtctcctcactaaccttgcgtcatttcctcagatttattctctcatcattctgacactagaatagggaaaatatagggctattcccaggcccatgggattgtctctgggtgctgtgtcttaggaataacagacagagtttggaaagatgacaaaaggttcatcactgctgtttcacagtttcagtttgcaaaacagttcttaatgacatgctcaagcattggaaatccctataaccacccacttctggtacttaggtgacgacctggcctccttcagaacggaagattaaggtcataggactagaacacccctaccgccctccacacaattcagagt

SEQ ID NO: 28106 - DNA, 1560 bp, Bovine  19866881204133
  misc_feature (1)..(1): n is a, c, g, or t
ngtggatttcctttaggattaattggttggatctccttgcagtccaacgaactctcaggagtcctctcaagagtcctctcaagagtcccacagttcgaaagcatcaattcttcagcgctcagccttttttatgatccaactctcatattcatacatgaatatgtaaaaaaaaaccatagctttgactatatggacctttgtgggcaaagtgatgtctctgctttttaataagctgtctaggtttgccacaactctccttccaaaacatttcatcccctctgagacattcttcatccagctacttgcagtccatggtccacttcagctatttgcttagaaggttattaaactacagagcatagcaaagaagcgatttaatgttaattgaatattgataaaggaggaggggaaaagttaattgagtcaattagttgcttagttgctaaggtaacttttctcccagttggaaagaaattatctcaggattagagacaggttttagagaaagaaatacattatcagcttttctctttcggtcttaggaaaagtctgaataatcaaagcaaggtggagtgcaagaaagagactctagaaataaaagacagtgtggagcttcctagctcggggagtgacatcagccccaagaaaaagcaatgagctctcttgcaagagagagctagctaattagcgagatcctgagcacaatagctgagtaaggaagacattggcccatgagcctagatgaatttaagcagcaagaaaaacggcaacaaatgtttttaatactcaaattacaaaggcctcccgggctgagggaaaatgctgagaaattttataggtgagagatagcagatgttttcaagaggcagaaagaaaactaaagttatgttatgttgagaagatgcttgtaaggttaaaggaagtggtctttcacttgccttttccagaagtattttaatcttgatctgtgatacaaaacaaaaacaaacaaaaaacagtaactagggatcactaattactcaccctgttatttttagtaatatatttcatggaaaaattaaaaattgttgaattgcggtccatttccctggtggctcagatttccctggtggttgcaatgcagcaacctgggtttgattgctgggtcagggaagatcccctggaaaagggaatggcaacccattccagtattcttgactggctacagtccatggggtctcgaagagttggacattactaagcaactttcactttcactttccatcccctgagttagccatgtctaaaacattccactcattgggcctttttaccccttagcagactctcccaaacattgtccaatggtagctgccagaattacacttattatagctagaagggaatgatctgtcttgtgtttttaaaatctgttttggaagccttgaggctcagaatcctccccttggcttgagaaggataaaccagacttccacccaatatatttgttcagggctgtacaaaatttcagttactgaacaaattgttagctgcctcaaacaaggccctgtatatccaggg

SEQ ID NO: 28107 - DNA, 2100 bp, Bovine  19866881223775
  misc_feature (1)..(1): n is a, c, g, or t
naatatatttttgtgcctatattttgaaaagaatcttattcaaaattaaaaatgatagcgcaaatctcttaaaatccaaaaggaaccataaaaatgtattaatataggtctaatactattaattctttaattcaaggattactaggacattttatacctattcacaaaaacagagctacaagagagacttagttatctgtcttcagttgggtaaatgtctaaacctattacttctcaatggaaatgagagatggaatatggaataagttgaaaatatccttccaactatgcacattccctctccctatcaaggaaaatgcaaactgccaagcttaacctttagccaaccctccccacccaccttcctaagaactctcatctaactatcttcaggataatctctacaaataaagactcaataataataataataataaaataatgacaaattcttatattgggcttccctggtggctcagatggtaaagaatctgtctgcaatgcaggagacctgggttctatcccagggtcaggaagatcctctggataagggaatggctacccactcccagtattcttgcctgaagaatttcatggacagagaaggagcctggcaggctacatacagtccatggggttgcaaagagtcagacacgactgagcgactaacactttcactttgtcttattaagtgtcactttactatttacaaagcccttttgtcttttttgagcctcaagtaattctatgaagcagtcgtggtatcatcccattttatatggtcaaagaaatcaagggctttccccagtttccactgtatgtgcttgagctaagggctagaatttaaggttacctgacactcagtttagttctttctcccgtacaatacgtctcctgtgtcatactaagatggtgttccctgaatttaataatattttttatttaaaagttgctctgacttaaatgtaagtcaattacttcatttagttccttcttatgttattccaacttctgggttaagacttctaaaaaagatataaaaggaaacaaatggaagaatttcccacccccaacacattatattttggcaaatacatatttaaaaccattcctaggcatacgtctaccaaggacaactgagcaaagaaaggggtgtgagctgatgccatatatcaaaaattcatggccagagaaacaaagagaagattctgaaacaagagagagctgatctaactcagctatggacccaaagatcagaccctcaaagtcacatcagcttcataaaataaatagaagaaaaatgtactccactagtaatccttgctcagagaggaagtcacatgggaatcaggtaaagaagactcccacactgtaacggaggcaagtgtagacagactgaaaataaatgtaatggaaaccctgaaaacataatacagaggaagaagaaaggaagggaggaagaaagaacagaaaatatctagaaggaaatcattaacatcattaacatttgcttcatgctatagcataacaccatctccataagtggctcagatggtaaagaatctgcctgtgatgcaggagacccaggtttgatccctgggtcaggaaaatcccttgaaaaaagaaatggcaatccactccagtattcttgcctagagaaattcacggacagaggagcctggcaggctagcagcccatgtggttgcagagtcggacacaactgagcggacacacttccactttctttcatagcataacttaagaagaataagccttcaataaagcatgagctcaaagataagatgattacagcacaaatgtaaaaagaagattcagctgaaataatattatcacagaactaattgataaaccagagataacaaggaagaatagacaccgctgaatatgaaattttaaaacaaaataaaagttcaattaaaacagcattaatagagaagataaaagataaaaaccccaaataatggtaattgatgtctctgtgctatagaaactatcaacacaaatgaagcagaagctgtagtgaaagatataatagccaaaaaaaaaaaaaaatccctcataccctcatcccaagtgaaa

SEQ ID NO: 28108 - DNA, 647 bp, Bovine  19866881276424
  misc_feature (1)..(1): n is a, c, g, or t
ntgaagactgtgggcctttgttaagataccacccacaccagacgtgcagcttgccattcctcttaggaatttcactattccttgccctgaggtattctgctcaagtgccagagtaggaaaaccagataattactttggtcaagtagtgtgtgtaaattaagtcagtaaaagcttaagtgcaggaggaggacctgacaacatgaagacttctcaaaatcccattaagaaatgtgtgagattctgggagccgatgttttcagataaatgatctcacaccgagttcagtgggactgaatttttaacgtttaagatttgactgcttgaggtatccattcactgcctaaattcccgcacagcagtcctaccagggagctctgcgaccaatgattttgatatttctggtggtgcagtatctcttaaagcagcacgttcggacactggattgtatcactttctaagatggcttgctttcttaatagaatcatggtgtattttttctgtgtagattacactccactggtcatcattcttaaaatgtgagtcgtttgcacaatcgatcatacaaacccaacaaccaagaaacagtgataattgtctttctgtactttactaaacactttgtgtttaatatattttaaattataaag

SEQ ID NO: 28109 - DNA, 1109 bp, Bovine  19866881314303
  misc_feature (1)..(1): n is a, c, g, or t
ntagatcttgtaaaagagaagcggcataaagcaaactttggaaaagtggagatacctgttttctgcatagatgggctgatcgctgggttctaccattgttatctggtttggggaccatgggcaagccccgtttcctcatctgtaccctagagatgataattcagcttcagtgagatagtacagactgagctggaaaagatcacagaaagaccagtttcgttggctgagaggcactgactccatttgcagtggacatcccttactttctagatgcctctgtgtcaggggattcccgtcttgtcacttaggcaggaaagtcccttcttattatgtgggttgcaggggtgtgggaagatttctcttctcactgctgtgacagtgagggttaggggagtcccttttcacccctttaatatggatgggaaaagggggaaaagaaaatgtggggagaggcagcgtggttcagaggttcatgggactggaagcacattctcttcttggcgtcagttttgtgctggtgctggtgggagtgctggcctgatgtacattttactaaaggctgatccccagtcccgtctccccagaaatctttaaatgtcagtagtatcaacactgtgctggcttcttgctcctgtgtctctcctcttctcatcagttgtgagtctcaattcctattggcaggatatgccaacgatgtggaaacaatcctgttcttagataagggagatgtaagaaacttagcctcaatcctcacacacagcacactagataataacactcatccttgaggggcttgctgcctggtgggaagaactgagtacatggacacagctgtgatgcaggagaatctgtgggcatgtggcagactcgggacttccaagggtggatgttgagctggctgttgtgttcaaagtgttcgtatttaggaggtaactacaggcaaaatgtacagattttgaagcattagaatgtacttgttaaatgaatccaggggagctgatgacattgcccaggaagaaaggagagaactgtgcttctcaatcttggctatgtataagaaaattttgggggatcctacctgcatagcctctgacttaaaaataggtata

SEQ ID NO: 28110 - DNA, 1324 bp, Bovine  19866881387748
  misc_feature (1)..(1): n is a, c, g, or t
nggacctgtgccataaacttgttccagtaaagtgaacttccttcccctgtgcttactgaagacagacttgaagtgacctttggacaaataaaagcacccagtgtggaaaagccttggttctccctgtgaaggggttttaagggaggcttaggggcttccccggtggctcagtgataaaggagtctgcctgcaatgcaggagacactggttcaatccctgggtccagaagatcccctggaggaggaaatggcaacccactccagtattcttgcccagagaatcccatagacagaggagcctggcgggctacagtccatgagtagacccaatttagcaactaaacaacaacaatccctttcacttctatattccagaacctatctgatatgataaacattgtggcttcaacatgaaatactcagataaatgaggcaccatacaaaggtcacatgtattgttaccgccacccactaatcattccaacacatgtagtataccagatcagaggcctcaccaaaatgcaatagttaggcaagaaagccttgacaacaaagaagtaactattgttaccaatttccaatactttgtcctaatctaaaagctgtccttatgctttgaatataaatgttaatatgtttctaaaaaagagaaattattgttactaagaaattttaaagcaaagtgagtgaagtccttcaggcctgtctgactcttcgtgaccccatggactgcagcctaccaggctcctctagcaaggaggcacattattaagttctgttgaactttctagctaactctcaacaaagagaaacctggggccagtaactgttaccagaagttacatgtttgttataaaatgactaaacaaatcttgacttgttttatttcagtaatattacacccgggggtgtggaatggcaagatagcctacacctttgcaacttatatcactcaggaaatagaacgttttaaaattaaggtggtttaatcccagaactataggatctcattactgtatttttaaagccaccgtgatgttttaagttgtttacgtgagctgatctatgtaattaaaatattcaaaacaaacttaataacatgaaaaagacatctgataccaaaaatatgatcctggcactgtaactctttctcgtatttttactcacccgggaactcagtggctttgtgtctgcagcatttaccctcaagcgtctctctggcaccctgtgatatatttctgtttcattctgactagtttgtgtaattctttgtggctcttccagtgttcagggtttgccatccacagcaatgcacatctcagaca

SEQ ID NO: 28111 - DNA, 1691 bp, Bovine  19866881449725
  misc_feature (1)..(1): n is a, c, g, or t
ncccaactactaaggggaaataggctattactctaccatgaaggttacaaagtgtgtgaatgaaatacagaggatgccttaggtcatctcttagtattaccattctttgtaattaaggtcagtggaaactgcaacacctcagtccaggcaggactacaatggcccagacccttaggaaggaaagtttgagttacatcaccaaataaatgaccatgacttactgagatacttgatgaaggtaaagggaattcagtgtgagtagtggaagaaggtacatataaataccagctatgactacatgaacagatacagaaatgactagaattgtctttagtaattccttcttattttgctacgaatacatttgtgcatatggtatgtgtgtagaaatacttattttttttccttcattcccttatcatgtaacataagatgcactggctttatgtcatagcatttatgtattgctaattttacattataacatttaggttatgagatatcaaggagaacagtaaatgtcactcaacaaatttatctcctcttctgggcaaggaattattggacttttagttttatgaaggatggttctatcaagttaggtatacatttgaccttcttattgtctttatttggagataaagtatgtttttaaaagatacgtatgggtaccaagttgaccaggggtgaaattgtgatgactaattttatttgtcaacttgattggctgtggagtgcccagatgaaacattatttccagatatgtctgaaaaaatgcggatgaacgtaatttaatctattggttctttttccctggagaagcctaacatataactgatcttgactatgaactattgcaatttgcatttgtttttcccatattgttgaccttaagttctggaacacttattacgtactttttgttaaccttcttggagtgcctccccatggatttcaggatgaaatgactcctaaacaaaaggcaatctcaggacacttagaaactcactacatagtaaagatgactgctttaaagaaatttctcttataaatgaataatgaaggtgatgctggacaaaatgacttatgccatttagcagtaggggccagagaggacaagagaagaccaaacaagagaattaaaaatttttttgtcaagtcagtctatgccttgtacccatgcctaattacaaaaggaaattagaaacaagtacatgtatattactgcatgtattaatgtagaatttaattggtttagagtaaattaatggctgcttgcaatatttctggcaattttttataagctgtgtaattttaaattggtttcttgaaaatgctggataaaacattttaattcacacattgctttaaggaattgatttggggataataaaatataatgaaatgtgttacctcagatggatgtaagttctatttgctctgccttttttttttttaactttaatgcaaataatgagtatgctgctaggatatttagaagagctgtaactgtttgaaagttatctctctctctctctctccattggacaaactatagctattttaaaattctattttcttaaagcagtcaagaacaaggaaaatcctctagggcttttctgtttatccaagaaaatttatatggaaatgaaaggcaaggaggtataaaaatcggcaactcagcaaggaaa

SEQ ID NO: 28112 - DNA, 830 bp, Bovine  19866881452739
  misc_feature (1)..(1): n is a, c, g, or t
naaaacagtcctgggcaattgatctcccgattcatccattcttacagtcagtactcaggaatgtgccagggtggtcacgagttagtttgcatctggtgaacgttagaaagataatcaaagtctccataacagtgaagagtgatcaagaggaagtaaaaacctctgagcgatgacaagaaagattccttaaaaacctttaagtgttctctctgtcaacagatgatgctaccaggtaagacaccccagtgggagatgacagccaggtaagtcttccctcccacagggagatggtgattgcgcccggcagagcggttcggtggtagcaacttatatcttttctatttccgtttaaggaagttgcattatatacctgaagctttactctcttccagtcaacacaagcatctttataaaaactgtattagtatctatttctttaaaaaatgaataaataaaaattatctttgagaagtccttgagaaaagtccacagagcaaccaaagtatctcttaagcatccagcacaagtgattttcctcaacattggaacagacatatttctttggttaaacactgaaaaaaggcttggcttacatttaaaaaccatgctatgaaggtacaaatccatagctttaatcatacggtcatactaaatgtggtgaatgcttttactacaagaggcacctggatgctaaatgtgatggaaagaacagcagtttgacatctcccatctgagatttgctccttctgggacaaaagtgattgaatagaatgacaggcaaaaatcaaccaccatatttaaattcttgtttttcgttatgttttccttat

SEQ ID NO: 28113 - DNA, 1065 bp, Bovine  19866881501905
  misc_feature (1)..(1): n is a, c, g, or t
ntaaaatggcatagtgtttgcatatactcaacagcaaatcctcccatatagtaatacttataatcatggctggattgcttcttataatacttaatacaatgtaagtactatggaaatagttaatagcacatggctaattcaacttttgctttttggaaatttccagaattttttttccaaatattttcaatccacagttggttggatccccagatgcggaattcaaggatatgaagaaatacaaagggccacctatatcttgtcatgattcttttataaacagtgattcattgacacaggcaagtccaggttgctaaatgcagcattactatgacagaacatatactttaagaaatctttaagttagtgtccatgttaaaagtatcatcatgtaatttctctataagttgttatctaatgctatagatatatagctgtattcatattgttctatgctataaatgtttgtactataatactattaatgccagaaacccaagaataaacaaataccagtctcattcatcattccaatgtcttcattcaaacagcttggttgttagtgaagagttattgatacctatactttgtttattcactcagcaattcacataggcgctaggctggtagctgagaatacagtgatgagcaaaaaaacccataaaagtcatgatattggggacaagagcctactagtctcaaaaaggaagtgcagtcatcaaacaataatagaaatgaatatatggttacaaaccatagtgagtgctatgcagaaaatgcataaagtgttctgggacatgggctatgcagaggggttatgcaggggagatctatcggaggaagtggttatttggatggacacctgaaattgacaaaatgataactaagtgtgggagttagtgtaggagaagaggctgccttagaggtagagaaaagcatgtgaaaatctatgaagcaaaacggggcatgaatttcacttcaaagcacaggaaggagacctgtgcagctggagctgcaaaaagagtgagacccagtcactctagaggcggctgccatcaccccagg

SEQ ID NO: 28114 - DNA, 1421 bp, Bovine  19866881527213
  misc_feature (1)..(1): n is a, c, g, or t
ncttaaactataactaccgagttcatggttggggaagtttttgtctcccctggtgcagttggtgaggggggggtccatgccttgtgggtgactgaaattgattactttaagtgcccagcagtgactggttactgtggctatatgtgggtgactgattcctttttaagaagccagctcgaaagtaaccacggataagggaacccctactactttcacatacataaaatactgacacatatataaatacatgtacataaaatattggtgttacagttttatattaaaactagaattgcttggttccattttgttagccattaaatataaaatttattttcccccctttaagcaaaatataactggggagtttccttggcatcctgattttgatccctaggcttgtagtaggaccttgggtagctgcaatggtaatagatctgataataattcatagcatctttaataaatatatagaggcaagaccctgtggactttaaggtagtccatccatccgctcattcattcataaaacctatatttactcaagatctgcagattacttggagcagacttatggacaaatactacttgaggaattaatagtctgcttgcagagagaggaagttgagcccacaactgtaaccaacatagtaatacatgctgcaacagaaacaactgcgaaagttctcctggagtatacaggtgggagtaactcatgtggtcctgaataactgcggaacacttctcagtagatatgctattcaagttaggccttgaaacgtgaataagagtgaagaattctctgcaaaggcagcataatttgtgcaaaggtctggaggctgggaaattgaggatttagctttccagtcattatagtcaaggaagtcaagtatgaaactggttgaaaatgggtgttgggttagccaacctggagggcctaccatggtaggcgttgttattcccatagagatgacacaaagttcaggaggctaagttaacttacttctggtctcatagctggtgtcacagctggattccaagctcacttaatctaactcaaaaatctatatgggttccactactccacatagtcctcttctcaaaattttagagtttaattcaattcagtctgtctactgggtatgtactaatactcaaaacactatattgggatcacagatggacacatagataaacaaaatattgttcctgctttccaggaatcaatcagcttgatggaaagagatgttcatgtatcacctattcagggtagatcttgatgactaatgtcactggggcatatgcaataagttgtgggctggggagagagaaaggaattctgcctccgtgattctgagaaagctccctggaggaggagagattttattttgggtcatctgtttgtaaatatttattttata

SEQ ID NO: 28115 - DNA, 1350 bp, Bovine  19866881580358
  misc_feature (1)..(1): n is a, c, g, or t
naatagggcctgtgcttgaccctttaacaatatggtggcttctttgttgtcttctttttcacattaagtttggcaaagatgtgagcacatgctttccctttaaatgtagagcctttttttcatgcttaatatttatgacttttataattactcttataaaagatccactattactagaaacttcagctcttgggttaataatcctgcattttaatgagctctaggtaattacactttgaagtccaaggcttcttttcaaaaattgtaaattgaggttcttcttttcataactatgtaattttaatttcatgttgaaaagcagtgaaaatttgtacattatagcacaactgtaattttagagggaaaaatcagtaatagactatgtaattttaattcaggtcacttctacacaagggtagtcaaaataaactgagaacatttttcttcagaagctacagaattaatctattcctcaccttgaaaaaatagcatgtggatagggagacctgtaaaacaggttggttctctactttatgaaaatggttttgtctatgccaagtctcactaatgttaaacagaaaatagatattttagttgctagcttttctctgagcaggtactggcagccacccacacactaccagaaccatgagagtttgaaacataaagaagacacattttacttttcccacataagctcattccatgctgccagtcaatcttccttatgactggtgtctctaccttcttcctccaaaatcccactgtattttcccgaatctcaagattttgtaccaggtggtttctagatatttaaaattgtgatcacgatgccagacaaataatttttttgccctgttttgagagcaagggagttgaatgcgttcatgcttcctttccacagggataccctggtggctcagacagtaaagaatctgcctgcagtacaggagacccaggttcagtccctgagttgagaagatcccctggagaaggaaatggcgacccactccagtattcttgcctagaaaatcccatagacagaggagcctgggcaggctgcagtccatggggttgcaaagaattgggcactgagtgacgaacactttcactttcctcaggtgtccaagcagcttggcgttggaatgaataaaatgctggagggagagccttgagatgaagtcagtgtgcctgggatgattctgccctgtagtgttgtctctctgtattagatgagagattataaacaacttgtggcagaaacttaggcttacagatctttcatctccttctcagctctcatcacagtatcttgtacttaatttggtggataaaagcaagcttataaaa

SEQ ID NO: 28116 - DNA, 1622 bp, Bovine  19866881933897
  misc_feature (1)..(1): n is a, c, g, or t
nctgtgggcacgcgggcgggtgtgggagtgtcgcccaggcgctcatccgtgtcccctctctgcccgcaggaggatgcatgcatatgaagtgcccgcagccccggtgccagttccagtggtgctggaactgcggctgcgagtggaaccgcgcctgcatgggcgaccactggttcgacgtgtagctggagcagcggccgcgcaggcgcactcagccgccatcctgctgggccttactgtcttatgctttttcctctctctaaacacacacacacatgcacacacacacataaacacgcacatttccagttctttccaaaaccaccaaagcaaagttattggagaagctcccaggatccccgtctccggacccctgagaaaccgccgagctagtgatgagtcccgctggaagtattttcaagccccgaaaatacactaacagtcagagcatagatgacggcgcggttccccgtctgtgtgcgctgtcattcttgaatgaattcaagtcaggctggataaatacatagagacggatttctcagttaccttttaccttcagcaaatattgcgaagaagcgtttggtggggtggggaatgatttcgagggacgattacctgtggttctctgtaagactgcagtggattctgagaacttcatgcgcggcttcaatagcaatggacttatttaaatcttcaggaagcatgtattcccaaagagccacaggcagtagtcagaactatatgtttatccccaagaattctatatttatatcttgcattaatgaaacatcaactctgaatgaatcagcttgtcaactaagtgagaaattatgaaagttaatctgaacattgaatgctcaaaatgtgtgaatttgaacattcactccatttaactctctgcaactttagaagttgtttttctgaaacattacaaaatctagaatttgattttaagcactcattttgagcatgaaaaataagctcatatgtctggcttcactgtacatgtaatgaaggtgcctctaaaggagaccctgttagaaatgagttcagtaatgattctcagtgttaacaaacatgcagtttattaaagcagaatctctaaagaaggaacctttccagcccatcagaatgaaaccaggcagatcagaagggtcatgctctttctctctgcctggataacgttaattacacttttttatatcagagtatattttcttctgatctctttcagatctgattcaaattgcagttgtcaaagcaataagacgcaaagggaaactgcaacaacaacttaagtgcctagaaaggataaaggggtcactgcggatgaattgtgatgtggaatcaaaatacaatataaatgtaattaaccaggttcagggcaacccacacgggggctctgcccacccagtgggttacttagagtccttttctctacgattgtaaattcacaggagaatatttcctcatattagcacagcttgaattggattgctgatcgttttcatccttgttttatgagtcattcgcagcgcatcaaagagagggcgcgttcacgctgaatgccgccagcctccttctccacggcagagtgtggtgggtggggacagtctaactgctgc

SEQ ID NO: 28117 - DNA, 861 bp, Bovine  19866880512090
  misc_feature (1)..(1): n is a, c, g, or t
naatgtattaaaaaactcactgtcttttatattttccccatcaccaaatcataatataaacagctaccactttcctcttttatagcacccttttaactgacttcaaggtcaaaattagttactgagaattttccttagctcaaatatattcctgctgtagcatttgatgatccaaaaaatgtgattaaaactagaagaaagcagggatggggagaaaatggcatgatggaccttgactaatagttaagcaagtgtcaaatcatagcaaaatctgtactcatctggagaatggtcataaaggcttctccatccatctgctcatccatccattttccatttattcagtatttgttgagtaaatgatgaaacgatgaaaaagagaggacattcttaaagaatttaaatcttaataagcaaggtgacatgaacacatatttcttttatgaaagagaggttatcacagtatggactggagtatcagggatggttgccggtgtatggccagggaagggcttaaaagttacagaggcactgaaggtcaaacctgaaagatttgaacatgtgagggaggtgaggtagaaatcatgtttgcattttaggcagagagaataacatgagcaaaatcctaagtgaagaagcaaccggctatgttcaagaaaccatggactatttgatttttcaagaacaaagaatgtcttaaggggagtaacaagagataatttatgcctacttctttctcaggaaactttgtcccatgtctccaggatgtctggacacccttgttctgtcttcaccagtatcctgtgcttatctgcctcacagctaaatggctagaatatatggcttcaaaaagtctggtag

SEQ ID NO: 28118 - DNA, 1620 bp, Bovine  19866880582409
  misc_feature (1)..(1): n is a, c, g, or t
ntgacgcttgcttaataaaagtagatagatagaggtttcgtacctctcaaattcaccatgaggaagaaccacattttaaaagcttttaatacaccttgcatctatgatttttaaaacatactaaaaattaattatgagaaaaagcaaatagaaaagcattagatttgatagatataaaattactctgccaaattgctattaagagtatcaaaatcttcactttcaatttctgtgcatgtcttgatgtggaccattattggcccattattggcatctgagtagcactggtttagaggaattggaaagccagatacttgagaaaagaggagagaagcagaataagatggaatataaggtttttatgttctccgcatacctctgttctctgtgttggctttgtagaattctgtcccagtagcaagtaccccatcatggccaagggcaatggcatatctcattggcagagagtagcaagggaagcagacaaggaactcaagggtgcctgcatgccccttggcagatgctgaagaaagctgaagtgtggggagttgggtctactataggtccctgaagcaagacatctagtgactatgatagaggctgtgttgggtagcctagggccaagctatagatgaagaatatgcttgagtcttagaggggtttgctgtaccagggtggcccactgtggggccaaatcactcaggaagagtaggatgtgactaaactgagagaggggctctaggctatatctgcttcaaactttagcagcagatgcctgcaagctcggtggttcctggtggttcctgagagacaccagaagcagcccttcttcagaaaagaaaggagaggacaatacaaagtaggattccattcatccagggccttcttggagaggacctgggtggaggaagaacctgtaggactgagtcttttatttgaaagagattaagcatttaactcaactgactattgtatcagacaatttatgaagttgaactaaagactccctctgatagatatcaaggaaaatccaataggctgcaaagaaaataaagaaaatgtattttctttgcacatctggctgtaatgtttaaaactataaccgctcttcccaaggaacgtgcatatctgtgggcaggaggaatgaatccttggtaaattagccaccctctgccctccctgacatcttcctttgaagaaatgtggagacaataactttactcacagttatatcatttctggaataggcatggtcagcagatagagtttgaatttcctaacctcactataactcattttcttaaagaatgtctgtaaaaatgaatcttctaccttccagccaagtcatttggcctttcttcatgccattcatttagagtttgcctacaagtgaaagtacattggcaaaagggagcacaggatgactcagattcccaagggctttgtaggctctaaaataatagtcagaaccccaccttgaagtaagtaacaaaaggattactaaagggaccaatttctagatttagtaaatgcaattcctggtgaatgacatctcttccaaccaccagcagaggggaagggagactcattttctttcagtatcaatttatctcgactttt

SEQ ID NO: 28119 - DNA, 2225 bp, Bovine  19866880651015
  misc_feature (1)..(1): n is a, c, g, or t
ntgtaatgcgattgaacagtatgactttggcttatcaaaacaaaccccactgttgactggcaggaaatgtgattcattcttttggtactgctgaggctgttacctgctggatgggatggtgaggtttggggtttgggtttttttggggtttgggttttttttggttttttgtttttttaaggtttctgatccttggtcagaattttactaagccaatttgaccatagccccttgaactttcaaagataatttgtcaaggaataaatttattatttcagcttcatttttaagtaaaaatatttggatagtagattggtgttctctattccttctgtgaagcttctgaaagtgtgtgtaaaacggcattttttttaaacgggttaatatgtgtagaagagagaaaatgaagaattgctactcttgacaaaattgagaatcatagcctccattctgtaacatataaggaataccacactaataatcccttattccaaggcagtattttcagctctctgaatactgaagtgtgtatcattaattcactaattcatttcagaatcacttagtgagcaccaactatatgtcaagctatggtttacacagatatgtaagacgctgttatggagaagctcctagtctatttggagatactcgcatattaaaatttcaatgacatttttcagtggaataagacaaaggctaggggttggtgtaaaaatatgtcccagtggatgtaaaggggcaggggtggagataagtgagaatcagaacagtcctctgagataaacattctaaacctcactttacatgaaaggagaataaagaacgaacagttaaaaaagatttatgcccaaaactccatatgtggttagtgattattaaactttcagtgaacatgagaattttctggagagtttatcaagtatatatcccatgagtcctcactctataaaaatcaaagtgaaaataagcactccaggtgattatcatgcccccaagcatgagaattccctgcctgtactaattgtttgattaatcataatctgtgcctacttcctttcagaaaatggcccagttttctgttttgttaccaagacattaaaacagcatggctgcccaggagacttcgaaattccagtccttttgggaattcctgcttgagaaaacagaaaagatatgcagctttcatgcccttgctccccaaggaagaagtgataagacattgcactcatcagagatgccttctcaaagacttggactgcttcaaataattgaaggaaagcaaattacacttccagaaaagaaaaaaaagaagacacctttcaccattcccctattaaatttgtaacaataaaggtagtcagtaatattcctgtgctgccaaggaatttgaagaagaaaagctcttagactatttactggtgtgactgtaagttggtatagtcttttttgagggcagtttggtaaaatgtatcaaaggcttaaaaaatactctttgtgctggttaaactcctaggaatttatctttaaggaattatcagagatacatataaataattatgaataaagaaggatgtataacatagttatcatagcaaatattcaaaacaatctgaatatctaacaaatggaggtaaatcatggttaagctcttaattagactgtgaagcagccaactgaacatcatagctgcacataatgtacaaaagacattgttgctgtataatatggaatgaggatgtgtaagcattttacaatactgattttgttttaaaattctacatagttatgtacaaagaatagaaagaaatatatgcactcttctgttattgtatttgggaagagggatactggataattttttattttattttttccatttcttcacatttttctacaatgaatataatcgaatagtgaagttttagaaataaaaatgggattagaaagatccagttcttgaaaacccactgtttttggtaatgcaacagaagttaaaacggcactgcagttccatctttatattgttaaaaaggccattaatgactgtatggttagaacagtatttggatttgcaacaatgtgagaaaagctgagtgtttaatatggagctaatcttaaattatttaagagaccatatacacacattatagtgtgtgagatatttttaaaactggtattgacttttgtttctacaccttttcagattgagaatattttacata

SEQ ID NO: 28120 - DNA, 1250 bp, Bovine  19866880676457
  misc_feature (1)..(1): n is a, c, g, or t
natgtggcagttattcttgaacttgctctgcctagcgtagtgtctggtgaatataggtgcttagttgttagactgatagttaagaatctaagaatattgaaaagcataagagagatattacttatctaaccagattctataggactaaaatacttagtagatgtgtcaggaacaattcactagcccacaaatcagtctgggacaggtgaggcaaagactgctaactgataaagttgcttcagtcttcgtctgtacgaccccatagacagcagcccatcaggctcccccgtccctgggattctccaggcaagaacactggagtgggttgccatttcccttctccaatgcatgaaagtgaaaagtgaaagtgaagtctctcagtcgtgtacgactcttcgagaccccatggactgcagcctaccaggctcctctgtccatgggattttccaggcaagagtactggagtaggtgccattgccttctcggggggcaaagattatgctcctcttatttcacaacagcacctctggcatatgtagcttgatgtctggcacatagtaagtgctctgcttattacatagttgctgagccaatattgtgagaccattattcttataagcctgccatagggatacaatatgtgtacccaacctgtatatggttactatgagaatgcccttattttaaaaactgcatccccatgccaaaaaaggggaactttagtcaaaacagggaattggtgacctactccatcagtgtaggcataaatttcttctttcaggctctccatgatataatttagcaacaatcaagatcctctgactttcccactgtttattggctcatgttacaactaatgggtaaataggatttgaataaattacatctttatgtgagcactgaagaacagcctgatgagctaatgggccaggtgcacctcatctaactcagaagcctctccttttctggcagaacttcaacaactgcatttcaaagtaacgtgatttggccagcccttccacacctggggagacctttaatgcttctgaacacaaatacagctccacacccacccactcactcacccacacgtcttttcccagactgagcttctaatggactgatgctccctttacaatgacacttttattttcccctgagggtcctcatatattcttcagtaaactcgatgccatgcagttgttgaacaaatcaaccgtgaatcagtctgtgagagtggatgatgatag

SEQ ID NO: 28121 - DNA, 2478 bp, Bovine  19866880831793
  misc_feature (1)..(1): n is a, c, g, or t
naatattaaaagtgtaaaagaactaaaatatagaagattaatgagataatcaataaattaacaagaacaagtttatgcaataaacttgataatttatttaaaaatctaactcaagaagtaaaagaaaaatacgtattattctataaccacaaagattgaattcatattttaaaattctatgaagaaaattccagggctggatggctttagatggttagtttcaccaaacgttcaaaaatccaatacttacaatcttatagaaatttttctaaagaattgaagaagagggaatgctccccagctctttctgacccctgattggaaaggatagtataaaaaaggaaaatcaaaaggtcaatctcactcctgaacagatttttttttaactatcaaattaaactcaacattatatgaagaagacaatatctcatggacaagagtggtttatcctaggaatgcaatgttagtttaaagtagacagtgtgacagtggagtgggagtaggtaaaatcacggttaaacttcctctcccatgctcagagtgaaaactgaaaatggatctcctcttccacagcgataagctctgtgataccattaaacatcctgaggaaccagttttttcagacattatatctttgcatctattcgtttggaaataaaactgggtttcagctagttttcttaagcaaagggatatttcagacattatatctttgcatctattcgtttggagataaaactgggtttcagctagttttcttaagcaaagggataatttactgacaatcgaagattataggaaatgctgtctctatattataggcattgataatacatcatctggttattaacaagttttctgttttgatagacccaaactacgggggtgatcccttcattcttctaacctgagacctcagtgaaggcacttagaacaagcattctaaaatgggaactgtgagtcctaaacacctgtgtgtgtgtgtattggtaggactggggggaggcagtagaagagagcattgtcttgactggttctctacaataatggttgccatgtgctacagacatgatgctaagtgctttcaacatattttctcatttaatcaacacaattttgtaagaaaagtcctagggaacatcagaccacttgtccatgcatctgctataaaaagatgttagtaaagagaacaaagttttatgaccatataacaaaggtattttccccttatgtagtgactggaagattctgattataatcaaataatttaaagagtcagcagactacaaacctacatgtcgttaactgatgtgggaaaaggagcagagttcagtccccagttgacactcttctcgttttaaaatgatgagaagtttttttggatgctagtctgggaaaaggagtaaagatgattcatttacaaatttgctgaacggcatctattcgagctgtgccttggtcactgatgttgtaagaaatatattcttgcacactgttatttttttaaatctcataaatgtatcatgaatttaaaaatccccaatatttctttatgatactaacaataagccctattttctctcatcagaagcatccaggttcattgtcaacccctcagtctctctcagctttagtttatacttaacgtgcagatattgcaagcattagaaatatcgtgtgcaaggcacctcatatactgcctgtcacacggtaagtgctcagttaaaggcgtccatcccatcgcttctgctttactttctatataagcagattgctatgatttttgcacaagaaagcatatgttctttcattataacatctttcaaactacttagttcctttatcataataagtgaggaaacttacaaatgtctaatggaaaaagcttaagacactatcttcaggtaagatgttgttccttataagacttttgtgatgcaatccctatataaaacttttttcagccttcttaccagtccctatctgcaaccttatatggcagctaaacttagttatctgtatctcttttacacatgatattcccttcagttcagttcagtcactcagtcatgtctgactctttgtgaccccatgaatcgcagcacgccaggcctccctgtccatcaccaactcccgttcactcacactcacgtccatctagtcggtgatgccatccagccatctcatcctctatcgtccccttctcctcctgcccccaatccctcccagcatcagagtcttttccaatgagtcaactcttcacatgaggtggccaaagtactggactttcagctgtagcatcattccttccaaagaaatcccagggctgatttccttcagaacggactggttggatctccttgcagtccaagggactctcaacagtcttctccaacaccatagtttaaaagcatcagttcttcagcgctcagccttcttcacagtccaactctcacatccatacagaccacggaaaaa

SEQ ID NO: 28122 - DNA, 1934 bp, Bovine  19866880844931
  misc_feature (1)..(1): n is a, c, g, or t
natgtacaaaagttatgtctagatctgtaatttggtttttctgtaactgagtatttctcttattctcaatcactggattgggatgtgggtttatagattgtggacattcttctttaaacaaatgagctcaaagactacctgaactacatactacaagatacattaatatattgttcagctaacatgtaacttctaccagagatttgtttcatgccttcttgtgctcagaaatagtatgagttaattccactggaatttctttgccctttgctctgctgaggttgaatgtggttggaagccagaggtctagggggaaaattgccaatagttgaaacaatatctcctgtcaaatttgtttgatctctttgtgttttttaccctctagatttgtccttggatactttccccctgcattaggattctttagctttctacagagaccattttaaataattgacaccaaatgaaaattggtatttaggttggggatttcttatctcatatactgacttttgtagaatattttgtacactgtatttccagttaagaaaatttgcctctacctagccctatactaataattattattttataataatgaatagtatcccatttggaatagagctggaaacggacatcttcatcaattaggttcacatttataggtaaattgtatgtggctactaaattgtagtaatagttatgacaaacctagatggtgtattaaaaaagcagacatcactttgccgacaaaggtccgtatagtcaaagctgtggtttttctagtagtcaggtatgtgagagttgtgaccataaagaaggcggagcaccaaaaaattgaggctttcaaactgtggtgttggagaagattctggagagtcctttggagacctaggagatcaaaccagttaatcctaggggaaatcaaccctgaatattcattggaaggactgatgttgaagctccaatattttggccacctgatgtgaagagctgactcattgggaaagactctgatgctgggaaaaattgagggcaagaggagaaggtgatgacagaggatgagatagttggatggcatcactgactcaatggacatgagtttgagcaaactccaggagatagtgaaggacaggaaagtctggtgcactgcagtccatgggggtgcaaagtgccagccacaacttagtgactgaacaacaacaaagactgactcagagggctaaattttatttcaggtagtgaaaagcacccagagttttttgaaaaataattatagttgttcaaagtaaaattctaaagaaagctaattttatcttgtgtgtttaactacttcattcttgctgaccctttaaaaaattaataagatactcttttaaagcaacaggaaaaatatatatttgtatttatacatctgcttatttatattaaaaaaacaggaagtacaaaaagaactatatgaaatgaaactttttattgacagaaatgaaaaaaactgcaaagagtaactaatttaagtatacttttagatggccttgcctgtggaactatgttaaatgttctgaacatgtagaaaaaaattagtaagtgtggagaaaaaacgctaatactgaacagcaacaaacaatggatcaaattatcttttaaatgattaataagaagatgcaatatgaaataagggaagaggagtagaatctgtggtttcaaactggaagtaaatgaaacatgactgtgtgactaaaattttataaaaataatgtacatatggcaatttcatatcaaaactgcttaatttttcctagctctgagtgctgaataagactgctgctgctgctgctgctcctaagtcgcttcagtcttgtccgactctgtgcgaccccatagacggcagcccaccaggctcctccgtccctgggattttccaggcaagagta

SEQ ID NO: 28123 - DNA, 1072 bp, Bovine  19866881036158
  misc_feature (1)..(1): n is a, c, g, or t
nttccccttcaatggactgtcccccaatgcagaggttccacataccctatctgcgttaactcccacaagactgagtgcccgtctctcttttcttgtgacactatggccagcacaaaaacataccaccttgcatttactttccctctatccctacctcatttcctttttgtccttttctcttgctaccctggaatcacaattccaaatacagtttcagcttcaacctgttttcctggacctgagctgagaaactagtttattattctgtactagctaggtgcccagcactcttctaggagctttaaatatattctcactgcattctttaaacaattcaatgacatcagtatccttagtacgatcatttctgttttacaggtaagaaactggggcacagaaatattgaggatctttcacaaagttctatagctagtaatgacagacctaggatttgaagcacagatggtttgcctctagggacaaggccctatgctctatctgcagttgcattggtcttcaagtctgtttttatggttaaatgtatagatagtgccaattccactgggtcaaaaaggctgccacatattatccaagagagtactgctgagtcagacataatatgagagatatttgtctaattataaaacttgaatcgagtaaaggaagatcaccatccagaggccttggaggaatacttgggaggtctgggttccctctggcttcctcagtttagttagctatttgaatttggataaatcatataaccactttgtacccatttgctagctatagcatgaatgtataatccctaaactgcttgcttcacatgacttttgtaagaactgagtaagtcatattcattaaaacgtttctaaatactgaattattactactacctcaatgagaataattctactaacaaaaggcttactaaatattatgaaaatttatatcagttttttatatccccaaaaaaggactgaagtagacttttgaagagacttgaatataacaaaatcatacaaattgaaataatcaataaaaataaggcaaaggaaagtgtgccaaccaa

SEQ ID NO: 28124 - DNA, 1248 bp, Bovine  19866881061561
  misc_feature (1)..(1): n is a, c, g, or t
ntgttgaaaaaactacagtcaaatcatagaaaatcatgcttcctgggggcaaatgaagaaatgcaaaggcacaggctagaaaaaaagataacaataccatatgatatcacttatacgtggaatctaaaatatggtacaaatcaacatatctacggaacagaaacagactcacagatagagagacttgttgccagtggtggaggagggtaggagagggaaggaatgcgagttcctattacatataggatggataaacagcaaggtcctactgtatggcaccagggactatattcaatgtcctgtgacaaatcatagtggaaaagaatgcgaaaaacaatatatatatatatatgtatcactgagtcactttgctgtacagaaattaatacaacattgtaaatcaactatacttcaataaaattttttaagattatattaaaacaattggatttcttttccctctttcaaaaataaaaagcctgtaggaaacctcgccttgagcatttttgcccaatatcatagcaatcttcttttgctttccctcaaaaacaaaggtaatctgagtgtcctccagcacacacgtgcagtttagattcattttagaggaacagtccgctggtgtctctggcatagcacgagactacgggattgtggaagcattttcagcagacccggaatactgattcatcactccaaactagccctgttctctagctcactcctaagaatcaatattcttttcaaatgttctttatttttatctacaaataagaaaaagagtttctttacaatcctaaaaatggcattataggaggcaccaatttgaatggcaactccaatgtgctctggtggagggaagaaaacattgggagcttaaaaggcaacaaagagaaattacacaggttatctttacagagctgtgattggtgctggcaggcattcagtcacttgctggcagcagataggttgctaggctgtgatctctaaggaataaggaattctaggtggtctccagaggcctggatccaaagttcatgttgtgtcaggggtggacacgtgtaagctctactttcttaatgaccagaaagctctactttcttaatgatctccctctcagatcactttgaaataaatgacttcatttcttattgatttaagccacggatacttaaagagatttgtgttataacacctagtactctcagctaaccatcatttatggccccctcacctccctactcttttcaa
